United States Patent Application Publication US 2018/0126003 A1 - sequence listing, part 56

SEQ ID NO: 98601 - DNA, 642 bp, Artificial Sequence
  derived and/or modified sequence
atgcccaacttcgtggtggactggagagtgtacaccgacagcctgttcctgaccgtggacttcggcctgtgcgccgaggagagcagcaccagcagaaagagaaccaccgaggacgacatccccaccctgcccaccagcgagcacaagtgcatccacagcagagaggacgaggacctgatcgagaacctggcccaggacgagaccagcagactggacctgggcttcgaggagtgggacgtggccggcctgccctggtggttcctgggcaacctgagaagcaactacacccccagaagcaacggcagcaccgacctgcagaccaaccaggacgtgggcaccgccatcgtgagcgacaccaccgacgacctgtggttcctgaacgagagcgtgagcgagcagctgggcgtgggcatcaaggtggaggccgccgacaccgagcagaccagcgaggaggtgggcaaggtgagcgacaagaaggtgatcgaggtgggcaagaacgacgacctggaggacagcaagagcctgagcgacgacaccgacgtggaggtgaccagcgaggacgagtggcagtgcaccgagtgcaagaagttcaacagccccagcaagagatactgcttcagatgctgggccctgagaaagtag

SEQ ID NO: 98602 - DNA, 642 bp, Artificial Sequence
  derived and/or modified sequence
atgcctaatttcgtggtagattggagagtttatacagattcactctttctgacggtcgacttcggcctctgcgcagaagagagttccacatctaggaagcgcacgacagaggatgacatcccaaccctcccaacgtcagaacacaaatgtatacactccagagaagatgaggatctcattgagaatctggcacaggacgaaacctctcgtctagatctcggatttgaggagtgggatgtggcaggtctgccatggtggttcctaggcaacctgcgctccaattacacacctcgcagcaacggcagcacggaccttcagaccaaccaagacgttgggacagcaatcgtctcagatacaaccgacgatttatggttccttaatgaatctgtcagcgagcagctgggagtcgggataaaagtagaggctgcagacacagagcagacgagtgaagaagttgggaaggtgtccgacaaaaaagtgatcgaggtaggcaaaaatgacgacttggaggatagtaagagcttgtccgatgatacagacgtggaggtcacctctgaggacgagtggcaatgtacggaatgtaagaaatttaatagcccatccaaacgctattgctttaggtgctgggccctgcgaaaatag

SEQ ID NO: 98603 - DNA, 642 bp, Artificial Sequence
  derived and/or modified sequence
atgcccaactttgtggtggactggagggtgtacacagacagcctcttcctgactgtggactttggcctgtgtgccgaggagagcagcaccagcaggaagaggaccacagaagatgacatccccaccctgcccaccagcgagcacaagtgcatccacagcagagaagatgaggacctgattgagaacctggcccaggatgagaccagccggctggacctgggctttgaggagtgggatgtggccggcctgccctggtggttcctgggcaacctgcggagcaactacacccccaggagcaatggcagcacagacctgcagaccaaccaggatgtgggcacagccatcgtgtctgacaccacagatgacctgtggttcctgaatgaatctgtgtctgagcagctgggcgtgggcatcaaggtggaggccgctgacacagagcagaccagcgaggaggtgggcaaggtgtctgacaagaaggtgattgaggtgggcaagaatgatgacctggaggacagcaagagcctgagtgatgacacagatgtggaggtgaccagtgaagatgagtggcagtgcacagagtgcaagaagttcaacagccccagcaagcgctactgcttccgctgctgggccctgaggaagtag

SEQ ID NO: 98604 - DNA, 697 bp, Artificial Sequence
  derived and/or modified sequence
ggggaaactttatagtcatcttggtacgtggcgagggtttcatatgttttctgaattatgcctaattttgtagtagactggagggtttatacagatagcctgtttttaacagtagattttggcctttgtgcagaggaaagttccacttccagaaaaagaactacagaagacgatatccccacactgcctacctcagagcataaatgcatacattctagagaagatgaagacttaattgaaaatttagcccaagatgaaacatctaggctggaccttggatttgaggagtgggatgtagctggcctgccttggtggtttttaggaaacttgagaagcaactatacacctagaagtaatggctcaactgatttacagacaaatcaggatgtgggtactgccattgtttcagatactacagatgacttgtggtttttgaatgagtcagtatcagagcagttaggtgttggaataaaagttgaagctgctgatactgaacaaacaagtgaagaagtagggaaagtaagtgacaaaaaggtgattgaagtgggaaaaaatgatgacctggaggactctaagtccttaagtgatgataccgatgtagaggttacctctgaggatgagtggcagtgtactgaatgcaagaaatttaactctccaagcaagaggtactgttttcgttgttgggccttgaggaagg

SEQ ID NO: 98605 - DNA, 642 bp, Artificial Sequence
  derived and/or modified sequence
atgcccaacttcgtggtggactggcgggtgtacaccgacagcctgtttctgactgtcgattttggtctgtgtgccgaggagagctctacctccaggaaaagaacaacagaggatgacatacccactttgcctacctcagaacacaagtgtatccacagcagagaagacgaagacttaatcgagaaccttgcgcaggacgaaacatccagactggatctgggtttcgaagaatgggacgtggcagggctcccgtggtggttcctgggaaatttacgcagtaactacacaccgcgctctaacggatccacagatctacagacaaaccaggatgtaggaacagctatagtcagtgacaccacagatgatttgtggttcctgaatgaaagtgtcagtgagcagctgggagttggcatcaaagtagaggcagccgacacagagcaaacttccgaagaggtgggtaaggtctctgacaaaaaagtcattgaggttgggaagaatgacgacctagaagacagtaagtcgctgtccgacgatactgatgtggaagtgacatcggaggatgagtggcagtgcacagaatgcaagaaattcaattctccatcaaagcgttactgcttccggtgttgggccttgcgaaagtag

SEQ ID NO: 98606 - DNA, 642 bp, Artificial Sequence
  derived and/or modified sequence
atgcctaattttgttgtggactggagggtgtatactgacagcttgttcttgaccgtcgattttggactgtgcgccgaagagtcctcaacctctaggaaaagaaccaccgaagatgatattcctacacttcctaccagtgaacataagtgtatccatagccgcgaggatgaagacctcatagaaaatctagcacaggacgagacctccagactagatctgggtttcgaagagtgggatgttgcgggactcccgtggtggttcctgggcaatctgcgctccaactatacacctcggagcaacggatccacagatctccagaccaatcaggacgttggcaccgccatcgtatctgacacaaccgatgatctctggttccttaacgagagtgtgtccgagcagttgggcgttgggatcaaagttgaagctgcagacaccgagcagaccagcgaggaggtggggaaggttagcgataagaaagttattgaggtgggtaagaatgacgacctcgaggactcgaagagcctatccgacgacacagatgtggaggtgactagcgaggatgagtggcaatgtacggagtgtaagaagtttaatagcccatcgaagaggtactgttttcgctgctgggcgctcaggaagtag

SEQ ID NO: 98607 - protein, 631 aa, Artificial Sequence
  derived and/or modified sequence
MEVLIGDPITTCLSPSVYDIICNLGFQLRENCDINSIVTQNGEVCWKTITDCVSYTESEQGLDYWGSVRLLGPVCEAVHSHFLSLTKGQFEIRYAPWFQWTSFPELFPEIFDALESLQSPAISLSLMKLTSCLERALGDVFLLIGKECPFLLRDLLSSEELAQVFSQSVMNVLKVFVGSPCGLNLRNVLWHGFASPEEIPPKYCSMMILLTAGLGQLLKSYLQNTKLTLAHRSFISLTNLEDLIVFPDVTYEVLSVLEEVMMKSAFILKIMLPYWEVALVKFKSHRFADCAILLLTQLETGLRNVFATLNRCPKRLLTAESTALYTTFDQILAKHLNDGKINQLPLFLGEPAMEFLWDFLNHQEGPRIRDHLSHGEINLHEFSKETTNQLLAFSLVLLLRFVDDCLLSVFKEKSAVELLISLAEGYSSRCHPVFQLKKQVLSCEESIRVWALLPFPEELTRQAVRLEDNSETNACHSLITKMTDELYHHMPENRCVLKDLDRLPTETPTSDTPLALAPRKPQPCRCRRRVRPSIRLLSPVLSLILLLIALELVNIHAVCGKNAHEYQQYLKFVKSILQYTENLVAYTSYEKNKWNETINLTHTALLKMWTFSEKKQMLIHLAKKSTSKVLL

SEQ ID NO: 98608 - DNA, 2000 bp, Artificial Sequence
  derived and/or modified sequence
attcacgcgcgccgcagcggggcaccggaagttatggaggtattaataggggaccctattaccacatgtctttctccctcagtgtatgatataatttgtaatcttgggtttcaactcagagaaaattgtgatatcaatagcattgtaactcagaatggtgaagtatgctggaaaacaatcacagactgtgtgagctacacagagtcagagcagggtctggattactggggaagcgtgaggctgctgggccctgtgtgtgaggctgtccattcacatttcttatctctgaccaaggggcaatttgaaattcgatatgcaccgtggttccagtggacaagttttccagagttatttcctgaaatatttgatgccttggaaagtctacaatctcctgctatttctcttagcttaatgaaactgacatcgtgtctagaacgagccttgggtgatgtatttttactgattgggaaggaatgcccctttcttttaagagatctgctttcatctgaggagcttgctcaagtcttcagtcagtctgtgatgaatgtgctaaaagtcttcgttggctctccgtgtggtctcaacctgcgtaacgtcttatggcatgggtttgcgtcacctgaagaaattcctccaaaatactgttcaatgatgatactgttgacggcaggattgggtcagttactgaagagttaccttcaaaacactaaacttacattggcacatcgctctttcatatctcttacaaacctcgaggatttgattgtttttcctgatgttacttatgaggtgctttcagtattagaagaagtgatgatgaaatctgcttttatattaaaaatcatgttaccatattgggaagttgcactggtcaagttcaagtcacacaggtttgctgactgcgccatattgttgctgacacaactggagactggacttaggaatgtttttgccacacttaacagatgtccaaaaagactcctgactgctgagtcaacagctctttataccacctttgatcaaatattggcaaaacacttgaatgatggtaaaatcaatcagcttcctcttttccttggagagcctgctatggaatttctctgggatttcctgaaccatcaggagggtccccgcataagagatcatttaagccacggggagatcaacttacatgaattttcaaaagaaacaactaatcagttgcttgcattttctcttgtactgctactcagattcgttgatgactgtctgctatcagtttttaaggaaaaatcagccgtagaattgttgattagtcttgcagaaggctatagttctcgctgtcatccggtttttcagcttaaaaaacaggtgctgagctgtgaggagagcatcagggtttgggctctgctgcctttccccgaagaactcactcggcaagccgtcagattagaagataattctgaaacaaatgcctgccactctttgattacaaaaatgacggatgagctgtatcaccatatgcctgagaatcgttgtgtgttaaaggacttggatcgtcttcctactgagacaccaaccagcgatacgccgctagccctggctcccagaaagccgcagccttgcaggtgcagaaggagagtgaggcccagtatcagactactgtcccctgtgctcagcctgatactgttactcattgcgctggagttggtcaacattcatgctgtttgtgggaagaatgcgcatgagtatcagcagtacctaaagtttgtaaagtcgatcttgcagtacacggagaacctggtggcttacaccagttacgaaaagaacaagtggaatgaaactatcaatcttacacatacagctttgttgaaaatgtggacttttagtgagaagaaacaaatgttaatacatttagccaagaaatccacaagtaaagtactcttatgaaaacttgtaagtcaggatgcttttaattttaacagattttaacagcgtgtaaattaaaaacccaaagacag

SEQ ID NO: 98609 - DNA, 1896 bp, Artificial Sequence
  derived and/or modified sequence
atggaggtgctgatcggcgaccccatcaccacctgcctgagccccagcgtgtacgacatcatctgcaacctgggcttccagctgagagagaactgcgacatcaacagcatcgtgacccagaacggcgaggtgtgctggaagaccatcaccgactgcgtgagctacaccgagagcgagcagggcctggactactggggcagcgtgagactgctgggccccgtgtgcgaggccgtgcacagccacttcctgagcctgaccaagggccagttcgagatcagatacgccccctggttccagtggaccagcttccccgagctgttccccgagatcttcgacgccctggagagcctgcagagccccgccatcagcctgagcctgatgaagctgaccagctgcctggagagagccctgggcgacgtgttcctgctgatcggcaaggagtgccccttcctgctgagagacctgctgagcagcgaggagctggcccaggtgttcagccagagcgtgatgaacgtgctgaaggtgttcgtgggcagcccctgcggcctgaacctgagaaacgtgctgtggcacggcttcgccagccccgaggagatcccccccaagtactgcagcatgatgatcctgctgaccgccggcctgggccagctgctgaagagctacctgcagaacaccaagctgaccctggcccacagaagcttcatcagcctgaccaacctggaggacctgatcgtgttccccgacgtgacctacgaggtgctgagcgtgctggaggaggtgatgatgaagagcgccttcatcctgaagatcatgctgccctactgggaggtggccctggtgaagttcaagagccacagattcgccgactgcgccatcctgctgctgacccagctggagaccggcctgagaaacgtgttcgccaccctgaacagatgccccaagagactgctgaccgccgagagcaccgccctgtacaccaccttcgaccagatcctggccaagcacctgaacgacggcaagatcaaccagctgcccctgttcctgggcgagcccgccatggagttcctgtgggacttcctgaaccaccaggagggccccagaatcagagaccacctgagccacggcgagatcaacctgcacgagttcagcaaggagaccaccaaccagctgctggccttcagcctggtgctgctgctgagattcgtggacgactgcctgctgagcgtgttcaaggagaagagcgccgtggagctgctgatcagcctggccgagggctacagcagcagatgccaccccgtgttccagctgaagaagcaggtgctgagctgcgaggagagcatcagagtgtgggccctgctgcccttccccgaggagctgaccagacaggccgtgagactggaggacaacagcgagaccaacgcctgccacagcctgatcaccaagatgaccgacgagctgtaccaccacatgcccgagaacagatgcgtgctgaaggacctggacagactgcccaccgagacccccaccagcgacacccccctggccctggcccccagaaagccccagccctgcagatgcagaagaagagtgagacccagcatcagactgctgagccccgtgctgagcctgatcctgctgctgatcgccctggagctggtgaacatccacgccgtgtgcggcaagaacgcccacgagtaccagcagtacctgaagttcgtgaagagcatcctgcagtacaccgagaacctggtggcctacaccagctacgagaagaacaagtggaacgagaccatcaacctgacccacaccgccctgctgaagatgtggaccttcagcgagaagaagcagatgctgatccacctggccaagaagagcaccagcaaggtgctgctgtag

SEQ ID NO: 98610 - DNA, 1896 bp, Artificial Sequence
  derived and/or modified sequence
atggaggtcttgatcggggatcccatcactacttgcctttcgccatctgtttacgacatcatctgcaaccttggcttccaactgagggaaaactgcgacatcaattcaatcgtcacacagaatggtgaggtgtgctggaaaacgatcactgattgtgtgagttacacagaaagcgagcaaggccttgactactggggctctgtgcggctgctcgggcccgtttgtgaagcggtccattcccattttctgagtctgactaagggccagttcgagatcagatacgctccctggttccagtggacgtcatttcccgaattattcccagagatattcgatgctctggaatctctccagagccctgccatctcactgtccctgatgaaactaacctcttgcctggagcgagctctgggagatgttttcctgctcatcggaaaagaatgtccctttctgttaagagaccttctcagttctgaggagttggcccaggtgttcagtcaatcagtgatgaatgtacttaaagtgtttgtgggatccccgtgcggccttaacctccgcaacgtgctgtggcacggcttcgcgtcaccggaagaaatacccccgaaatattgcagcatgatgatactgctgaccgcaggtcttggccagttgttgaagtcgtatctgcaaaacaccaagctgacactggctcaccggagtttcatatccctgaccaacctcgaggatctaatcgttttccccgatgttacctacgaggttctgtccgtgctggaagaggtgatgatgaaaagtgcctttatcctgaagatcatgctcccgtattgggaggtcgctttagttaagttcaaatcgcatcgttttgctgactgtgccattcttttgcttactcaacttgagacaggactccggaatgtatttgccacactgaatcgctgtccaaagcggctgcttacggcggagagcactgccttgtataccacatttgatcagatcctggcaaaacatctgaatgatgggaaaattaaccaacttcccctcttcttaggggaaccggctatggagtttctctgggactttcttaaccaccaagagggccccagaatccgggatcacctcagtcatggagagatcaacctgcacgaattttcgaaggagactactaaccagcttctagccttcagcctggtattgttgcttcgttttgtcgacgattgcctgctgagcgttttcaaggaaaagtcagccgttgagctcttgatctctctcgcggaaggttatagttcacgctgccaccccgtgtttcagctcaagaaacaggttctgtcgtgtgaagagtccattagagtgtgggctctcttgccctttcccgaggaattgacccgtcaggctgtcaggcttgaagataacagtgagacaaacgcttgccattccctcattactaagatgacagacgagctctaccatcacatgccagaaaacaggtgcgtcctgaaagatctcgatagactgccaaccgagacgcctacttcagacactcctttggccctcgccccacgtaagccacaaccctgcaggtgtcgcaggcgggtcagaccgtcaatccggctcctttccccagtcctctctttaattctcttgttgatagctctggaactcgttaatatacatgcagtgtgtgggaaaaacgctcacgaatatcagcaatacttaaagttcgtgaagtctattctgcaatacactgagaacctggtcgcatacacttcatacgagaaaaacaaatggaacgaaactattaacctcacccacactgccctgttaaagatgtggacattctcagagaagaaacagatgctaattcatctggctaaaaaatcaacatcaaaagtcttgttgtag

SEQ ID NO: 98611 - DNA, 1896 bp, Artificial Sequence
  derived and/or modified sequence
atggaggtgctgattggagaccccatcaccacctgcctgagccccagcgtgtatgacatcatctgcaacctgggcttccagctgcgggagaactgtgacatcaacagcatcgtgacccagaatggagaggtgtgctggaagaccatcacagactgtgtgtcctacacagagagcgagcagggcctggactactggggctctgtgcggctgctgggccctgtgtgtgaggccgtgcacagccacttcctgagcctgaccaagggccagtttgagatccgctatgccccctggttccagtggaccagcttccctgagctgtttcctgagatctttgatgccctggagagcctgcagagccctgccatcagcctgagcctgatgaagctgaccagctgcctggagcgggccctgggagatgtgttcctgctgattggcaaggaatgtcccttcctgctgcgggacctgctgagcagcgaggagctggcccaggtgttcagccagagcgtgatgaatgtgctgaaggtgtttgtgggcagcccctgtggcctgaacctgagaaatgtgctgtggcacggctttgccagccctgaggagatcccccccaagtactgcagcatgatgatcctgctgacagctggcctgggccagctgctgaagagctacctgcagaacaccaagctgaccctggcccaccgctccttcatcagcctgaccaacctggaggacctgattgtgtttcctgatgtgacctatgaggtgctgtctgtgctggaggaggtgatgatgaagagcgccttcatcctgaagatcatgctgccctactgggaggtggccctggtgaagttcaagagccacagatttgctgactgtgccatcctgctgctgacccagctggagaccggcctgagaaatgtgtttgccaccctgaaccgctgccccaagaggctgctgacagctgagagcacagccctgtacaccacctttgaccagatcctggccaagcacctgaatgatggcaagatcaaccagctgcccctcttcctgggggagcccgccatggagttcctgtgggacttcctgaaccaccaggagggcccccgcatccgggaccacctgagccacggggagatcaacctgcacgagttcagcaaggagaccaccaaccagctgctggccttcagcctggtgctgctgctgcgctttgtggatgactgcctgctgagcgtcttcaaggagaagtctgctgtggagctgctgatcagcctggccgagggctacagcagccgctgccaccctgtgttccagctgaagaagcaggtgctgagctgtgaggagagcatccgggtgtgggccctgctgcccttccctgaggagctgacccggcaggccgtgcggctggaggacaacagcgagaccaatgcctgccacagcctcatcaccaagatgacagatgagctgtaccaccacatgcctgagaacagatgtgtgctgaaggacctggaccggctgcccacagagacccccaccagtgacacccccctggccctggcccccaggaagccccagccctgccgctgcagaagaagagtgcggcccagcatccggctgctgagccctgtgctgagcctcatcctgctgctgattgccctggagctggtgaacatccatgctgtgtgtgggaagaatgcccacgagtaccagcagtacctgaagtttgtgaagagcatcctgcagtacacagagaacctggtggcctacaccagctatgagaagaacaagtggaatgagaccatcaacctgacccacacagccctgctgaagatgtggaccttcagcgagaagaagcagatgctgatccacctggccaagaagagcaccagcaaggtgctgctgtag

SEQ ID NO: 98612 - DNA, 1896 bp, Artificial Sequence
  derived and/or modified sequence
atggaggtgctgatcggcgaccccatcaccacctgcctgagcccctccgtctatgacatcatatgcaacctgggctttcagttacgcgagaactgcgacattaacagcatcgttactcagaacggggaagtgtgttggaagacaattacggattgtgtgtcctatactgaaagtgaacaaggcttggactactgggggagcgtgaggttgctgggtcctgtttgtgaggccgtccattcccacttcctttccctgacgaagggccagtttgaaatcaggtacgccccatggttccagtggacttcgttcccagagctcttcccagaaattttcgacgctctcgagtccctgcagtctcctgctattagtctcagcttgatgaaactgacatcctgcttggagcgcgccttgggagatgtgtttctcctcattggcaaggagtgtcccttccttctgcgggatctgctctcatcagaggaactcgcccaggtcttttctcagagcgttatgaacgtgttaaaagtgttcgtagggagcccttgtggcttgaacctgcgaaatgtactctggcacggcttcgcctctcccgaagagataccacctaaatactgtagtatgatgatccttctgaccgcgggtcttggacagttgttgaaatcatacctgcagaataccaaactgactctcgcgcacaggagcttcatctccctaaccaacttggaagatctgattgtgtttcccgacgtgacctacgaggtgctgtccgttctggaagaagtcatgatgaagagtgccttcatactgaagataatgctcccctactgggaggttgcactcgttaagttcaaaagccacaggttcgccgattgtgcaattctcctactgactcagttagagactgggctgcgcaacgtctttgctactctaaacagatgtcctaagcgcctgctgaccgcggaatcaaccgctctgtacacaaccttcgaccagatcctcgctaagcatttaaacgacgggaagatcaaccaactgcccctgtttcttggggaaccagcaatggaatttctgtgggatttcctgaaccatcaggaaggcccccgcatcagggaccacctgagccacggcgaaattaacctgcatgagttctcaaaggaaactaccaatcaattgctcgctttctccctcgtgctgctcttacgatttgttgacgattgtctgttgtcggtgtttaaagagaagtcagcagtcgagctgctgatttctctggccgaagggtactcctctagatgccaccccgtgttccagctcaaaaaacaggtgctgtcttgcgaggaaagcataagggtctgggctctcctcccatttcctgaggagctaacccgacaagctgtgcgtctggaggacaattctgagaccaatgcatgccactctctgattactaaaatgaccgatgagctgtaccatcacatgcctgaaaaccgctgcgtcttaaaagacctcgacagactaccgactgagacgccaacaagcgacactcccctcgctctggcacccaggaaacctcagccttgcagatgcaggcggcgtgtccgtccctcaatcagactgctgagtcccgtgctttccctcatcttacttttaatagctttagaattggtcaatatccacgcagtttgcgggaaaaacgcccacgagtaccagcagtatctcaagtttgtgaaaagcatcttgcagtatacagagaacctggtcgcatatacctcctatgaaaagaataagtggaatgaaacgatcaacttgacacacacagccctgctgaagatgtggaccttcagcgagaaaaagcagatgcttattcatctcgccaaaaagagtacatcaaaagtgctcctgtag

SEQ ID NO: 98613 - DNA, 1896 bp, Artificial Sequence
  derived and/or modified sequence
atggaagtgttgattggagatcccatcacgacgtgtctgagcccctcagtgtacgacattatctgtaatttggggtttcagctgagggagaattgcgacatcaattcaatagtaactcagaatggggaggtgtgttggaagaccattactgactgtgtatcttacactgaaagcgagcagggactggactattgggggagtgtcagacttctgggcccagtttgcgaggctgtacattctcactttctaagtttaactaagggacagtttgagatccgttacgctccctggtttcagtggacatcatttccagaactgtttccggagattttcgatgcactggaaagcctgcaatcacccgcaatcagcctgagtctcatgaaattgaccagctgcttagaacgagctctaggcgatgtttttctgctgatcggcaaggagtgtccatttttactgcgggatcttctatcctcggaagagttagctcaggtttttagtcagtctgtcatgaacgtcctgaaagtctttgtggggtccccatgtggcctcaatttaaggaatgtgctctggcacgggtttgcttcacccgaagagatccctccgaaatattgctctatgatgatcctgttaacagcaggtctaggccagctcctgaagagctacttgcagaatacgaagctgaccttagctcacagatcttttatttctctgaccaatcttgaagacctcatcgtttttccggacgtcacatacgaggtgctgtcggttttggaggaagtgatgatgaaatcggctttcatactaaagatcatgctgccatactgggaagtcgccttagtgaaatttaagtctcacagatttgctgactgcgccatactcctgctgacgcagcttgagacgggcttgcggaacgttttcgcaaccttgaaccggtgcccaaaaaggctgttgactgccgagagcacggctttgtacacaacgtttgatcaaattttagctaagcatctgaacgacgggaaaattaatcagctccctctgttcttgggagagcccgcaatggagttcttatgggattttctgaaccaccaggaggggccaaggattcgcgatcacctgtctcacggggagatcaacttgcacgaattttcaaaagagaccactaaccagctgctggccttcagcttggtgctcctactccgcttcgtggatgactgcctgctctcggtcttcaaggagaaatccgctgtggaattgctcatctccctggccgaaggttactcatctcgctgccaccccgtgtttcagttaaagaaacaggtgctgtcatgtgaggagtcgattcgggtgtgggctctcctgccctttcccgaggagctgacccgccaagcagtgcggctggaggacaacagcgagacgaacgcatgccacagcctgatcaccaaaatgacagatgagctgtatcatcatatgcccgaaaacaggtgcgtgctcaaggatctcgatcgcctccccaccgagacccctacatctgatacacctttagctctggcgccacgaaagccccagccatgcaggtgccgccgtcgggtgcggcctagtattaggttattgtcaccggttctaagtttaattttgcttttgatagccctggagctggtgaacatacacgctgtgtgcggaaaaaatgctcacgagtaccagcagtacttgaagtttgtgaaatcaattcttcagtatactgagaacttagttgcttacaccagctacgaaaagaataagtggaacgagacaatcaacctgactcacacagctctgcttaaaatgtggacgttctcagagaaaaagcaaatgctgatccacctcgccaaaaagtccacctccaaagtactgctttag

SEQ ID NO: 98614 - protein, 605 aa, Artificial Sequence
  derived and/or modified sequence
MEVLIGDPITTCLSPSVYDIICNLGFQLRENCDINSIVTQNGEVCWKTITDCVSYTESEQGLDYWGSVRLLGPVCEAVHSHFLSLTKGQFEIRYAPWFQWTSFPELFPEIFDALESLQSPAISLSLMKLTSCLERALGDVFLLIGKECPFLLRDLLSSEELAQVFSQSVMNVLKVFVGSPCGLNLRNVLWHGFASPEEIPPKYCSMMILLTAGLGQLLKSYLQNTKLTLAHRSFISLTNLEDLIVFPDVTYEVLSVLEEVMMKSAFILKIMLPYWEVALVKFKSHRFADCAILLLTQLETGLRNVFATLNRCPKRLLTAESTALYTTFDQILAKHLNDGKINQLPLFLGEPAMEFLWDFLNHQEGPRIRDHLSHGEINLHEFSKETTNQLLAFSLVLLLRFVDDCLLSVFKEKSAVELLISLAEGYSSRCHPVFQLKKQVLSCEESIRVWALLPFPEELTRQAVRLEDNSETNACHSLITKMTDELYHHMPENRCVLKDLDRLPTETIRLLSPVLSLILLLIALELVNIHAVCGKNAHEYQQYLKFVKSILQYTENLVAYTSYEKNKWNETINLTHTALLKMWTFSEKKQMLIHLAKKSTSKVLL

SEQ ID NO: 98615 - DNA, 1859 bp, Artificial Sequence
  derived and/or modified sequence
attcacgcgcgccgcagcggggcaccggaagttatggaggtattaataggggaccctattaccacatgtctttctccctcagtgtatgatataatttgtaatcttgggtttcaactcagagaaaattgtgatatcaatagcattgtaactcagaatggtgaagtatgctggaaaacaatcacagactgtgtgagctacacagagtcagagcagggtctggattactggggaagcgtgaggctgctgggccctgtgtgtgaggctgtccattcacatttcttatctctgaccaaggggcaatttgaaattcgatatgcaccgtggttccagtggacaagttttccagagttatttcctgaaatatttgatgccttggaaagtctacaatctcctgctatttctcttagcttaatgaaactgacatcgtgtctagaacgagccttgggtgatgtatttttactgattgggaaggaatgcccctttcttttaagagatctgctttcatctgaggagcttgctcaagtcttcagtcagtctgtgatgaatgtgctaaaagtcttcgttggctctccgtgtggtctcaacctgcgtaacgtcttatggcatgggtttgcgtcacctgaagaaattcctccaaaatactgttcaatgatgatactgttgacggcaggattgggtcagttactgaagagttaccttcaaaacactaaacttacattggcacatcgctctttcatatctcttacaaacctcgaggatttgattgtttttcctgatgttacttatgaggtgctttcagtattagaagaagtgatgatgaaatctgcttttatattaaaaatcatgttaccatattgggaagttgcactggtcaagttcaagtcacacaggtttgctgactgcgccatattgttgctgacacaactggagactggacttaggaatgtttttgccacacttaacagatgtccaaaaagactcctgactgctgagtcaacagctctttataccacctttgatcaaatattggcaaaacacttgaatgatggtaaaatcaatcagcttcctcttttccttggagagcctgctatggaatttctctgggatttcctgaaccatcaggagggtccccgcataagagatcatttaagccacggggagatcaacttacatgaattttcaaaagaaacaactaatcagttgcttgcattttctcttgtactgctactcagattcgttgatgactgtctgctatcagtttttaaggaaaaatcagccgtagaattgttgattagtcttgcagaaggctatagttctcgctgtcatccggtttttcagcttaaaaaacaggtgctgagctgtgaggagagcatcagggtttgggctctgctgcctttccccgaagaactcactcggcaagccgtcagattagaagataattctgaaacaaatgcctgccactctttgattacaaaaatgacggatgagctgtatcaccatatgcctgagaatcgttgtgtgttaaaggacttggatcgtcttcctactgagactatcagactactgtcccctgtgctcagcctgatactgttactcattgcgctggagttggtcaacattcatgctgtttgtgggaagaatgcgcatgagtatcagcagtacctaaagtttgtaaagtcgatcttgcagtacacggagaacctggtggcttacaccagttacgaaaagaacaagtggaatgaaactatcaatcttacacatacagctttgttgaaaatgtggacttttagtgagaagaaacaaatgttaatacatttagccaagaaatccacaagtaaagtactcttatgaaaacttgt

SEQ ID NO: 98616 - DNA, 1818 bp, Artificial Sequence
  derived and/or modified sequence
atggaggtgctgatcggcgaccccatcaccacctgcctgagccccagcgtgtacgacatcatctgcaacctgggcttccagctgagagagaactgcgacatcaacagcatcgtgacccagaacggcgaggtgtgctggaagaccatcaccgactgcgtgagctacaccgagagcgagcagggcctggactactggggcagcgtgagactgctgggccccgtgtgcgaggccgtgcacagccacttcctgagcctgaccaagggccagttcgagatcagatacgccccctggttccagtggaccagcttccccgagctgttccccgagatcttcgacgccctggagagcctgcagagccccgccatcagcctgagcctgatgaagctgaccagctgcctggagagagccctgggcgacgtgttcctgctgatcggcaaggagtgccccttcctgctgagagacctgctgagcagcgaggagctggcccaggtgttcagccagagcgtgatgaacgtgctgaaggtgttcgtgggcagcccctgcggcctgaacctgagaaacgtgctgtggcacggcttcgccagccccgaggagatcccccccaagtactgcagcatgatgatcctgctgaccgccggcctgggccagctgctgaagagctacctgcagaacaccaagctgaccctggcccacagaagcttcatcagcctgaccaacctggaggacctgatcgtgttccccgacgtgacctacgaggtgctgagcgtgctggaggaggtgatgatgaagagcgccttcatcctgaagatcatgctgccctactgggaggtggccctggtgaagttcaagagccacagattcgccgactgcgccatcctgctgctgacccagctggagaccggcctgagaaacgtgttcgccaccctgaacagatgccccaagagactgctgaccgccgagagcaccgccctgtacaccaccttcgaccagatcctggccaagcacctgaacgacggcaagatcaaccagctgcccctgttcctgggcgagcccgccatggagttcctgtgggacttcctgaaccaccaggagggccccagaatcagagaccacctgagccacggcgagatcaacctgcacgagttcagcaaggagaccaccaaccagctgctggccttcagcctggtgctgctgctgagattcgtggacgactgcctgctgagcgtgttcaaggagaagagcgccgtggagctgctgatcagcctggccgagggctacagcagcagatgccaccccgtgttccagctgaagaagcaggtgctgagctgcgaggagagcatcagagtgtgggccctgctgcccttccccgaggagctgaccagacaggccgtgagactggaggacaacagcgagaccaacgcctgccacagcctgatcaccaagatgaccgacgagctgtaccaccacatgcccgagaacagatgcgtgctgaaggacctggacagactgcccaccgagaccatcagactgctgagccccgtgctgagcctgatcctgctgctgatcgccctggagctggtgaacatccacgccgtgtgcggcaagaacgcccacgagtaccagcagtacctgaagttcgtgaagagcatcctgcagtacaccgagaacctggtggcctacaccagctacgagaagaacaagtggaacgagaccatcaacctgacccacaccgccctgctgaagatgtggaccttcagcgagaagaagcagatgctgatccacctggccaagaagagcaccagcaaggtgctgctgtag

SEQ ID NO: 98617 - DNA, 1818 bp, Artificial Sequence
  derived and/or modified sequence
atggaagtgctcataggcgacccaattacgacctgtctgtcacccagcgtgtacgatatcatatgtaatttgggctttcagctccgggaaaattgcgacattaatagcattgtcactcaaaatggggaagtgtgttggaagacgattacggactgtgtgtcctacaccgaatctgaacagggactggattactggggctccgtccgtttgctcggacccgtctgcgaggccgtgcatagtcacttcctcagtctcaccaaaggccagttcgaaatccggtacgcaccatggttccaatggacaagtttccccgaactcttccccgagatttttgacgcattagagagccttcagtcccctgcaatctcgttatccctgatgaagctgactagctgcctcgaacgcgcgcttggagacgtcttcttgctgatcgggaaagagtgccctttcctcctcagggacctgttaagttcggaggagttggcccaggtgttcagtcagtcagtcatgaacgtactgaaagtctttgtcggcagcccttgcggactgaacctccgcaacgttctgtggcacgggttcgcaagccccgaggaaatccccccgaagtactgcagcatgatgatcctactgactgcaggcctcggtcagctgctcaaaagctacctccaaaatacaaaactgactttggcccacaggtcatttatcagcctgactaacctggaagacctgatagtatttccggacgtcacgtacgaggttttgtccgtgttagaagaggtgatgatgaaaagcgcctttatactcaagatcatgctcccatattgggaggttgctctggttaagttcaaatcccataggttcgccgattgcgccattcttcttctgacccaactggagacgggattacggaacgtatttgcaacactgaaccgctgtcccaagaggctcctcactgctgagagcaccgccctctacaccacgtttgaccagatcctagccaagcatcttaacgacggcaaaataaaccagttgccgttgttcctgggcgagcccgctatggagttcttgtgggactttcttaatcaccaggaaggcccccgtattagggatcacctatcacatggagagataaatctgcacgagtttagtaaggaaaccactaaccagttgttagcattttccttggtcctactgttgagattcgtagatgactgcctgctgagcgtcttcaaggaaaaatctgcggtcgagttacttatctcccttgctgagggttattcaagtcgatgccatcccgttttccagctaaaaaagcaggtgctgtcctgcgaggagtctatcagggtgtgggccctactaccattccctgaggaactgacccggcaggctgtgcggttggaggataactctgagacgaacgcttgccactctctcattaccaaaatgacagacgaactgtatcatcacatgccagagaatcgatgtgttttgaaggatctggatcgcctcccgacagagacgatccggttattgtctccggtgttgtctctgattctcttgctcatcgctctggaactggtgaacatccacgcagtctgcgggaagaacgcacacgaatatcagcaatatctgaagttcgtgaaatctatactgcagtatacagagaacctcgtggcatacacttcttatgagaagaacaaatggaacgagaccatcaacctgacccacaccgcactcttgaagatgtggacgttctcagaaaaaaaacaaatgctaatccatctcgccaagaaatctacatcaaaggtcctcctgtag

SEQ ID NO: 98618 - DNA, 1818 bp, Artificial Sequence
  derived and/or modified sequence
atggaggtgctgattggagaccccatcaccacctgcctgagccccagcgtgtatgacatcatctgcaacctgggcttccagctgcgggagaactgtgacatcaacagcatcgtgacccagaatggagaggtgtgctggaagaccatcacagactgtgtgtcctacacagagagcgagcagggcctggactactggggctctgtgcggctgctgggccctgtgtgtgaggccgtgcacagccacttcctgagcctgaccaagggccagtttgagatccgctatgccccctggttccagtggaccagcttccctgagctgtttcctgagatctttgatgccctggagagcctgcagagccctgccatcagcctgagcctgatgaagctgaccagctgcctggagcgggccctgggagatgtgttcctgctgattggcaaggaatgtcccttcctgctgcgggacctgctgagcagcgaggagctggcccaggtgttcagccagagcgtgatgaatgtgctgaaggtgtttgtgggcagcccctgtggcctgaacctgagaaatgtgctgtggcacggctttgccagccctgaggagatcccccccaagtactgcagcatgatgatcctgctgacagctggcctgggccagctgctgaagagctacctgcagaacaccaagctgaccctggcccaccgctccttcatcagcctgaccaacctggaggacctgattgtgtttcctgatgtgacctatgaggtgctgtctgtgctggaggaggtgatgatgaagagcgccttcatcctgaagatcatgctgccctactgggaggtggccctggtgaagttcaagagccacagatttgctgactgtgccatcctgctgctgacccagctggagaccggcctgagaaatgtgtttgccaccctgaaccgctgccccaagaggctgctgacagctgagagcacagccctgtacaccacctttgaccagatcctggccaagcacctgaatgatggcaagatcaaccagctgcccctcttcctgggggagcccgccatggagttcctgtgggacttcctgaaccaccaggagggcccccgcatccgggaccacctgagccacggggagatcaacctgcacgagttcagcaaggagaccaccaaccagctgctggccttcagcctggtgctgctgctgcgctttgtggatgactgcctgctgagcgtcttcaaggagaagtctgctgtggagctgctgatcagcctggccgagggctacagcagccgctgccaccctgtgttccagctgaagaagcaggtgctgagctgtgaggagagcatccgggtgtgggccctgctgcccttccctgaggagctgacccggcaggccgtgcggctggaggacaacagcgagaccaatgcctgccacagcctcatcaccaagatgacagatgagctgtaccaccacatgcctgagaacagatgtgtgctgaaggacctggaccggctgcccacagagaccatccggctgctgagccctgtgctgagcctcatcctgctgctgattgccctggagctggtgaacatccatgctgtgtgtgggaagaatgcccacgagtaccagcagtacctgaagtttgtgaagagcatcctgcagtacacagagaacctggtggcctacaccagctatgagaagaacaagtggaatgagaccatcaacctgacccacacagccctgctgaagatgtggaccttcagcgagaagaagcagatgctgatccacctggccaagaagagcaccagcaaggtgctgctgtag

SEQ ID NO: 98619 - DNA, 1818 bp, Artificial Sequence
  derived and/or modified sequence
atggaggtgctgatcggcgaccccatcaccacctgcctgagccccagcgtctatgatataatatgcaatctgggatttcagctccgggagaactgtgacatcaattcaatcgtcacacagaatggggaagtctgttggaagacaatcacagactgtgtatcctacacagagtcagagcagggcctggactattggggttcagtccgactgctgggccctgtgtgtgaggccgtccattcgcacttcctatccctgaccaagggccaattcgagattagatacgccccttggtttcagtggacgagctttccagagcttttccctgaaatttttgatgcactcgagagcttgcaaagccctgcaattagcttgagcctgatgaagctgactagctgtctggagcgagcacttggtgacgttttcttgctcataggtaaggaatgcccttttttgctgcgcgatctgctatcaagcgaggaactcgcccaagtgttcagtcaaagcgtaatgaatgtgctgaaggtttttgtcggcagcccatgcggactgaacctgcgtaacgttctctggcacgggttcgcatccccagaggaaatcccaccaaagtactgcagtatgatgatcctgctgacagcgggcctcggtcagctacttaagtcatatctacaaaataccaagcttactttggctcatcggtcttttatctctctgacgaacctggaggaccttatagttttccctgacgtgacttatgaagttctctccgtgttggaagaggtcatgatgaagagcgcatttattttaaaaatcatgctgccgtattgggaggtcgcacttgtgaaatttaagagccatcggttcgctgactgcgccatcctgctcctgacccagttggagaccggtctgagaaacgtcttcgcgaccctgaaccggtgtcctaaacgcctccttacggcagaatctaccgcactatacacaacttttgatcagattctcgccaaacacctgaacgacgggaagatcaatcaattgccactcttcctgggggagccggctatggagtttctctgggactttctgaaccaccaagagggcccgaggatcagggatcacctgtcccacggagagatcaacctccatgaattctcgaaggagacaacaaatcagctgctagccttttctctagtgctgctcctccgcttcgtggacgactgcctccttagtgttttcaaggaaaagtcagccgtggaactcctgatatcgttggcagaaggttattcatctcgatgtcacccagttttccagcttaagaagcaggtcttatcctgtgaggaaagcatcagggtgtgggcactgctgccattcccagaagaactgacaaggcaagcagtgcgcttggaggacaattccgaaacaaatgcctgccatagcctaatcaccaaaatgactgatgagctttaccaccatatgcccgaaaacaggtgtgtgctcaaagatttagatcgcttgcccaccgaaactataagacttttgagtccagtcctttctcttatcttgttgctcattgcgctggagttggtgaacatccacgctgtgtgcggtaagaatgctcacgagtaccagcagtacctaaagtttgtgaagagtatactgcagtacaccgagaatctggtggcttacacgtcttatgagaagaacaagtggaacgagacaatcaatttaacacatacagctttgctcaagatgtggacattctctgagaaaaaacagatgcttatacacttggctaagaaatcaacctctaaagttctactgtag

SEQ ID NO: 98620 - DNA, 1818 bp, Artificial Sequence
  derived and/or modified sequence
atggaggtgttaatcggcgaccccataactacctgcctttcaccgtccgtctacgacattatctgtaatttaggatttcagctgagagaaaattgtgacatcaatagcatcgtgacgcaaaacggcgaggtgtgctggaagaccatcaccgattgcgtgagctacacagaaagcgagcagggcctcgactattgggggagcgtgcgcctgctgggtcccgtatgcgaggctgtgcattctcattttctgagcctgactaaggggcagttcgagattagatacgcgccttggtttcaatggacatcattcccagaacttttcccagaaatctttgacgcacttgaaagcctccagtccccagcaatatccctgtcactaatgaaactgacttcttgcctcgaacgtgcactgggcgacgtcttcctcctcattggcaaggagtgtccctttttgttgcgcgacctactttcctccgaagagcttgcccaggtcttttctcagagtgtgatgaacgttctgaaggtattcgtgggttccccctgtggactgaatctacgaaatgttctgtggcacggatttgccagtcctgaggaaatacctcctaagtattgcagcatgatgatcctgctcaccgcaggcctgggtcagcttttgaagtcttacctgcagaacacaaagcttaccctcgcacacaggtccttcattagcttgaccaatctcgaggacctgattgtgttccctgacgtgacatatgaggtactgagtgtcttggaggaagtgatgatgaaaagtgctttcatccttaaaattatgctgccctactgggaagtcgccttggtaaagtttaagtctcacagattcgccgattgtgccattctcctgctaactcagctcgagacgggcttgcggaacgtgtttgcaacccttaacagatgccctaaacgtctgctgactgcagagtctacagctctgtataccacattcgaccagattctggctaagcaccttaatgatgggaagatcaatcaactgcccctcttcctcggagagccagcgatggaatttctgtgggactttcttaaccatcaggagggtccccgtattcgtgatcacttatcacatggagagattaacctgcacgagttctccaaagaaacaaccaatcaacttctggccttttccctagttctgctgttaagatttgtggatgattgtttactgagcgtcttcaaagaaaaatccgcggtggaacttcttatttctctggccgaggggtacagttcccgatgtcaccctgtctttcagcttaaaaaacaggtgctatcatgcgaagaatccatccgcgtgtgggctctcctcccttttccggaggaactgaccaggcaggccgtcagactggaggataactccgagaccaacgcctgccacagtttgattacaaaaatgactgacgagctgtaccaccacatgcctgagaaccgttgcgtgctcaaggacctggatcgcctgccaacggaaaccattagacttttgtcaccagtgctgagtcttatcctgctcctgattgctctggaacttgtgaacattcatgcggtgtgtggcaagaacgctcatgaatatcagcagtatcttaagttcgtgaagagtatcctgcaatacacagaaaatttagtggcctatacttcatatgaaaagaacaagtggaacgaaacaatcaatcttacccacaccgccttgctgaagatgtggacgttttcagaaaagaagcaaatgctcatacacttagctaagaagtccacctctaaagtactgctttag

SEQ ID NO: 98621 - protein, 360 aa, Artificial Sequence
  derived and/or modified sequence
MKLCSLAVLVPIVLFCEQHVFAFQSGQVLAALPRTSRQVQVLQNLTTTYEIVLWQPVTADLIVKKKQVHFFVNASDVDNVKAHLNVSGIPCSVLLADVEDLIQQQISNDTVSPRASASYYEQYHSLNEIYSWIEFITERHPDMLTKIHIGSSFEKYPLYVLKVSGKEQAAKNAIWIDCGIHAREWISPAFCLWFIGHNRMWRKNRSFYANNHCIGTDLNRNFASKHWCEEGASSSSCSETYCGLYPESEPEVKAVASFLRRNINQIKAYISMHSYSQHIVFPYSYTRSKSKDHEELSLVASEAVRAIEKISKNTRYTHGHGSETLYLAPGGGDDWIYDLGIKYSVTSNPPVEKLLPLSLK

SEQ ID NO: 98622 - DNA, 1083 bp, Artificial Sequence
  derived and/or modified sequence
atgaagctctgttcactcgcggtgctggtgcccattgtactcttttgtgagcagcatgtcttcgcttttcaaagcgggcaggttcttgcggcacttccaagaacttccaggcaggtacaggtgctccagaacttaactacaacgtacgaaatcgtattgtggcaaccagtcaccgcagatttgatcgtgaagaagaaacaggtccacttttttgtgaatgcatctgatgttgacaacgtaaaggcacacctgaacgtttccggtatcccctgttccgtgctgctagcagatgtagaagatttgatccagcagcagatcagtaatgatactgtctctccacgagcaagcgcaagctactacgagcagtaccacagcttgaatgaaatatattcctggattgaattcatcactgaaagacaccccgacatgctcacgaagattcacattgggtcatcctttgaaaaatatcccctgtacgttctcaaggtgagcgggaaagaacaggcggcaaaaaatgccatctggattgattgtggcattcacgccagagaatggattagcccggccttctgcctatggtttatcggacacaatcgtatgtggagaaagaatagaagcttttacgctaataaccactgtattggtacggacctcaacaggaacttcgcctccaagcactggtgtgaggagggcgctagtagcagctcctgtagtgaaacctactgcggactatatcctgagagcgagcctgaagtcaaggccgtggcaagctttttacgtcggaatatcaaccaaatcaaggcctatatctctatgcactcctatagtcagcatatagttttcccttacagttacacgagaagcaaaagcaaagatcacgaggagcttagcttagtcgccagcgaggccgttagggccattgagaagatatccaagaacacccgttacacccatggacacggctctgaaactctttacttggcaccaggtggtggtgacgactggatatatgatctggggataaaatatagcgtaacatctaacccgccggtggagaaactgctgcccctctctctgaaatag

SEQ ID NO: 98623 - DNA, 1083 bp, Artificial Sequence
  derived and/or modified sequence
atgaagctgtgcagcctggccgtgctggtgcccatcgtgctcttctgtgagcagcacgtgtttgccttccagagcggccaggtgctggccgccctgcccaggaccagccggcaggtgcaggtgctgcagaacctgaccaccacctatgaaattgtgctgtggcagcctgtgacagctgacctgattgtgaagaagaagcaggtgcacttctttgtgaatgccagtgatgtggacaacgtgaaggcccacctgaatgtgtctggcatcccctgcagcgtgctgctggctgatgtggaggacctgatccagcagcagatcagcaatgacacagtgagcccccgggccagcgccagctactatgagcagtaccacagcctgaatgagatctacagctggattgagttcatcacagagcggcacccagacatgctgaccaagatccacatcggcagcagctttgagaagtaccccctgtatgtgctgaaggtgtctgggaaggagcaggccgccaagaatgccatctggattgactgtggcatccacgcccgggagtggatcagccctgccttctgcctgtggttcatcggccacaacaggatgtggaggaagaacagaagcttctacgccaacaaccactgcatcggcacagacctgaacagaaactttgccagcaagcactggtgtgaggagggcgccagcagcagcagctgcagcgagacctactgcggcctgtacccagagagcgagcctgaggtgaaggctgtggccagcttcctgcggaggaacatcaaccagatcaaggcctacatctccatgcacagctacagccagcacatcgtgttcccctacagctacaccaggagcaagagcaaggaccacgaggagctgagcctggtggccagcgaggccgtgcgggccatcgagaagatcagcaagaacacccgctacacccacggccacggcagcgagaccctgtacctggcccctggaggaggagatgactggatctatgacctgggcatcaagtacagcgtgaccagcaacccccctgtggagaagctgctgcccctgagcctgaagtag

SEQ ID NO: 98624 - DNA, 1083 bp, Artificial Sequence
  derived and/or modified sequence
atgaagctgtgcagcctggccgtgctggtgcccatcgtgctgttctgtgagcagcacgtgttcgcctttcagagcgggcaagtgctggcagccttgcccaggacctcaaggcaagtgcaggtgcttcaaaatctgacaacaacatatgagattgtcttgtggcagcccgtaaccgcagacctgatcgtcaagaaaaagcaggtgcacttcttcgtaaacgcctcagacgtcgacaacgtgaaagcacacctaaacgtgtcaggcatcccatgttctgttctgctagctgacgtggaagacctgattcaacaacagatctctaatgataccgtttctccccgtgcctcagcgagctactacgaacagtaccactctctaaatgagatatactcatggatcgaatttattactgaacggcaccccgacatgctcacgaaaattcacattggtagtagctttgagaaatacccactgtacgtgctgaaagtaagcggaaaggaacaagccgcaaagaacgcaatctggatcgattgtggcatccatgctcgggagtggatcagccccgcattttgcctctggttcatcgggcacaacagaatgtggcgtaagaatcggagcttttacgccaataatcactgcatcggcacagatctaaatcggaacttcgctagtaagcattggtgcgaggagggcgcctcttcctcttcctgcagcgagacgtattgtggcctgtaccctgagtctgagccagaagtgaaggccgttgctagttttcttcgtcgcaacatcaaccaaatcaaggcttacattagcatgcacagctacagccagcacattgtcttcccatatagttacacacgaagtaaatccaaggaccatgaggagttgtcactggtggcatctgaggcagtacgcgctatcgaaaaaatctcaaagaacacccgctatacgcacggccatggctctgagacactttacctggcacctggtggcggcgacgactggatctatgacctaggaattaaatactctgttacatctaaccccccagtggagaagctgctgccattgtcactgaagtag

SEQ ID NO: 98625 - DNA, 1083 bp, Artificial Sequence
  derived and/or modified sequence
atgaaactgtgctctctcgcagtgctcgtccccatcgtgctgttctgcgaacaacacgtgttcgctttccagagcgggcaagtgctggccgctttgccacgcacctcaaggcaggttcaggttctgcagaatctcacaacaacgtacgaaatcgtgctctggcagccagttacagcagatctaattgtgaagaaaaaacaagtgcattttttcgtgaatgcaagcgacgttgacaatgtgaaggcgcacctaaatgtgagtggaatcccttgttccgtgctattggctgatgtcgaggacctcattcaacaacagatctccaacgacacagttagccctcgggctagcgccagttactacgaacagtaccacagtctgaacgagatttattcttggatcgagtttattaccgaacggcatcccgacatgttaaccaagatccatatagggagctcgttcgagaaataccctctatatgttctgaaggttagcgggaaggagcaggccgcaaaaaatgccatatggatcgattgtggcattcatgctcgcgagtggatatctccggcattttgtctctggtttattggacacaatcgaatgtggcggaagaacagatcgttctatgccaataaccattgcatcggaaccgatcttaatcgcaacttcgctagcaaacattggtgcgaagagggcgcatcctcttcaagctgttccgagacgtattgtggactgtatccggaatctgagccagaagtgaaagctgtggctagcttcttacgcaggaacatcaaccagatcaaggcctatatatctatgcactcgtatagccagcacattgtgtttccttactcatatactcgatccaaatctaaagaccatgaggaactgtcacttgtggctagtgaagccgttagagctatcgagaagatttctaagaatactaggtatacccatgggcacggaagtgaaacactgtacctggctcccggaggcggagacgactggatctatgacctggggataaaatactccgtcacctccaatccacctgtggagaagctcttgcctctgtccctcaagtag

SEQ ID NO: 98626 - DNA, 1544 bp, Artificial Sequence
  derived and/or modified sequence
agaaaattgctgttgggatgaagctttgcagccttgcagtccttgtacccattgttctcttctgtgagcagcatgtcttcgcgtttcagagtggccaagttctagctgctcttcctagaacctctaggcaagttcaagttctacagaatcttactacaacatatgagattgttctctggcagccggtaacagctgaccttattgtgaagaaaaaacaagtccatttttttgtaaatgcatctgatgtcgacaatgtgaaagcccatttaaatgtgagcggaattccatgcagtgtcttgctggcagatgtggaagatcttattcaacagcagatttccaacgacacagtcagcccccgagcctccgcatcgtactatgaacagtatcactcactaaatgaaatctattcttggatagaatttataactgagaggcatcctgatatgcttacaaaaatccacattggatcctcatttgagaagtacccactctatgttttaaaggtttctggaaaagaacaagcagccaaaaatgccatatggattgactgtggaatccatgccagagaatggatctctcctgctttctgcttgtggttcataggccataatcgaatgtggagaaagaaccgttctttctatgcgaacaatcattgcatcggaacagacctgaataggaactttgcttccaaacactggtgtgaggaaggtgcatccagttcctcatgctcggaaacctactgtggactttatcctgagtcagaaccagaagtgaaggcagtggctagtttcttgagaagaaatatcaaccagattaaagcatacatcagcatgcattcatactcccagcatatagtgtttccatattcctatacacgaagtaaaagcaaagaccatgaggaactgtctctagtagccagtgaagcagttcgtgctattgagaaaattagtaaaaataccaggtatacacatggccatggctcagaaaccttatacctagctcctggaggtggggacgattggatctatgatttgggcatcaaatattccgttacatcaaacccacctgtagagaagcttttgccgctgtctctaaaatagcttggcatgtcattaggaatgtttaatgcccctgattttatcattctgcttccgtattttaatttactgattccagcaagaccaaatcattgtatcaaattatttttaagttttatccgtagttttgataaaagattttcctattccttggttctgtcagagaacctaataagtgctactttgccattaaggcagactagggttcatgtctttttaccctttaaaaaaaattgtaaaagtctagttacctactttttctttgattttcgacgtttgactagccatctcaagcaagtttcgacgtttgactagccatctcaagcaagtttaatcaatgatcatctcacgctgatcattggatcctactcaacaaaaggaagggtggtcagaagtacattaaagatttctgctccaaattttcaataaatttctgcttgtgccttt

SEQ ID NO: 98627 - DNA, 1083 bp, Artificial Sequence
  derived and/or modified sequence
atgaagctgtgcagcctggccgtgctggtgcccatcgtgctgttctgcgagcagcacgtgttcgccttccagagcggccaggtgctggccgccctgcccagaaccagcagacaggtgcaggtgctgcagaacctgaccaccacctacgagatcgtgctgtggcagcccgtgaccgccgacctgatcgtgaagaagaagcaggtgcacttcttcgtgaacgccagcgacgtggacaacgtgaaggcccacctgaacgtgagcggcatcccctgcagcgtgctgctggccgacgtggaggacctgatccagcagcagatcagcaacgacaccgtgagccccagagccagcgccagctactacgagcagtaccacagcctgaacgagatctacagctggatcgagttcatcaccgagagacaccccgacatgctgaccaagatccacatcggcagcagcttcgagaagtaccccctgtacgtgctgaaggtgagcggcaaggagcaggccgccaagaacgccatctggatcgactgcggcatccacgccagagagtggatcagccccgccttctgcctgtggttcatcggccacaacagaatgtggagaaagaacagaagcttctacgccaacaaccactgcatcggcaccgacctgaacagaaacttcgccagcaagcactggtgcgaggagggcgccagcagcagcagctgcagcgagacctactgcggcctgtaccccgagagcgagcccgaggtgaaggccgtggccagcttcctgagaagaaacatcaaccagatcaaggcctacatcagcatgcacagctacagccagcacatcgtgttcccctacagctacaccagaagcaagagcaaggaccacgaggagctgagcctggtggccagcgaggccgtgagagccatcgagaagatcagcaagaacaccagatacacccacggccacggcagcgagaccctgtacctggcccccggcggcggcgacgactggatctacgacctgggcatcaagtacagcgtgaccagcaacccccccgtggagaagctgctgcccctgagcctgaagtag

SEQ ID NO: 98628 - protein, 476 aa, Artificial Sequence
  derived and/or modified sequence
MERDEPPPSGGGGGGGSAGFLEPPAALPPPPRNGFCQDELAELDPGTNDRAEQRTCLICGDRATGLHYGIISCEGCKGFFKRSICNKRVYRCSRDKNCVMSRKQRNRCQYCRLLKCLQMGMNRKAIREDGMPGGRNKSIGPVQISEEEIERIMSGQEFEEEANHWSNHGDSDHSSPGNRASESNQPSPGSTLSSSRSVELNGFMAFREQYMGMSVPPHYQYIPHLFSYSGHSPLLPQQARSLDPQSYSLIHQLLSAEDLEPLGTPMLIEDGYAVTQAELFALLCRLADELLFRQIAWIKKLPFFCELSIKDYTCLLSSTWQELILLSSLTVYSKQIFGELADVTAKYSPSDEELHRFSDEGMEVIERLIYLYHKFHQLKVSNEEYACMKAINFLNQDIRGLTSASQLEQLNKRYWYICQDFTEYKYTHQPNRFPDLMMCLPEIRYIAGKMVNVPLEQLPLLFKVVLHSCKTSVGKE

SEQ ID NO: 98629 - DNA, 1431 bp, Artificial Sequence
  derived and/or modified sequence
atggagcgcgatgaacctccccccagcggaggaggggggggaggcggatccgccggctttctcgagccacctgctgccctaccacccccacccagaaacggattctgccaggacgagctcgcagagctcgaccccgggactaatgatcgggctgagcaacgcacgtgcctaatttgcggagatcgggcaacaggtttgcattatggcattatttcctgcgagggctgcaagggattctttaaacgctctatttgcaataagcgggtgtaccggtgcagtcgcgacaaaaactgtgtgatgagccggaaacagagaaataggtgtcaatattgtcgcctgttgaagtgtttacagatgggcatgaaccgcaaggccatccgagaagacgggatgcccggaggcagaaataaatcaattggtcccgtacagatctcggaagaggaaatcgagcgaatcatgagcggccaggaatttgaggaggaagccaatcactggtctaaccacggggactctgaccactcttcaccagggaatcgagcttccgagagtaaccagcctagtccaggatctacactctcctcttcacgcagtgtcgagcttaacggatttatggcatttagggaacagtacatgggcatgagtgtacccccccactaccaatacatcccacacctattttcatattctggccacagcccgttactccctcagcaagcccggagtctcgatcctcaatcatacagtctgatccatcagcttctgtcggcagaggacttggagccactgggcacacctatgctcatagaggacgggtacgcagtgacgcaggctgagttgttcgcactgctttgtcgcttggccgacgagctattattccgccaaattgcatggatcaagaaattgcctttcttttgcgagctttctattaaggactacacctgcttgctgtcttcaacatggcaggagctcattctgttgagctcgctcacagtgtacagtaaacagatttttggcgagctggcggatgtgactgcgaaatattcaccctcagatgaggagcttcatcgtttctccgacgaaggcatggaggttatagaacgcctcatttatctgtaccacaaatttcatcaactcaaagtgtctaacgaggagtatgcatgtatgaaagctattaactttttgaatcaggatatccgggggctaacatcggcctcccagctcgaacagttaaacaagcgttattggtacatttgccaggactttactgagtataagtacacccaccagcctaaccgctttccagacttaatgatgtgcctgcctgaaattcggtacatagctggcaagatggtgaatgtgcctctggaacagctccctttgttgttcaaggtggtgctgcatagctgcaagacatccgtaggcaaggaatag

SEQ ID NO: 98630 - DNA, 1890 bp, Artificial Sequence
  derived and/or modified sequence
gcggcgcggaggggcgcggagcggcgcggagccgggcggctcggggcccagagagagccgcggccgggagctcgcgggctcctgacaacctcctcccctcggcggacgacgaccacggcgactagggcgccggtcatggcggagcaacaaacccggcgcggaccctaggcaccaccgcatggagcgggacgaaccgccgcctagcggagggggaggcggcgggggctcggcggggttcctggagcctcccgccgcgctccctccgccgccgcgcaacggtttctgtcaggatgaattggcagagcttgacccaggcactaatgatcgggctgaacaacgaacctgtctcatttgtggggaccgcgctacaggcttgcactatgggatcatctcctgtgagggctgcaaagggtttttcaagcggagcatttgcaacaaacgggtatatcgatgcagtcgtgacaagaactgtgtcatgtctcggaagcagaggaacaggtgccagtactgccgcctgctcaaatgcctccagatggggatgaaccggaaggctatcagagaagatggcatgcctggaggccggaataagagcattgggccagtccagatatcggaagaagaaatcgaaaggatcatgtctgggcaggagtttgaggaagaggccaatcactggagcaaccatggtgatagtgaccacagttcccctgggaacagggcttcggagagcaaccagccctcaccaggctccacactgtcttccagtaggtctgtggaactgaatggattcatggccttcagggaacagtacatgggaatgtctgtgcctccacattaccaatatataccgcacctttttagctattctggccactcaccacttctgccccaacaagctcgcagcctggatccccagtcatacagtctgattcaccagctgttatcagccgaggacctggaaccattgggcacgcccatgttgattgaagatggatacgctgtgacacaggcagaactatttgccctgctttgccgcctggccgacgagctgctctttaggcagattgcctggatcaagaaactgcctttcttctgcgagctctcaatcaaggattacacgtgcctcttgagctctacgtggcaggagctaatcctgctgtcttccctcaccgtttacagcaagcagatctttggggaactggctgatgtcactgccaagtactcgccctccgatgaagaactacacagatttagtgatgaagggatggaggtgatcgagcggctcatctacctctatcacaagttccatcagctaaaggtcagcaacgaggagtatgcttgcatgaaagcaattaacttcctaaatcaagatatcaggggtctgaccagtgcctcacagctggaacaattgaataaacgatactggtacatttgccaggattttactgaatataaatacacacatcagccgaaccgctttcctgatctcatgatgtgcttacctgagattcgatatattgcaggaaagatggtgaatgtgcccctggagcagctgcccctcctctttaaggtggtgctgcattcctgcaagaccagtgtgggcaaggaatgacctgttccaggcgccctcctcaggccaaccacagcgtcttgggtgggcaggacaggctctggagggaaaagccagagagaccaagatggaggctgtggagcagcatttcccgttgcctccatagcaagaagagtttttgtttgtttgtctgtttttttaacctcatttttctatatatttatttcacgacagagttgaatgtatggccttcaacatgatgcacatgcttttgtgtgaatgcagccaatgcattttcttacagtttacagaatgtgaagatg

SEQ ID NO: 98631 - DNA, 1431 bp, Artificial Sequence
  derived and/or modified sequence
atggagagagatgagcccccaccttctgggggcggcggcggcggcggcagcgctggcttcctggagcccccagctgccctgcccccacctccaagaaatggcttctgccaggatgagctggccgagctggaccccggcaccaatgacagagctgagcagaggacctgcctgatctgtggggaccgggccaccggcctgcactacggcatcatcagctgtgagggctgcaagggcttcttcaagaggagcatctgcaacaagagggtgtaccgctgcagccgggacaagaactgtgtgatgagcaggaagcagaggaaccgctgccagtactgccgcctgctgaagtgcctgcagatgggcatgaacaggaaggccatccgggaggatggcatgcctgggggcaggaacaagagcatcggccctgtgcagatcagcgaggaggagattgagcgcatcatgagcggccaggagtttgaggaggaggccaaccactggagcaaccacggggacagcgaccacagcagccctggcaacagagccagcgagagcaaccagcccagccctggcagcaccctgagcagcagccgctctgtggagctgaatggcttcatggccttccgggagcagtacatgggcatgtctgtgcccccccactaccagtacatcccccacctgttctcctacagcggccacagccccctgctgccccagcaggcccggagcctggacccccagagctacagcctcatccaccagctgctgtctgctgaggacctggagcccctgggcacccccatgctgattgaagatggctatgctgtgacccaggccgagctgtttgccctgctgtgccgcctggctgatgagctgctcttccggcagatcgcctggatcaagaagctgcccttcttctgtgagctgagcatcaaggactacacctgcctgctgagcagcacctggcaggagctgatcctgctgagcagcctgactgtgtacagcaagcagatctttggagagctggctgatgtgacagccaagtacagccccagtgatgaggagctgcaccgcttcagtgatgagggcatggaggtgattgagcggctcatctacctgtaccacaagttccaccagctgaaggtgtccaatgaggagtatgcctgcatgaaggccatcaacttcctgaaccaggacatccggggcctgaccagcgccagccagctggagcagctgaacaagcgctactggtacatctgccaggacttcacagagtacaagtacacccaccagcccaaccgcttcccagacctgatgatgtgcctgcctgagatccgctacatcgccggcaagatggtgaatgtgcccctggagcagctgcccctgctcttcaaggtggtgctgcacagctgcaagacctctgtgggcaaggagtag

SEQ ID NO: 98632 - DNA, 1431 bp, Artificial Sequence
  derived and/or modified sequence
atggagcgggacgagcccccccccagcggcggcggcggcggcggcggttcagccgggtttttggagcccccagccgctttacctcctcctccccggaacggcttttgtcaggatgaactcgctgagttggatccagggaccaatgacagagcagaacagagaacttgccttatctgtggggacagggcaaccggcctacactacggcattatcagctgcgaggggtgtaagggatttttcaaacgatccatttgcaacaagagagtgtacagatgctccagggataaaaattgcgtcatgagcaggaagcagaggaaccggtgccagtattgccgtcttttgaaatgcttgcaaatggggatgaatcgcaaggctatcagagaggatggtatgccaggcgggaggaacaagtcaatcggcccagttcagataagcgaagaagaaattgaaaggattatgtcaggccaggaattcgaagaagaggccaaccactggtctaaccatggggatagtgatcactcgagtccagggaacagggccagcgaatcaaaccaacctagcccaggctctaccctgagctccagccgcagtgttgaacttaatgggttcatggcatttagggagcagtacatggggatgagtgtccctcctcactaccagtacatcccacatctgttttcctattccggtcactctcccctacttccccagcaagcccgcagccttgatccacaatcatatagtctgatccatcagctgctctccgccgaggacctagaacccctcgggactccaatgcttatcgaggatggttatgccgtgacgcaggcagaacttttcgccctcttgtgcagattggccgacgagctcctgttccggcagattgcttggattaaaaaactgccctttttctgtgagctaagtattaaggactatacttgtctgctgtcgagtacgtggcaagagctgattcttctgtctagcctgactgtgtattctaagcagatttttggagagttggccgacgtgaccgccaaatattcaccatccgatgaggagctacaccgattcagcgacgaggggatggaggtgatcgaacgcctgatttatttataccacaaatttcaccagctaaaggtcagcaacgaggagtacgcctgtatgaaggctattaactttctgaatcaagacatacggggcctgacctctgcctctcagcttgagcagctgaataagaggtattggtatatctgccaggactttacagagtataagtacacacatcagccaaacaggtttccggatctgatgatgtgcttgcccgaaatcagatatatcgctggcaagatggtcaacgtgcccttggagcagctgccccttctcttcaaggtggtcctacactcctgtaagactagcgtggggaaagaatag

SEQ ID NO: 98633 - DNA, 1431 bp, Artificial Sequence
  derived and/or modified sequence
atggagcgggacgagcccccacctagtggagggggtgggggaggcggttcagccggattcctggagccgccagccgctctccctccccctccaaggaatggcttctgtcaggacgagctcgcggaattggatcctggaactaacgaccgggctgaacagaggacctgcttgatctgtggcgatagggcaacaggccttcattatgggataatttcctgtgagggctgtaagggcttttttaaacgctccatatgcaacaaacgggtctatagatgttcaagggataaaaactgtgttatgagcaggaagcaaaggaatcggtgtcaatactgccgcctgttgaagtgtctccagatgggaatgaaccgcaaagcaatccgcgaagatggtatgcctgggggaagaaacaaatctattggacccgtgcagatatcggaggaagagatcgaaaggattatgagtggccaggagttcgaggaggaggctaatcactggagcaaccatggggacagcgaccacagctcgccaggcaacagggcaagcgagtcaaatcagccttccccaggctccaccctcagctcaagtcgcagcgtggagttgaacggattcatggcatttcgagaacagtacatgggcatgtccgtcccaccccactaccagtacatccctcatttattcagctattcaggacattcacccttgcttccacaacaagccagatccctggacccgcagtcctattctctgatccaccagttgctaagcgccgaggaccttgagcccctcgggacccccatgttgatagaggacggctacgccgtcacgcaggccgagctattcgcattgctctgtcggctggctgatgagctgctgtttcgccagatcgcctggatcaagaagttgccattcttctgtgaattaagcatcaaagactacacctgtttgctgtccagtacctggcaagaactgattctgttaagctctctgactgtgtattcaaagcaaatctttggagagctggcggacgtaaccgcaaagtacagcccttccgatgaggaactgcacagattcagcgacgagggtatggaggtgatcgaacgtctgatttacctataccataagttccatcagctaaaggtgtcgaacgaggagtacgcctgcatgaaagccattaactttctgaaccaggacatacgtggacttacatcagcctcccagttggagcagcttaacaaaaggtattggtatatttgtcaggactttactgagtataaatatactcaccagcccaacaggttcccggacctcatgatgtgcctacctgagatccgctatatagccggaaagatggtgaacgttccgctagaacagctgcctcttctttttaaggtcgtccttcacagctgcaagacaagtgtgggcaaggagtag

SEQ ID NO: 98634 - DNA, 1431 bp, Artificial Sequence
  derived and/or modified sequence
atggagagagacgagcccccccccagcggcggcggcggcggcggcggcagcgccggcttcctggagccccccgccgccctgccccccccccccagaaacggcttctgccaggacgagctggccgagctggaccccggcaccaacgacagagccgagcagagaacctgcctgatctgcggcgacagagccaccggcctgcactacggcatcatcagctgcgagggctgcaagggcttcttcaagagaagcatctgcaacaagagagtgtacagatgcagcagagacaagaactgcgtgatgagcagaaagcagagaaacagatgccagtactgcagactgctgaagtgcctgcagatgggcatgaacagaaaggccatcagagaggacggcatgcccggcggcagaaacaagagcatcggccccgtgcagatcagcgaggaggagatcgagagaatcatgagcggccaggagttcgaggaggaggccaaccactggagcaaccacggcgacagcgaccacagcagccccggcaacagagccagcgagagcaaccagcccagccccggcagcaccctgagcagcagcagaagcgtggagctgaacggcttcatggccttcagagagcagtacatgggcatgagcgtgcccccccactaccagtacatcccccacctgttcagctacagcggccacagccccctgctgccccagcaggccagaagcctggacccccagagctacagcctgatccaccagctgctgagcgccgaggacctggagcccctgggcacccccatgctgatcgaggacggctacgccgtgacccaggccgagctgttcgccctgctgtgcagactggccgacgagctgctgttcagacagatcgcctggatcaagaagctgcccttcttctgcgagctgagcatcaaggactacacctgcctgctgagcagcacctggcaggagctgatcctgctgagcagcctgaccgtgtacagcaagcagatcttcggcgagctggccgacgtgaccgccaagtacagccccagcgacgaggagctgcacagattcagcgacgagggcatggaggtgatcgagagactgatctacctgtaccacaagttccaccagctgaaggtgagcaacgaggagtacgcctgcatgaaggccatcaacttcctgaaccaggacatcagaggcctgaccagcgccagccagctggagcagctgaacaagagatactggtacatctgccaggacttcaccgagtacaagtacacccaccagcccaacagattccccgacctgatgatgtgcctgcccgagatcagatacatcgccggcaagatggtgaacgtgcccctggagcagctgcccctgctgttcaaggtggtgctgcacagctgcaagaccagcgtgggcaaggagtag

SEQ ID NO: 98635 - protein, 218 aa, Artificial Sequence [sequence omitted]

SEQ ID NO: 98636 - protein, 308 aa, Artificial Sequence
  derived and/or modified sequence
MSRSKRDNNFYSVEIGDSTFTVLKRYQNLKPIGSGAQGIVCAAYDAILERNVAIKKLSRPFQNQTHAKRAYRELVLMKCVNHKNIIGLLNVFTPQKSLEEFQDVYIVMELMDANLCQVIQMELDHERMSYLLYQMLCGIKHLHSAGIIHRDLKPSNIVVKSDCTLKILDFGLARTAGTSFMMTPYVVTRYYRAPEVILGMGYKENADSEHNKLKASQARDLLSKMLVIDASKRISVDEALQHPYINVWYDPSEAEAPPPKIPDKQLDEREHTIEEWKELIYKEVMDLEERTKNGVIRGQPSPLAQVQQ

SEQ ID NO: 98637 - protein, 142 aa, Artificial Sequence
  derived and/or modified sequence
MSRSKRDNNFYSVEIGDSTFTVLKRYQNLKPIGSGAQGIVCAAYDAILERNVAIKKLSRPFQNQTHAKRAYRELVLMKCVNHKNIIGLLNVFTPQKSLEEFQDVYIVMELMDANLCQVIQMELDHERMSYLLYQMLCGIKHL

SEQ ID NO: 98638 - protein, 97 aa, Artificial Sequence
  derived and/or modified sequence
MIIGLLNVFTPQKSLEEFQDVYIVMELMDANLCQVIQMELDHERMSYLLYQMLCGIKHLHSAGIIHRDLKPSNIVVKSDCTLKILDFGLARTAGTSF

SEQ ID NO: 98639 - DNA, 657 bp, Artificial Sequence
  derived and/or modified sequence
atgagcagaagcaagagagacaacaacttctacagcgtggagatcggcgacagcaccttcaccgtgctgaagagataccagaacctgaagcccatcggcagcggcgcccagggcatcgtgtgcgccgcctacgacgccatcctggagagaaacgtggccatcaagaagctgagcagacccttccagaaccagacccacgccaagagagcctacagagagctggtgctgatgaagtgcgtgaaccacaagaacatcatcggcctgctgaacgtgttcaccccccagaagagcctggaggagttccaggacgtgtacatcgtgatggagctgatggacgccaacctgtgccaggtgatccagatggagctggaccacgagagaatgagctacctgctgtaccagatgctgtgcggcatcaagcacctgcacagcgccggcatcatccacagagacctgaagcccagcaacatcgtggtgaagagcgactgcaccctgaagatcctggacttcggcctggccagaaccgccggcaccagcttcatgatgaccccctacgtggtgaccagatactacagagcccccgaggtgatcctgggcatgggctacaaggagaacggcggcagaatgggcaagggcatcttcaccagactgcagtag

SEQ ID NO: 98640 - DNA, 927 bp, Artificial Sequence
  derived and/or modified sequence
atgagcagaagcaagagagacaacaacttctacagcgtggagatcggcgacagcaccttcaccgtgctgaagagataccagaacctgaagcccatcggcagcggcgcccagggcatcgtgtgcgccgcctacgacgccatcctggagagaaacgtggccatcaagaagctgagcagacccttccagaaccagacccacgccaagagagcctacagagagctggtgctgatgaagtgcgtgaaccacaagaacatcatcggcctgctgaacgtgttcaccccccagaagagcctggaggagttccaggacgtgtacatcgtgatggagctgatggacgccaacctgtgccaggtgatccagatggagctggaccacgagagaatgagctacctgctgtaccagatgctgtgcggcatcaagcacctgcacagcgccggcatcatccacagagacctgaagcccagcaacatcgtggtgaagagcgactgcaccctgaagatcctggacttcggcctggccagaaccgccggcaccagcttcatgatgaccccctacgtggtgaccagatactacagagcccccgaggtgatcctgggcatgggctacaaggagaacgccgacagcgagcacaacaagctgaaggccagccaggccagagacctgctgagcaagatgctggtgatcgacgccagcaagagaatcagcgtggacgaggccctgcagcacccctacatcaacgtgtggtacgaccccagcgaggccgaggcccccccccccaagatccccgacaagcagctggacgagagagagcacaccatcgaggagtggaaggagctgatctacaaggaggtgatggacctggaggagagaaccaagaacggcgtgatcagaggccagcccagccccctggcccaggtgcagcagtag

SEQ ID NO: 98641 - DNA, 429 bp, Artificial Sequence
  derived and/or modified sequence
atgagcagaagcaagagagacaacaacttctacagcgtggagatcggcgacagcaccttcaccgtgctgaagagataccagaacctgaagcccatcggcagcggcgcccagggcatcgtgtgcgccgcctacgacgccatcctggagagaaacgtggccatcaagaagctgagcagacccttccagaaccagacccacgccaagagagcctacagagagctggtgctgatgaagtgcgtgaaccacaagaacatcatcggcctgctgaacgtgttcaccccccagaagagcctggaggagttccaggacgtgtacatcgtgatggagctgatggacgccaacctgtgccaggtgatccagatggagctggaccacgagagaatgagctacctgctgtaccagatgctgtgcggcatcaagcacctgtag

SEQ ID NO: 98642 - DNA, 294 bp, Artificial Sequence
  derived and/or modified sequence
atgatcatcggcctgctgaacgtgttcaccccccagaagagcctggaggagttccaggacgtgtacatcgtgatggagctgatggacgccaacctgtgccaggtgatccagatggagctggaccacgagagaatgagctacctgctgtaccagatgctgtgcggcatcaagcacctgcacagcgccggcatcatccacagagacctgaagcccagcaacatcgtggtgaagagcgactgcaccctgaagatcctggacttcggcctggccagaaccgccggcaccagcttctag

SEQ ID NO: 98643 - DNA, 657 bp, Artificial Sequence
  derived and/or modified sequence
atgtcgagaagcaaacgcgataacaatttctactcggtcgagatcggtgacagcacatttacagtgctgaaaagataccagaacttgaagcccatcggatctggagcccagggcattgtgtgtgctgcttacgatgctattctggaacgtaacgtggcaattaagaagctgagccggccattccaaaaccagacacacgcgaagcgcgcataccgggaacttgttctcatgaagtgcgtgaatcacaagaacatcattggtcttcttaatgtcttcacacctcagaaatcactcgaagaattccaggatgtgtatatcgtcatggagctcatggacgccaatctgtgtcaagtcatccagatggaactggatcacgaacgcatgagctacctgctttatcagatgctgtgtggcattaaacacctgcatagtgcagggattatccacagggatctgaagcccagcaatatcgttgtgaagtctgactgtactctcaaaattctggattttgggctagccaggaccgccgggacctcttttatgatgacaccttacgttgtcacccggtattatcgtgcaccggaggtgatcctcggaatgggatacaaggaaaatggaggtcgtatgggtaaaggcattttcactagactccaatag

SEQ ID NO: 98644 - DNA, 927 bp, Artificial Sequence
  derived and/or modified sequence
atgagccgaagcaagcgagacaacaatttttactcagtggagattggtgactctaccttcacagtcctgaagaggtaccagaatctcaagccaatcggaagtggcgcccaggggatcgtctgtgctgcctatgatgcgattctggaacgcaacgttgcaataaagaagctgtccaggccattccagaaccaaacccatgcgaaacgggcataccgcgagcttgtgctgatgaagtgtgtgaaccataagaacattattgggctcttgaacgttttcacaccacaaaaaagtcttgaagaatttcaggatgtttacatcgtaatggagcttatggatgccaatctctgccaggtgatccagatggagctggaccatgaacgcatgtcctacttgctgtaccaaatgctgtgcggaatcaagcatctccactccgctggaatcatccacagggatttgaagccctccaacatcgtggtgaagagcgactgcacactcaaaatcctggattttggtctggccaggacagccggaacctcgtttatgatgaccccctacgtggtgacccgttattatcgcgcacccgaggtgatcctgggcatggggtataaggagaatgccgatagcgagcataacaagttaaaggcgtcacaggcacgcgacctcctgagtaagatgctcgttatcgacgcctccaaaaggattagcgtcgacgaggccctgcagcacccctatatcaatgtgtggtacgatccttcagaggcagaggctccccctcctaagattccagataagcagcttgacgaacgcgaacacacaattgaggagtggaaggaactcatctacaaggaggtcatggacctggaggagaggacaaagaacggagtgattaggggccaaccatcgcccctggcccaggtgcaacagtag

SEQ ID NO: 98645 - DNA, 429 bp, Artificial Sequence
  derived and/or modified sequence
atgtcccgttcaaaaagggataataatttctacagtgtggagattggtgattctacgtttacagttttaaagcggtaccagaacctgaagcccatcgggagtggagctcagggcattgtatgcgctgcctatgacgctatcttggaaagaaatgtggctattaaaaagctgtcgaggccgtttcagaatcagacccacgccaagcgggcttacagggagctggtgctcatgaaatgtgttaatcacaagaatattataggactgctgaatgtattcaccccccagaagagcctcgaggagttccaggatgtatatattgtcatggagctgatggacgctaatctatgccaggttattcagatggagctcgaccacgaaagaatgagttatctgctgtaccaaatgctgtgtggaattaagcatctgtag

SEQ ID NO: 98646 - DNA, 294 bp, Artificial Sequence
  derived and/or modified sequence
atgatcatcggccttttaaatgtgtttacaccccaaaagtcgctggaggagtttcaggatgtgtacatagtgatggaacttatggatgcaaatctgtgtcaagtgatccagatggagcttgatcacgaacggatgtcatatctcctctatcaaatgctctgtgggattaaacacctgcactccgcggggatcatccacagagatctgaagccaagcaatatcgtcgtgaaaagtgactgcacgctgaagatcctggatttcggcctggctcgcaccgccgggacttcattctag

SEQ ID NO: 98647 - DNA, 429 bp, Artificial Sequence
  derived and/or modified sequence
atgtccagatcaaagagagataacaatttctattccgtggagataggggatagcacctttaccgtcctgaaacggtaccagaacctaaagcctatcggtagtggggcccagggaattgtctgtgcagcatatgacgcaatacttgaacgcaatgtggccataaagaaactgagtcggccgtttcaaaaccagacccatgctaagcgggcgtacagagaactggtgctgatgaagtgtgtgaatcacaagaatatcattggactccttaacgtcttcaccccacagaagtctctggaagagttccaagacgtgtatattgtcatggaactcatggacgccaatctttgtcaggttatccaaatggagctggaccacgaacgcatgtcctatctgctatatcaaatgttgtgcggaataaagcacctgtag

SEQ ID NO: 98648 - DNA, 657 bp, Artificial Sequence
  derived and/or modified sequence
atgagccgcagcaagagggacaacaacttctacagcgtggagattggagacagcaccttcaccgtgctgaagcgctaccagaacctgaagcccatcggcagcggggcccagggcatcgtgtgtgccgcctatgatgccatcctggagagaaatgtggccatcaagaagctgagccggcccttccagaaccagacccacgccaagagggcctaccgggagctggtgctgatgaagtgtgtgaaccacaagaacatcatcggcctgctgaatgtgttcaccccccagaagagcctggaggagttccaggatgtgtacatcgtgatggagctgatggatgccaacctgtgccaggtgatccagatggagctggaccacgagaggatgagctacctgctgtaccagatgctgtgtggcatcaagcacctgcacagcgctggcatcatccaccgggacctgaagcccagcaacatcgtggtgaagagtgactgcaccctgaagatcctggactttggcctggccaggacagctggcaccagcttcatgatgaccccctacgtggtgacccgctactaccgggcccctgaggtgatcctgggcatgggctacaaggaaaatggaggccgcatgggcaagggcatcttcacccggctgcagtag

SEQ ID NO: 98649 - DNA, 927 bp, Artificial Sequence
  derived and/or modified sequence
atgagccgcagcaagagggacaacaacttctacagcgtggagattggagacagcaccttcaccgtgctgaagcgctaccagaacctgaagcccatcggcagcggggcccagggcatcgtgtgtgccgcctatgatgccatcctggagagaaatgtggccatcaagaagctgagccggcccttccagaaccagacccacgccaagagggcctaccgggagctggtgctgatgaagtgtgtgaaccacaagaacatcatcggcctgctgaatgtgttcaccccccagaagagcctggaggagttccaggatgtgtacatcgtgatggagctgatggatgccaacctgtgccaggtgatccagatggagctggaccacgagaggatgagctacctgctgtaccagatgctgtgtggcatcaagcacctgcacagcgctggcatcatccaccgggacctgaagcccagcaacatcgtggtgaagagtgactgcaccctgaagatcctggactttggcctggccaggacagctggcaccagcttcatgatgaccccctacgtggtgacccgctactaccgggcccctgaggtgatcctgggcatgggctacaaggaaaatgctgacagcgagcacaacaagctgaaggccagccaggcccgggacctgctgagcaagatgctggtgattgatgccagcaagaggatctctgtggatgaggccctgcagcacccctacatcaacgtgtggtatgaccccagcgaggccgaggcccccccacccaagatcccagacaagcagctggatgagcgggagcacaccatcgaggagtggaaggagctgatctacaaggaggtgatggacctggaggagaggaccaagaatggagtcatccggggccagcccagccccctggcccaggtgcagcagtag

SEQ ID NO: 98650 - DNA, 429 bp, Artificial Sequence
  derived and/or modified sequence
atgagccgcagcaagagggacaacaacttctacagcgtggagattggagacagcaccttcaccgtgctgaagcgctaccagaacctgaagcccatcggcagcggggcccagggcatcgtgtgtgccgcctatgatgccatcctggagagaaatgtggccatcaagaagctgagccggcccttccagaaccagacccacgccaagagggcctaccgggagctggtgctgatgaagtgtgtgaaccacaagaacatcatcggcctgctgaatgtgttcaccccccagaagagcctggaggagttccaggatgtgtacatcgtgatggagctgatggatgccaacctgtgccaggtgatccagatggagctggaccacgagaggatgagctacctgctgtaccagatgctgtgtggcatcaagcacctgtag

SEQ ID NO: 98651 - DNA, 294 bp, Artificial Sequence
  derived and/or modified sequence
atgatcatcggcctgctgaatgtgttcaccccccagaagagcctggaggagttccaggatgtgtacatcgtgatggagctgatggatgccaacctgtgccaggtgatccagatggagctggaccacgagaggatgagctacctgctgtaccagatgctgtgtggcatcaagcacctgcacagcgctggcatcatccaccgggacctgaagcccagcaacatcgtggtgaagagtgactgcaccctgaagatcctggactttggcctggccaggacagctggcaccagcttctag

SEQ ID NO: 98652 - DNA, 657 bp, Artificial Sequence
  derived and/or modified sequence
atgagccggagcaagcgggacaacaacttctacagcgtggagatcggggattccacatttaccgtgctcaaacggtatcagaatctcaagcctataggtagcggcgcccagggtattgtatgtgcagcatacgatgccattcttgaacggaacgtcgcaattaaaaaattaagccgacccttccagaatcagacgcatgcaaagcgtgcttatagagaattggtcctgatgaaatgcgttaaccacaagaatattatcgggttgcttaacgtgttcacacctcagaaatcactagaagaattccaagatgtgtatattgtcatggaactcatggacgccaacctgtgtcaggtaatacagatggagctggatcatgaaagaatgtcatacctattgtaccaaatgttgtgtggcattaagcacctgcattccgcaggtatcatccacagggatctcaaaccatctaatattgtagtgaagtccgattgtactctgaaaattctggacttcgggctggcccggacagcgggcactagttttatgatgaccccttacgtagtcacacgctactatagagcacccgaagtgattctcggcatgggatataaggagaacggcgggcgcatgggaaaaggaatctttacccgattacagtag

SEQ ID NO: 98653 - DNA, 927 bp, Artificial Sequence
  derived and/or modified sequence
atgagccggagcaagcgggacaacaacttctacagcgtggagatcggtgattctacgttcacagtgctgaaaagataccagaatctgaagcctataggaagcggcgcccaagggatcgtgtgtgccgcttatgacgccatcctggaaagaaatgtcgccatcaagaagctttcacggccatttcagaaccagacgcacgctaagcgagcctatagggagctcgtcctgatgaagtgtgttaatcacaagaatatcattggcttattgaacgtcttcaccccccagaaaagcctggaagagttccaggacgtctacattgtcatggagctgatggacgccaacctctgtcaggtgatccagatggagctagatcacgagcgtatgagttatctgctgtatcagatgttgtgtggcataaagcacctacactccgctggcatcattcaccgggacctgaagccaagcaatattgtcgtcaaaagcgattgtacactgaaaattctggacttcggcctcgctagaaccgctggtacaagcttcatgatgacaccatacgtggtcacacgctactaccgggcacctgaggtgatcctgggtatgggatacaaggagaatgccgattctgagcacaacaagctgaaggctagtcaggctcgcgacctgttgtccaagatgctggtcatcgacgctagcaaacgaatatccgtcgatgaagcgctgcagcatccttacatcaatgtgtggtatgacccatctgaggctgaagccccacctcctaaaatacccgataagcaattggacgagcgggaacacacaatagaggaatggaaggaattaatttataaagaggtgatggatttagaggagcgcaccaagaatggcgtcatccgggggcaaccttctcctttggcacaagtacagcagtag

SEQ ID NO: 98654 - DNA, 429 bp, Artificial Sequence
  derived and/or modified sequence
atgagccggagcaagcgggacaacaacttctacagcgtggagatcggtgactccacttttactgtattaaagcggtatcagaatctcaaaccgatcggcagcggcgctcaagggatcgtatgcgcagcctatgatgccatacttgagcggaacgtcgccattaagaagctgtctagaccctttcagaatcagacacacgcaaagagggcttaccgagagctcgtcctgatgaaatgtgtcaatcacaaaaatattatagggctcctcaatgtgttcactccccagaagtccctggaggaattccaggatgtctacatcgtcatggagctgatggacgctaacctctgccaggtgatccaaatggagttggaccatgagcggatgagttatctactgtaccagatgctgtgtgggataaagcatctctag

SEQ ID NO: 98655 - DNA, 294 bp, Artificial Sequence
  derived and/or modified sequence
atgatcatcggcctgctgaacgtgttcaccccccagaagagcctggaagagtttcaggacgtctacattgtcatggagcttatggacgccaacttgtgccaggtaattcaaatggaactggaccacgaacgtatgtcatacctcctctatcaaatgctctgcggaataaagcacctacactcagccggcatcatacatcgagatctaaaacctagcaacatcgtggtcaagtccgattgcactctgaaaatcctggattttggactggccaggacagcggggacctctttttag

SEQ ID NO: 98656 - DNA, 429 bp, Artificial Sequence
  derived and/or modified sequence
atgagccggagcaagcgggacaacaacttctacagcgtggagatcggagactcaacttttacagtgctgaaacgataccagaacctgaagccaatcggaagtggtgcccagggaatcgtgtgtgcagcctatgatgccatccttgagcgtaacgtcgccattaagaagctctctcgtccgttccaaaatcagactcatgccaagagagcatacagggagctggtcctgatgaagtgtgtgaatcacaaaaatattattggcctgctaaatgtgttcacccctcaaaagtctttggaggagttccaagacgtttacatagtaatggagctgatggacgccaacctttgtcaggtcattcagatggagctggatcatgagcggatgagctatctgctttatcagatgctgtgtggcatcaagcacctctag

SEQ ID NO: 98657 - DNA, 739 bp, Artificial Sequence
  derived and/or modified sequence
atgagcagaagcaagcgtgacaacaatttttatagtgtagagattggagattctacattcacagtcctgaaacgatatcagaatttaaaacctataggctcaggagctcaaggaatagtatgcgcagcttatgatgccattcttgaaagaaatgttgcaatcaagaagctaagccgaccatttcagaatcagactcatgccaagcgggcctacagagagctagttcttatgaaatgtgttaatcacaaaaatataattggccttttgaatgttttcacaccacagaaatccctagaagaatttcaagatgtttacatagtcatggagctcatggatgcaaatctttgccaagtgattcagatggagctagatcatgaaagaatgtcctaccttctctatcagatgctgtgtggaatcaagcaccttcattctgctggaattattcatcgggacttaaagcccagtaatatagtagtaaaatctgattgcactttgaagattcttgacttcggtctggccaggactgcaggaacgagttttatgatgacgccttatgtagtgactcgctactacagagcacccgaggtcatccttggcatgggctacaaggaaaacggaggaagaatgggaaaaggcatattcacaaggttacaataaggtgcctgtgagatataaaatttataactgccacatcctttcttaggaatttttaaatttctattttcttgtaatatgaata

SEQ ID NO: 98658 - DNA, 927 bp, Artificial Sequence
  derived and/or modified sequence
atgagcagaagcaagcgtgacaacaatttttatagtgtagagattggagattctacattcacagtcctgaaacgatatcagaatttaaaacctataggctcaggagctcaaggaatagtatgcgcagcttatgatgccattcttgaaagaaatgttgcaatcaagaagctaagccgaccatttcagaatcagactcatgccaagcgggcctacagagagctagttcttatgaaatgtgttaatcacaaaaatataattggccttttgaatgttttcacaccacagaaatccctagaagaatttcaagatgtttacatagtcatggagctcatggatgcaaatctttgccaagtgattcagatggagctagatcatgaaagaatgtcctaccttctctatcagatgctgtgtggaatcaagcaccttcattctgctggaattattcatcgggacttaaagcccagtaatatagtagtaaaatctgattgcactttgaagattcttgacttcggtctggccaggactgcaggaacgagttttatgatgacgccttatgtagtgactcgctactacagagcacccgaggtcatccttggcatgggctacaaggaaaacgctgactcagaacacaacaaacttaaagccagtcaggcaagggatttgttatccaaaatgctggtaatagatgcatctaaaaggatctctgtagatgaagctctccaacacccgtacatcaatgtctggtatgatccttctgaagcagaagctccaccaccaaagatccctgacaagcagttagatgaaagggaacacacaatagaagagtggaaagaattgatatataaggaagttatggacttggaggagagaaccaagaatggagttatacgggggcagccctctcctttagcacaggtgcagcagtga

SEQ ID NO: 98659 - DNA, 860 bp, Artificial Sequence
  derived and/or modified sequence
acctgggtgcgctccgctgcccgccagcccgcctgccgccgcgagccccgcccgcctgtcctctcgcgtcctcttcgcgtgggtcctgcctccgcggcgggagaagaaaatggagcggggggtcttgcagccttacagtcatttgtaatggttacctcagattcccctgctgtggttaacgttaaacctaggaggtcagatgctctaagtgaacatgtttagtgctgtgcctgacaaaagcaagcaatcaaaatgggacttccttgagggcaggcctgtcttgcatctgtttctccaccacctagcctggaatataactggccttatgggtttctagaaggaaaatcacagaggtaaagcatcatttcatcacatcctgtcaaggcttcttggtgaatttttggatgaagccattaaattaattgcttgccatcatgagcagaagcaagcgtgacaacaatttttatagtgtagagattggagattctacattcacagtcctgaaacgatatcagaatttaaaacctataggctcaggagctcaaggaatagtatgcgcagcttatgatgccattcttgaaagaaatgttgcaatcaagaagctaagccgaccatttcagaatcagactcatgccaagcgggcctacagagagctagttcttatgaaatgtgttaatcacaaaaatataattggccttttgaatgttttcacaccacagaaatccctagaagaatttcaagatgtttacatagtcatggagctcatggatgcaaatctttgccaagtgattcagatggagctagatcatgaaagaatgtcctaccttctctatcagatgctgtgtggaatcaagcacctt

SEQ ID NO: 98660 - DNA, 603 bp, Artificial Sequence
  derived and/or modified sequence
actcagccgagcggccgaggccggacgacgcggcttggattgcggagccgcgagcagcgctgggtaacggccgcggcgaccaccccggacggcccctgtccccgctggcgggcttccctgtcgccgttcgctgcgctgccggcttcttggtgaatttttggatgaagccattaaattaattgcttgccatcatgagcagaagcaagcgtgacaacaatttttatagtgtagagattggagattctacattcacagtcctgaaacgatatcagaatttaaaacctataggctcaggagctcaaggaatagtatgataattggccttttgaatgttttcacaccacagaaatccctagaagaatttcaagatgtttacatagtcatggagctcatggatgcaaatctttgccaagtgattcagatggagctagatcatgaaagaatgtcctaccttctctatcagatgctgtgtggaatcaagcaccttcattctgctggaattattcatcgggacttaaagcccagtaatatagtagtaaaatctgattgcactttgaagattcttgacttcggtctggccaggactgcaggaacgagttttat

SEQ ID NO: 98661 - DNA, 907 bp, Artificial Sequence
  derived and/or modified sequence
cgcggtgacggcccgcgtctctgttactcagccgagcggccgaggccggacgacgcggcttggattgcggagccgcgagcagcgctgggtaacggccgcggcgaccaccccggacggcccctgtccccgctggcgggcttccctgtcgccgttcgctgcgctgccggtcttgcagccttacagtcatttgtaatggttacctcagattcccctgctgtggttaacgttaaacctaggaggtcagatgctctaagtgaacatgtttagtgctgtgcctgacaaaagcaagcaatcaaaatgggacttccttgagggcaggcctgtcttgcatctgtttctccaccacctagcctggaatataactggccttatgggtttctagaaggaaaatcacagaggtaaagcatcatttcatcacatcctgtcaaggcttcttggtgaatttttggatgaagccattaaattaattgcttgccatcatgagcagaagcaagcgtgacaacaatttttatagtgtagagattggagattctacattcacagtcctgaaacgatatcagaatttaaaacctataggctcaggagctcaaggaatagtatgcgcagcttatgatgccattcttgaaagaaatgttgcaatcaagaagctaagccgaccatttcagaatcagactcatgccaagcgggcctacagagagctagttcttatgaaatgtgttaatcacaaaaatataattggccttttgaatgttttcacaccacagaaatccctagaagaatttcaagatgtttacatagtcatggagctcatggatgcaaatctttgccaagtgattcagatggagctagatcatgaaagaatgtcctaccttctctatcagatgctgtgtggaatcaagcaccttca

SEQ ID NO: 98662 - DNA, 657 bp, Artificial Sequence
  derived and/or modified sequence
atgagtcgctccaaacgtgacaacaacttttattccgttgagatcggggactccacttttacggtgctgaaaaggtaccagaacctgaaaccaattggctcaggcgctcagggcatagtctgcgcagcatacgatgctattttagagcgaaatgtggccattaagaagctgtcaaggccctttcagaatcagacccatgcaaaacgtgcctaccgggaactcgtgcttatgaagtgtgtgaatcacaaaaatatcatcggcctgctgaatgtctttaccccacagaaatcactcgaggagtttcaggatgtgtatatcgtgatggagttaatggacgctaatctctgccaggttatccagatggagttagaccatgaaagaatgtcgtacctgttataccagatgttgtgcgggattaagcatctacattccgcgggtataattcatcgggacctcaaacccagtaatatagtggttaagtctgactgcacactgaagatattagattttggactcgcccgaacagccggaactagtttcatgatgacaccatacgtggttacacggtattatagagcgcctgaggtgatactgggcatgggatacaaagagaacgggggaaggatgggcaagggaatcttcactcgtctccaatag

SEQ ID NO: 98663 - DNA, 927 bp, Artificial Sequence
  derived and/or modified sequence
atgtcacgtagcaaacgggataacaatttttacagtgttgagattggtgacagtacctttacagtcttaaagagatatcagaatctgaagcccattgggtcaggcgctcaggggattgtgtgcgctgcgtacgacgccatcctggagagaaatgttgcgattaagaagctgtcaaggcccttccagaatcagactcacgctaaacgggcataccgagaattggtgctgatgaagtgcgttaatcacaagaacatcatcgggctcctgaacgtgtttacgccacagaagagtttagaggaatttcaggacgtctacatcgtaatggagctcatggatgccaacctgtgccaggtcatacagatggagctagaccacgaacgaatgtcttacttactttatcaaatgctgtgtggaatcaaacacctgcacagtgccggaatcatacacagggacctgaaacccagcaatattgttgtcaaaagcgactgtaccttaaagatcctggattttgggctggctagaaccgctggcactagtttcatgatgactccctatgtggtcacacgttattatagggcccctgaagtgatcctgggcatgggctacaaagagaatgcagacagcgagcataataaactcaaggcctctcaagctcgagacctgctctccaagatgctggtaatagacgcctctaagcgcatctctgttgacgaggccctacagcatccttacatcaacgtttggtacgacccttctgaggcagaagctccccctcctaagatccccgacaagcaattagacgaaagagagcacaccatcgaggaatggaaggagctgatatacaaagaagtcatggatctggaggaacgcaccaaaaacggagtcatacggggacagcccagcccattggctcaggtccagcaatag

SEQ ID NO: 98664 - DNA, 429 bp, Artificial Sequence
  derived and/or modified sequence
atgagtcggagcaaacgagataataacttctactccgtggaaatcggcgactcaaccttcaccgtactaaaaagatatcaaaacctcaaaccaatcggatctggagcccagggcattgtgtgcgctgcctacgatgccatcctcgagcggaatgttgcaataaaaaaactgagtagaccttttcagaaccagacccacgccaaaagagcgtaccgggaactggttctcatgaagtgtgtcaaccataagaacatcatagggcttctgaatgtattcacaccgcaaaaaagcctcgaggagttccaagacgtgtacatcgtgatggaactgatggatgcgaatctctgtcaggttattcagatggaactagatcacgaaagaatgagctacctattataccagatgctctgtggtatcaaacatttatag

SEQ ID NO: 98665 - DNA, 294 bp, Artificial Sequence
  derived and/or modified sequence
atgattataggcctcctgaacgtatttactccacaaaaatccttagaagagttccaggatgtatacattgtgatggagctcatggacgcaaatctatgtcaggtgattcagatggagctggatcacgagcgaatgagctacctcctgtatcagatgctgtgtggcatcaagcatctgcactctgctggcattatacaccgggatctgaagcccagtaatattgtagttaaaagcgattgtactctgaaaattctcgacttcggtctcgctcgtacagctggcaccagcttttag

SEQ ID NO: 98666 - DNA, 429 bp, Artificial Sequence
  derived and/or modified sequence
atgtctaggagtaagagggacaacaacttttattccgtcgagattggagactcaactttcacggtgctgaagcggtatcagaacctgaaaccgataggcagcggggcacagggcatcgtgtgtgctgcctacgatgcaattctcgagcggaatgtggctataaagaagttaagcaggcctttccaaaaccaaacacacgcaaaaagggcctatcgggagcttgtgctcatgaagtgcgtgaatcacaagaatattatcggcctgctgaacgtctttactccccagaagtctctggaggaattccaggacgtgtatatcgtgatggagttaatggatgccaatctgtgccaggttatacagatggagctggatcatgaaaggatgtcttacctcctgtatcagatgctctgcggcatcaagcacttatag

SEQ ID NO: 98667 - protein, 456 aa, Artificial Sequence
  derived and/or modified sequence
MRLARLLRGAALAGPGPGLRAAGFSRSFSSDSGSSPASERGVPGQVDFYARFSPSPLSMKQFLDFGSVNACEKTSFMFLRQELPVRLANIMKEISLLPDNLLRTPSVQLVQSWYIQSLQELLDFKDKSAEDAKAIYERPRRTWLQVSSLCCMACKMIFTDTVIRIRNRHNDVIPTMAQGVIEYKESFGVDPVTSQNVQYFLDRFYMSRISIRMLLNQHSLLFGGKGKGSPSHRKHIGSINPNCNVLEVIKDGYENARRLCDLYYINSPELELEELNAKSPGQPIQVVYVPSHLYHMVFELFKNAMRATMEHHANRGVYPPIQVHVTLGNEDLTVKMSDRGGGVPLRKIDRLFNYMYSTAPRPRVETSRAVPLAGFGYGLPISRLYAQYFQGDLKLYSLEGYGTDAVIYIKALSTDSIERLPVYNKAAWKHYNTNHEADDWCVPSREPKDMTTFRSA

SEQ ID NO: 98668 - DNA, 1371 bp, Artificial Sequence
  derived and/or modified sequence
atgagactggccagactgctgagaggcgccgccctggccggccccggccccggcctgagagccgccggcttcagcagaagcttcagcagcgacagcggcagcagccccgccagcgagagaggcgtgcccggccaggtggacttctacgccagattcagccccagccccctgagcatgaagcagttcctggacttcggcagcgtgaacgcctgcgagaagaccagcttcatgttcctgagacaggagctgcccgtgagactggccaacatcatgaaggagatcagcctgctgcccgacaacctgctgagaacccccagcgtgcagctggtgcagagctggtacatccagagcctgcaggagctgctggacttcaaggacaagagcgccgaggacgccaaggccatctacgagagacccagaagaacctggctgcaggtgagcagcctgtgctgcatggcctgcaagatgatcttcaccgacaccgtgatcagaatcagaaacagacacaacgacgtgatccccaccatggcccagggcgtgatcgagtacaaggagagcttcggcgtggaccccgtgaccagccagaacgtgcagtacttcctggacagattctacatgagcagaatcagcatcagaatgctgctgaaccagcacagcctgctgttcggcggcaagggcaagggcagccccagccacagaaagcacatcggcagcatcaaccccaactgcaacgtgctggaggtgatcaaggacggctacgagaacgccagaagactgtgcgacctgtactacatcaacagccccgagctggagctggaggagctgaacgccaagagccccggccagcccatccaggtggtgtacgtgcccagccacctgtaccacatggtgttcgagctgttcaagaacgccatgagagccaccatggagcaccacgccaacagaggcgtgtacccccccatccaggtgcacgtgaccctgggcaacgaggacctgaccgtgaagatgagcgacagaggcggcggcgtgcccctgagaaagatcgacagactgttcaactacatgtacagcaccgcccccagacccagagtggagaccagcagagccgtgcccctggccggcttcggctacggcctgcccatcagcagactgtacgcccagtacttccagggcgacctgaagctgtacagcctggagggctacggcaccgacgccgtgatctacatcaaggccctgagcaccgacagcatcgagagactgcccgtgtacaacaaggccgcctggaagcactacaacaccaaccacgaggccgacgactggtgcgtgcccagcagagagcccaaggacatgaccaccttcagaagcgcctag

SEQ ID NO: 98669 - DNA, 1371 bp, Artificial Sequence
  derived and/or modified sequence
atgcgcctggcccgtctgctgcggggggccgcattagccgggcccgggccgggactgcgggcggctgggttttcacggagtttttctagtgatagcgggagcagccctgcttctgaaaggggagtcccaggccaagttgatttttacgcccgcttttcgccctcgcctctcagcatgaagcagtttctggatttcggatccgttaatgcgtgtgaaaagactagttttatgtttctgcgccaggaacttccagtaagactggccaatatcatgaaggagatcagcctgctaccagacaatcttctcagaactcccagcgtccagctggttcaaagctggtacatccagtccctgcaggaactactagatttcaaggataaaagtgctgaagatgccaaggctatctatgagaggccaagacggacatggcttcaagtgagttctctctgctgcatggcttgcaaaatgatcttcaccgacaccgtcattcgaatccggaataggcataacgacgtcattcccaccatggcgcagggagttatcgaatataaggaaagttttggagtcgatccggttacgtcccagaatgtgcagtactttctcgatcggttttatatgtccagaatttcaattcgtatgttgctcaatcagcattctctgctatttggcgggaaagggaaggggtctccttctcatcggaagcatataggaagcatcaatcctaactgtaatgtcctcgaggtcattaaagatggctacgagaacgctagaaggctctgcgacttgtactatatcaactcccccgagctggagctcgaagagctgaatgcaaaatctccagggcaaccgatccaggtggtgtacgttccaagtcatctgtaccacatggtgtttgagttgttcaaaaacgctatgagggcaacaatggaacatcacgccaacagaggcgtgtaccctcctatccaagttcacgtgacacttggtaatgaggatttgaccgtgaaaatgagtgaccggggggggggagttccccttaggaaaatagatcggttgtttaactacatgtactcaactgcaccacgacctagagtcgagacgtcccgcgccgtccccttggccggattcggctacgggctgcccatctcccggctttacgctcagtacttccagggagacctcaagctctactctcttgaggggtatggcacagacgctgtgatctatatcaaggcactgtcaaccgactccatcgagcgcttgcccgtctacaataaggcagcctggaagcattacaataccaatcatgaggctgacgactggtgtgtacccagccgggagccaaaagacatgacaaccttccgctccgcctag

SEQ ID NO: 98670 - DNA, 1371 bp, Artificial Sequence
  derived and/or modified sequence
atgaggctggcccggctgctgcggggggccgccctggccggccctggccctggcctgcgggccgccggcttcagccgctccttcagcagtgacagcggcagcagccctgccagcgagcggggcgtgcccggccaggtggacttctacgcccgcttcagccccagccccctgtccatgaagcagttcctggactttggatctgtgaatgcctgtgagaagaccagcttcatgttcctgcggcaggagctgcctgtgcggctggccaacatcatgaaggagatcagcctgctgcctgacaacctgctgcggacccccagcgtgcagctggtgcagagctggtacatccagagcctgcaggagctgctggacttcaaggacaagtctgcagaagatgccaaggccatctatgaaagacccaggaggacctggctgcaggtgagcagcctgtgctgcatggcctgcaagatgatcttcacagacaccgtcatccgcatccggaacagacacaatgatgtgatccccaccatggcccagggcgtgattgagtacaaggagagctttggagtggaccctgtgaccagccagaatgtgcagtacttcctggaccgcttctacatgagccgcatcagcatccgcatgctgctgaaccagcacagcctgctgtttggaggcaagggcaagggcagccccagccacaggaagcacatcggcagcatcaaccccaactgcaatgtgctggaggtgatcaaggatggctatgaaaatgcccggcggctgtgtgacctgtactacatcaacagccctgagctggagctggaggagctgaatgccaagagccctggccagcccatccaggtggtgtatgtgcccagccacctgtaccacatggtgtttgagctgttcaagaatgccatgagggccaccatggagcaccacgccaacagaggagtgtacccacccatccaggtgcacgtgaccctgggcaatgaagacctgactgtgaagatgtctgaccggggcggcggcgtgcccctgaggaagattgacaggctcttcaactacatgtacagcacagccccccggccccgggtggagaccagcagagctgtgcccctggccggcttcggctacggcctgcccatcagccggctgtatgcccagtacttccagggcgacctgaagctgtacagcctggagggctatggaacagatgctgtgatctacatcaaggccctgagcacagacagcattgagcggctgcctgtgtacaacaaggccgcctggaagcactacaacaccaaccatgaagcagatgactggtgtgtgcccagccgggagcccaaggacatgaccaccttccgcagcgcctag

SEQ ID NO: 98671 - DNA, 1371 bp, Artificial Sequence
  derived and/or modified sequence
atgcggctggcccggctgctgcggggcgccgccctggccggccccggccccggcctgagggccgcggggttttctcgaagtttttcgagcgacagcggtagttcgccagcttctgaacgtggagtgcctggccaggtggatttttatgcgcgattttcaccttcgcccctctctatgaagcagtttctggacttcggcagcgtgaacgcatgtgagaagactagctttatgtttctgcggcaggagctccctgtaagactggctaacatcatgaaggaaatctctctgctgccagataatctcctacgaactccatcagtgcaacttgtgcagtcctggtacatacagtccctgcaggaactgttggatttcaaagataaatctgccgaggacgcaaaggctatctatgaacgcccacgtaggacatggctgcaggtaagctccctttgttgtatggcttgcaagatgatcttcacagatacggtaatcagaattcgcaaccgccacaatgacgttattccaacaatggctcaaggagttattgaatacaaggagagttttggcgtcgatccggtcactagccagaatgtgcagtactttttggacaggttttacatgtcaagaatatctatccgcatgctactgaaccaacattctctcctgttcggtggtaaaggcaaagggtccccctcccaccggaagcacataggcagtattaatcccaactgtaatgttctggaggtgataaaagacgggtatgagaatgcaagacgcttgtgtgacctctactacataaatagccccgaattggagctggaagagttgaacgccaagtcccctggacaacccattcaggtggtatatgtgccttcccacctgtatcacatggttttcgagctgttcaaaaacgctatgcgcgccacaatggaacatcacgccaacagaggagtgtatccccccatacaagttcacgtcaccctgggtaatgaagaccttacggttaaaatgagcgatagaggaggcggcgtgccactgcgcaaaattgacagactcttcaattacatgtactctactgcgccgcggcctagggttgagacgtcgagggccgtccccttagccggctttggatatggtttgccaatatcccgtctctatgctcagtactttcagggcgatctgaagctgtattcgctggaggggtatggcaccgacgccgtgatctatatcaaagcgctgagtacagacagcatagaacggcttcccgtctataacaaggccgcctggaagcattataacacaaatcacgaagctgatgattggtgcgtcccttcgcgggaacccaaggatatgacaacctttcgcagtgcgtag

SEQ ID NO: 98672 - DNA, 1371 bp, Artificial Sequence
  derived and/or modified sequence
atgaggcttgcgcgactcttgcgcggagcagcactcgctggtcctggccctgggctcagagccgcaggattttccaggtctttctcctcagatagcggctcctctcctgcgagcgaaagaggagtgcctggacaagtagatttctacgctaggttctccccaagtcctctctctatgaagcagttcttggattttggatcagttaatgcatgtgaaaagacgtcgttcatgttcctgcgacaagaactgccagtcagacttgcaaacattatgaaagagatctctctattgcctgacaacctcctccggacaccaagcgtccagctcgtacagtcttggtatatccagtctctgcaggagttattagatttcaaggacaaatcggccgaagacgctaaagccatctatgagcggcctagacgaacgtggctccaggtctcttcgctttgttgtatggcctgcaaaatgatatttaccgacacagtaattcggattaggaaccgccacaatgatgtcattccaacaatggctcagggcgtgatcgaatacaaagaatcctttggcgtggaccctgtaaccagccagaacgtgcagtattttcttgacagattttatatgtcccgaattagcatacgcatgctgctgaaccagcactccctgctgtttggaggcaagggaaagggctcgccctcccataggaaacacattggctccatcaatcctaattgcaatgtcctggaagtgataaaggacggctacgagaatgcccgtaggttatgcgatctttactacataaacagtcctgaactagagctagaggaactcaatgccaaaagcccgggacagcccatccaggtggtgtacgtcccctcccacctttatcatatggtgttcgaactttttaaaaatgctatgcgcgctaccatggagcatcacgcaaacagaggcgtatacccccctatccaggtccacgtaacactcggcaacgaagatctgactgttaagatgagcgatcgcggagggggagtgcctctccgaaagatagacaggttgttcaattacatgtattctactgctccgagacctcgggtggagactagccgggcagtgccgctcgcaggattcggctacggtttacctatctctagactctatgcacagtatttccaaggcgacctcaagctttacagcctggagggatatggcactgatgccgtcatttacatcaaagcacttagcacagacagtattgagcggctgcctgtgtacaataaggctgcctggaagcattacaatactaaccacgaggccgacgactggtgcgtgcctagcagagaacctaaggatatgactaccttccgcagcgcttag

SEQ ID NO: 98673 - DNA, 1515 bp, Artificial Sequence
  derived and/or modified sequence
gccgggctccggctaggagggtgggggccgcgccggtgacagccgatccccgcccctgctgcccgccacgtccctcacgtaccactcggcagaggcgcggggaaacctggcgtactggctgtggcttctctagcgggactcggcatgaggctggcgcggctgcttcgcggagccgccttggccggcccgggcccggggctgcgcgccgccggcttcagccgcagcttcagctcggactcgggctccagcccggcgtccgagcgcggcgttccgggccaggtggacttctacgcgcgcttctcgccgtccccgctctccatgaagcagttcctggacttcggatcagtgaatgcttgtgaaaagacctcatttatgtttctgcggcaagagttgcctgtcagactggcaaatataatgaaagaaataagtctccttccagataatcttctcaggacaccatccgttcaattggtacaaagctggtatatccagagtcttcaggagcttcttgattttaaggacaaaagtgctgaggatgctaaagctatttatgaaaggcctagaagaacatggttgcaggtctctagtttatgctgtatggcctgcaagatgatctttacagatactgtgatacggatcagaaaccgacacaatgatgtcattcccacaatggcccagggtgtgattgaatacaaggagagctttggggtggatcctgtcaccagccagaatgttcagtactttttggatcgattctacatgagtcgcatttcaattagaatgttactcaatcagcactctttattgtttggtggaaaaggcaaaggaagtccatctcatcgaaaacacattggaagcataaatccaaactgcaatgtacttgaagttattaaagatggctatgaaaatgctaggcgtctgtgtgatttgtattatattaactctcccgaactagaacttgaagaactaaatgcaaaatcaccaggacagccaatacaagtggtttatgtaccatcccatctctatcacatggtgtttgaacttttcaagaatgcaatgagagccactatggaacaccatgccaacagaggtgtttacccccctattcaagttcatgtcacgctgggtaatgaggatttgactgtgaagatgagtgaccgaggaggtggcgttcctttgaggaaaattgacagacttttcaactacatgtattcaactgcaccaagacctcgtgttgagacctcccgcgcagtgcctctggctggttttggttatggattgcccatatcacgtctttacgcacaatacttccaaggagacctgaagctgtattccctagagggttacgggacagatgcagttatctacattaaggctctgtcaacagactcaatagaaagactcccagtgtataacaaagctgcctggaagcattacaacaccaaccacgaggctgatgactggtgcgtccccagcagagaacccaaagacatgacgacgttccgcagtgcctag

SEQ ID NO: 98674 - DNA, 1302 bp, Artificial Sequence
  derived and/or modified sequence
atgggcaatgcatgttgggagctgtactgtttagagcatggaatccagcctgacggacaaatgccctcagataaaactatagggggaggggacgactcatttacaacgttcttttgcgagacaggcgctggtaaacacgtgcccagagccgtgttcgttgatctggagccaacagtgatagatgaaattcgcaacgggccttataggcaattatttcatcccgaacagctaattacaggcaaggaggacgccgctaataattatgcccgaggccactacaccatcggtaaagaaatcatagaccccgtgctggatcggatccgaaagctaagcgatcagtgcacagggcttcaaggctttttggtgtttcactcattcggcggtggcacaggcagtggtttcacaagcctgcttatggaacgcctctccgttgactacggcaagaagtcaaaactggaattttctatataccccgctcctcaggtgtcaacagcagtggtagagccctacaactcaatacttacgacacacactacacttgaacattcagattgtgcatttatggtcgacaacgaagccatatatgatatttgtcgtcgcaaccttgacatcgaaagacctacctataccaacttgaaccgcctgatctctcaaatcgtgtcctctattaccgctagtctccgcttcgatggcgctttaaatgtggacttaaccgagttccaaactaatctcgttccctatcccaggattcattttcccctggccacctacgctcccgtgatctcagcagagaaggcgtaccacgaacaactgtctgtggccgaaatcaccaacgcttgtttcgaacccgcaaaccagatggtcaaatgcgatccacggcacggcaagtatatggcttgctgtctgctctaccgcggagatgtggtaccgaaggacgtaaatgcagccatcgctgcaatcaagaccaaacggtcgatccaatttgtggattggtgcccaaccggcttcaaggtgggcatcaactatcagcccccaactgtagtgccaggcggagacctggccaaggtccaaagagctgtctgtatgctctcaaataccactgccattgccgaagcttgggccagactggatcacaagtttgatctgatgtatgccaaacgtgcattcgtccactggtatgtgggcgaggggatggaggaaggtgaattcagcgaggctcgcgaggatatggcggcactcgaaaaagattacgaagaagtcggaattgatagttacgaggacgaggacgagggcgaagagtag

SEQ ID NO: 98675 - DNA, 1302 bp, Artificial Sequence
  derived and/or modified sequence
atgggaaacgcttgttgggagctgtactgcctggaacacggcatccagccagatggtcagatgccctctgataagaccatcggtggcggagacgatagcttcacaacctttttttgcgaaactggggctggtaagcatgtacctcgcgccgtgttcgtggacttggagccaaccgtgattgatgaaataagaaacgggccataccgtcagctcttccatcctgaacagctaatcacgggaaaagaggatgccgctaataattatgcacgtgggcattacacaatcgggaaagagattatcgacccggtcttggatagaataaggaagctgagcgaccagtgcacaggcctgcagggttttcttgtatttcattcattcggcgggggtacaggatctgggtttacgtctctgctaatggagcgactgtcggtagactacgggaaaaaaagcaagctcgaattctcaatatacccagcccctcaggtaagcacagccgtagtggaaccctacaattcgatcctcacgactcacacaactttagagcactctgattgtgcctttatggttgataatgaggccatttatgatatctgtcgcaggaacctagatattgaacggccaacctacactaatctgaatcggctgatcagccagatcgtgagtagtatcacagctagcctgagatttgacggtgcactgaatgtggatcttaccgaattccaaactaatctggtgccttacccccggatacacttccccctagccacctatgctcccgtaatctccgccgaaaaggcttaccacgaacaactcagcgtcgccgaaatcactaatgcatgcttcgagccggcaaaccagatggttaagtgcgacccacggcacgggaaatacatggcgtgctgcttgctgtataggggggacgttgttccaaaagatgtgaatgctgcaattgctgcgataaagaccaagagatctattcaattcgttgactggtgccccacaggattcaaagttggcatcaattatcagcctcccacagtcgtcccgggcggcgacttagcaaaagtacagagggctgtatgtatgctcagcaacacaaccgccattgctgaggcatgggcccgcctcgatcacaaatttgaccttatgtacgctaaacgagccttcgtccattggtacgtcggagaagggatggaagaaggagaattttctgaggctagagaggatatggcggctctagagaaggattatgaagaagttgggatagatagctatgaggacgaggacgagggagaagagtag

SEQ ID NO: 98676 - DNA, 1302 bp, Artificial Sequence
  derived and/or modified sequence
atggggaacgcctgttgggagctctactgccttgagcacggaattcaacctgacggccagatgccaagtgataagacaatcggcggtggggacgactcgtttaccaccttcttctgtgaaactggggccggaaaacatgtgcctcgagccgtattcgttgacctcgagccaacagtgatagatgaaatccggaatggcccttacagacagctgtttcaccccgaacaactgatcacagggaaagaagatgctgcaaacaattatgcaagaggacactacactattggaaaggagattattgatccagtgctagataggatacgtaagcttagtgaccagtgcacaggcctacaaggcttcttggtgtttcattcttttgggggcgggacaggctcagggttcacatcgttactgatggagagacttagtgttgactacggaaagaagagcaaactggaattcagcatctacccagcgcctcaggtttctacagccgtcgttgaaccttacaatagcatccttactacacacaccacgttggagcattcagactgcgcctttatggtcgacaacgaagccatttatgacatttgccgaaggaacttggacattgaaagacccacatatactaatctgaaccgcttaatctcccaaatcgtctcatcgataactgcatccctacgtttcgacggagccctgaacgtcgacctcactgagttccagaccaatctcgttccttaccccaggatccacttcccactcgctacctatgcccccgtcatttccgcggaaaaagcctaccatgaacagctgtctgtcgcagagattacgaacgcttgttttgagcccgctaatcaaatggttaagtgcgaccctagacatggtaaatacatggcatgttgcttgctgtataggggggacgttgttccaaaagatgtgaatgctgcaattgctgcgataaagaccaagagatctattcaattcgttgactggtgccccacaggattcaaagttggcatcaattatcagcctcccacagtcgtcccgggcggcgacttagcaaaagtacagagggctgtatgtatgctcagcaacacaaccgccattgctgaggcatgggcccgcctcgatcacaaatttgaccttatgtacgctaaacgagccttcgtccattggtacgtcggagaagggatggaagaaggggaattttcagaagcacgggaggatatggcagcactggagaaggactacgaggaagtcggcattgattcatacgaggacgaggatgagggggaagagtag

SEQ ID NO: 98677 - DNA, 1302 bp, Artificial Sequence
  derived and/or modified sequence
atgggcaacgcctgctgggagctgtactgcctggagcacggcatccagcccgacggccagatgcccagcgacaagaccatcggcggcggcgacgacagcttcaccaccttcttctgcgagaccggcgccggcaagcacgtgcccagagccgtgttcgtggacctggagcccaccgtgatcgacgagatcagaaacggcccctacagacagctgttccaccccgagcagctgatcaccggcaaggaggacgccgccaacaactacgccagaggccactacaccatcggcaaggagatcatcgaccccgtgctggacagaatcagaaagctgagcgaccagtgcaccggcctgcagggcttcctggtgttccacagcttcggcggcggcaccggcagcggcttcaccagcctgctgatggagagactgagcgtggactacggcaagaagagcaagctggagttcagcatctaccccgccccccaggtgagcaccgccgtggtggagccctacaacagcatcctgaccacccacaccaccctggagcacagcgactgcgccttcatggtggacaacgaggccatctacgacatctgcagaagaaacctggacatcgagagacccacctacaccaacctgaacagactgatcagccagatcgtgagcagcatcaccgccagcctgagattcgacggcgccctgaacgtggacctgaccgagttccagaccaacctggtgccctaccccagaatccacttccccctggccacctacgcccccgtgatcagcgccgagaaggcctaccacgagcagctgagcgtggccgagatcaccaacgcctgcttcgagcccgccaaccagatggtgaagtgcgaccccagacacggcaagtacatggcctgctgcctgctgtacagaggcgacgtggtgcccaaggacgtgaacgccgccatcgccgccatcaagaccaagagaagcatccagttcgtggactggtgccccaccggcttcaaggtgggcatcaactaccagccccccaccgtggtgcccggcggcgacctggccaaggtgcagagagccgtgtgcatgctgagcaacaccaccgccatcgccgaggcctgggccagactggaccacaagttcgacctgatgtacgccaagagagccttcgtgcactggtacgtgggcgagggcatggaggagggcgagttcagcgaggccagagaggacatggccgccctggagaaggactacgaggaggtgggcatcgacagctacgaggacgaggacgagggcgaggagtag

SEQ ID NO: 98678 - DNA, 1302 bp, Artificial Sequence
  derived and/or modified sequence
atgggaaatgcttgttgggagctgtactgcttggaacacggcattcagccagacggtcagatgccaagtgacaagaccattggggggggggatgattctttcaccacatttttctgtgagaccggcgcaggcaagcacgtgcctcgggctgtgtttgttgatctcgagcctacagtgatcgatgagatccggaacggcccctatcgccagctgttccatcccgagcagctcataactggcaaagaggacgccgccaataactacgcaaggggtcactacaccattggtaaggagatcattgatccagtcctggacagaatccggaaattgtccgaccaatgtaccggactgcaaggctttctggtctttcatagctttggcggcgggacaggctcaggcttcacgtcgcttctgatggagaggctctctgtggactatgggaaaaagagtaaattggagttttctatttaccctgctccacaggtgagcaccgcagtcgtggagccctacaacagtatccttaccacccacactacactggaacattccgattgcgccttcatggtggacaatgaggccatttatgacatctgcaggcggaatctggacattgagcgccctacatacaccaacctgaaccggctcatttcccagatcgtgtcctccatcactgccagcctgcgcttcgatggcgccctgaacgttgacctcaccgagtttcagactaacctggtcccatacccgaggatccatttccctttggcgacctacgctcccgtaatttcagccgaaaaagcttatcacgagcagctctcggtggctgaaataacaaatgcctgcttcgaacccgctaatcagatggtgaagtgcgacccccggcacggaaaatacatggcatgctgcctgctttaccgtggggatgtagtcccaaaagacgtcaacgcagcgatagccgccataaagacaaaaaggagcatccagttcgtcgactggtgccccacagggttcaaggtggggatcaattatcagccaccaaccgtagtgcctgggggagatctcgctaaagtacagagggcggtttgcatgctgtcgaacacgactgcaatcgctgaagcgtgggcccgtctcgaccacaagttcgatctgatgtacgctaagcgagcttttgtgcactggtacgtgggggaagggatggaggaaggcgaattttcagaggcacgggaggacatggccgctcttgaaaaagactatgaggaggtagggatcgatagttatgaggacgaggatgaaggcgaagagtag

SEQ ID NO: 98679 - DNA, 1302 bp, Artificial Sequence
  derived and/or modified sequence
atgggaaatgcctgctgggagctgtactgcctggagcacggcatccagccagatggccagatgcccagcgacaagaccatcggcggcggagatgacagcttcaccaccttcttctgtgaaacaggagctgggaagcacgtgcccagggctgtgtttgtggacctggagcccaccgtgattgatgagatcagaaatggcccctaccggcagctgttccaccctgagcagctgatcaccgggaaggaggatgctgccaacaactatgcccggggccactacaccatcggcaaggagatcatcgaccctgtgctggaccgcatcaggaagctgagtgaccagtgcaccggcctgcagggcttcctggtgttccacagctttggaggcggcaccggcagcggcttcaccagcctgctgatggagcggctgtctgtggactatggcaagaagagcaagctggagttcagcatctacccagccccccaggtgtccacagctgtggtggagccctacaacagcatcctgaccacccacaccaccctggagcacagcgactgtgccttcatggtggacaatgaggccatctatgacatctgcagaagaaacctggacatcgagcggcccacctacaccaacctgaacagactcatcagccagatcgtgagcagcatcacagccagcctgcgctttgatggagccctgaatgtggacctgacagagttccagaccaacctggtgccctacccccgcatccacttccccctggccacctacgcccctgtgatctctgctgagaaggcctaccacgagcagctgtctgtggccgagatcaccaatgcctgctttgagcccgccaaccagatggtgaagtgtgaccccaggcatggcaagtacatggcctgctgcctgctgtacagaggagatgtggtgcccaaggatgtgaatgctgccatcgccgccatcaagaccaagaggagcatccagtttgtggactggtgccccaccggcttcaaggtgggcatcaactaccagccccccaccgtggtgcctggaggagacctggccaaggtgcagagagctgtgtgcatgctgagcaacaccacagccatcgccgaggcctgggcccggctggaccacaagtttgacctgatgtatgccaagagggcctttgtgcactggtacgtgggggagggcatggaggagggggagttcagcgaggcccgggaggacatggccgccctggagaaggactatgaggaggtgggcatcgacagctatgaagatgaagatgaaggagaggagtag

SEQ ID NO: 98680 - DNA, 1302 bp, Artificial Sequence
  derived and/or modified sequence
atgggcaacgcctgctgggagctgtactgcctggagcacggcatccagcccgatggccagatgccatctgataagaccatcggaggcggcgacgattcatttaccactttcttctgtgaaactggcgctggcaagcacgtgccaagggcggtcttcgtcgatctggaaccaacagtcattgacgagattagaaatggcccataccgtcagttgttccatcctgagcagctcatcactggcaaggaagatgcggctaataactacgctaggggacactacacgattggaaaagaaatcattgatccggtacttgatcggattaggaagttgagcgatcagtgcaccggccttcaggggttcctcgtgttccactctttcgggggcggcactgggagtggatttacgtctctgttgatggagaggctctccgtagactacgggaaaaagagtaagctcgagttttctatttaccccgctcctcaagtatccactgcagtggtagagccctacaatagcattctaacaacacacaccacactggaacactcagattgtgcttttatggtcgacaatgaagccatctacgatatctgtcggcgcaatctggatatcgaacgccctacttataccaatttgaataggctgattagtcagatcgtttcttccataacagcctccctcagatttgacggcgcccttaatgtggacctaactgagttccagacgaatctagtcccttatccccgcattcactttcctctcgcgacttacgccccagtgatcagtgctgaaaaggcataccacgagcagctcagcgtggctgagatcacaaacgcatgcttcgaaccggctaaccaaatggttaagtgtgaccctcggcacgggaaatacatggcatgctgtttgctgtatagaggcgatgtggtgccaaaagatgtgaacgccgcaatagctgcgataaaaaccaagagatccatccagttcgtggactggtgccccaccgggttcaaggtaggcatcaactaccagccccccacagttgtccccggcggagaccttgcgaaggtgcagcgggctgtgtgtatgctgtccaacactaccgccatcgcagaggcctgggcacgcctggaccacaagttcgacttgatgtatgccaaaagggcttttgtgcactggtatgtgggcgaggggatggaagagggagagttctctgaagctcgggaagacatggccgcacttgaaaaagactatgaggaggtaggtattgacagttacgaagatgaggacgaaggggaagagtag

SEQ ID NO: 98681 - RNA, 1302 nt, Artificial Sequence
  derived and/or modified sequence
augggaaacgcuuguugggagcuguacugccuggaacacggcauccagccagauggucagaugcccucugauaagaccaucgguggcggagacgauagcuucacaaccuuuuuuugcgaaacuggggcugguaagcauguaccucgcgccguguucguggacuuggagccaaccgugauugaugaaauaagaaacgggccauaccgucagcucuuccauccugaacagcuaaucacgggaaaagaggaugccgcuaauaauuaugcacgugggcauuacacaaucgggaaagagauuaucgacccggucuuggauagaauaaggaagcugagcgaccagugcacaggccugcaggguuuucuuguauuucauucauucggcggggguacaggaucuggguuuacgucucugcuaauggagcgacugucgguagacuacgggaaaaaaagcaagcucgaauucucaauauacccagccccucagguaagcacagccguaguggaacccuacaauucgauccucacgacucacacaacuuuagagcacucugauugugccuuuaugguugauaaugaggccauuuaugauaucugucgcaggaaccuagauauugaacggccaaccuacacuaaucugaaucggcugaucagccagaucgugaguaguaucacagcuagccugagauuugacggugcacugaauguggaucuuaccgaauuccaaacuaaucuggugccuuacccccggauacacuucccccuagccaccuaugcucccguaaucuccgccgaaaaggcuuaccacgaacaacucagcgucgccgaaaucacuaaugcaugcuucgagccggcaaaccagaugguuaagugcgacccacggcacgggaaauacauggcgugcugcuugcuguauaggggggacguuguuccaaaagaugugaaugcugcaauugcugcgauaaagaccaagagaucuauucaauucguugacuggugccccacaggauucaaaguuggcaucaauuaucagccucccacagucgucccgggcggcgacuuagcaaaaguacagagggcuguauguaugcucagcaacacaaccgccauugcugaggcaugggcccgccucgaucacaaauuugaccuuauguacgcuaaacgagccuucguccauugguacgucggagaagggauggaagaaggagaauuuucugaggcuagagaggauauggcggcucuagagaaggauuaugaagaaguugggauagauagcuaugaggacgaggacgagggagaagaguag

SEQ ID NO: 98682 - RNA, 1302 nt, Artificial Sequence
  derived and/or modified sequence
auggggaacgccuguugggagcucuacugccuugagcacggaauucaaccugacggccagaugccaagugauaagacaaucggcgguggggacgacucguuuaccaccuucuucugugaaacuggggccggaaaacaugugccucgagccguauucguugaccucgagccaacagugauagaugaaauccggaauggcccuuacagacagcuguuucaccccgaacaacugaucacagggaaagaagaugcugcaaacaauuaugcaagaggacacuacacuauuggaaaggagauuauugauccagugcuagauaggauacguaagcuuagugaccagugcacaggccuacaaggcuucuugguguuucauucuuuugggggcgggacaggcucaggguucacaucguuacugauggagagacuuaguguugacuacggaaagaagagcaaacuggaauucagcaucuacccagcgccucagguuucuacagccgucguugaaccuuacaauagcauccuuacuacacacaccacguuggagcauucagacugcgccuuuauggucgacaacgaagccauuuaugacauuugccgaaggaacuuggacauugaaagacccacauauacuaaucugaaccgcuuaaucucccaaaucgucucaucgauaacugcaucccuacguuucgacggagcccugaacgucgaccucacugaguuccagaccaaucucguuccuuaccccaggauccacuucccacucgcuaccuaugcccccgucauuuccgcggaaaaagccuaccaugaacagcugucugucgcagagauuacgaacgcuuguuuugagcccgcuaaucaaaugguuaagugcgacccuagacaugguaaauacauggcauguugcuugcuguauaggggggacguuguuccaaaagaugugaaugcugcaauugcugcgauaaagaccaagagaucuauucaauucguugacuggugccccacaggauucaaaguuggcaucaauuaucagccucccacagucgucccgggcggcgacuuagcaaaaguacagagggcuguauguaugcucagcaacacaaccgccauugcugaggcaugggcccgccucgaucacaaauuugaccuuauguacgcuaaacgagccuucguccauugguacgucggagaagggauggaagaaggggaauuuucagaagcacgggaggauauggcagcacuggagaaggacuacgaggaagucggcauugauucauacgaggacgaggaugagggggaagaguag

SEQ ID NO: 98683 - protein, 907 aa, Artificial Sequence
  derived and/or modified sequence
RGQGGDTRSKGTRQPEPPGASRDPARSCWDPPVDMGGALGPALLLTSLFGAWAGLGPGQGEQGMTVAVVFSSSGPPQAQFRARLTPQSFLDLPLEIQPLTVGVNTTNPSSLLTQICGLLGAAHVHGIVFEDNVDTEAVAQILDFISSQTHVPILSISGGSAVVLTPKEPGSAFLQLGVSLEQQLQVLFKVLEEYDWSAFAVITSLHPGHALFLEGVRAVADASHVSWRLLDVVTLELGPGGPRARTQRLLRQLDAPVFVAYCSREEAEVLFAEAAQAGLVGPGHVWLVPNLALGSTDAPPATFPVGLISVVTESWRLSLRQKVRDGVAILALGAHSYWRQHGTLPAPAGDCRVHPGPVSPAREAFYRHLLNVTWEGRDFSFSPGGYLVQPTMVVIALNRHRLWEMVGRWEHGVLYMKYPVWPRYSASLQPVVDSRHLTVATLEERPFVIVESPDPGTGGCVPNTVPCRRQSNHTFSSGDVAPYTKLCCKGFCIDILKKLARVVKFSYDLYLVTNGKHGKRVRGVWNGMIGEVYYKRADMAIGSLTINEERSEIVDFSVPFVETGISVMVARSNGTVSPSAFLEPYSPAVWVMMFVMCLTVVAITVFMFEYFSPVSYNQNLTRGKKSGGPAFTIGKSVWLLWALVFNNSVPIENPRGTTSKIMVLVWAFFAVIFLASYTANLAAFMIQEQYIDTVSGLSDKKFQRPQDQYPPFRFGTVPNGSTERNIRSNYRDMHTHMVKFNQRSVEDALTSLKMGKLDAFIYDAAVLNYMAGKDEGCKLVTIGSGKVFATTGYGIAMQKDSHWKRAIDLALLQFLGDGETQKLETVWLSGICQNEKNEVMSSKLDIDNMAGVFYMLLVAMGLALLVFAWEHLVYWKLRHSVPNSSQLDFLLAFSRVGAHPSPHRPKF

SEQ ID NO: 98684 - DNA, 2724 bp, Artificial Sequence
  derived and/or modified sequence
aggggtcaaggaggcgacacacgatccaaaggaacccggcagcctgaaccccctggagctagcagagatcctgctagaagttgttgggaccctcctgtggacatgggcggagctctcgggccagcactcttgctgacctctttatttggcgcatgggccggccttggcccaggacagggcgagcaaggcatgacagtagccgtggtcttctccagctccggccctccccaagcgcagtttcgagcgcgtctgaccccgcagagtttcctggaccttccattggaaatacagccactgactgttggcgttaataccacaaatccctcaagtctgctgacgcagatttgcggcctcttaggggctgcccacgtacatgggatcgtatttgaagacaatgttgacacagaggcagtcgctcaaattctcgatttcatctctagccagactcacgtgcctattctgtccattagcggcggaagcgctgttgtccttacgcccaaggaacctgggagcgccttccttcagttaggagtgtcactggaacagcaactgcaggtcctgttcaaagtgcttgaggagtatgactggtcggctttcgcagtcataacgtccctgcaccccggccatgcgctgttcctggagggggtacgagcagtagctgacgccagtcacgtgagctggaggcttctggacgtagtcactctcgaattgggaccgggcggccctcgcgcccggacacagcgacttctgcggcagctggacgcacctgtctttgttgcatattgctcgagggaagaggccgaggttctgttcgctgaggctgcccaggcggggctggtggggccgggccatgtctggctcgtaccgaatctcgcccttggctcaacagacgctccacccgccacctttccagtcggcctaatctcggtcgtgaccgagagctggcggctgagcctgcgccagaaagtccgcgatggcgtggccatcctggctctaggggctcattcttactggaggcagcatggaacgcttcctgctcctgccggggactgccgggtacaccccgggccggtctcccccgcccgagaggcgttctaccgacacctgcttaatgttacatgggaaggtcgcgacttctcgttcagtcccggggggtatcttgtgcaacctacgatggtcgtgatcgccttgaaccggcaccggctatgggagatggtcgggcgttgggagcacggtgtgttgtacatgaaataccccgtgtggccacgatactccgcaagcctacagcctgtggtggattccagacacctcacagtcgcaactctagaggaacggccatttgtcatcgtggaatcaccagacccgggtacaggtggctgtgtgcccaatacggtgccttgtcggagacagtctaaccacaccttcagcagcggtgacgtcgcaccctacactaaactttgctgtaagggattctgtatagatattctcaagaagctggcccgtgtggtgaagtttagttacgatctgtatctcgttaccaacggtaaacatggtaaaagggtgcgtggtgtatggaatggtatgattggggaagtctattataagcgtgccgacatggccatagggagccttaccattaatgaggagaggagcgaaattgtggacttctctgtgcctttcgtagagactgggatcagcgttatggtggcccgttctaatgggacagtgagccccagcgcctttctcgaaccgtattcacccgctgtgtgggtgatgatgttcgtgatgtgtcttactgtcgtagccatcaccgtatttatgttcgaatacttctcacccgtctcttataaccagaatctaacacgtggtaagaaatccggaggccccgcctttaccatcgggaaaagcgtgtggctcctctgggccctggtgttcaataattccgtgcctatcgagaacccaagggggacaacatctaagatcatggtgctggtgtgggcttttttcgctgtgatattcctggcctcctacacagcaaatctcgccgccttcatgatccaggagcagtatattgacactgtgtctggtctgagcgataagaagtttcaacgcccacaggaccagtacccaccgttccgctttgggacagtccctaatgggagtaccgagaggaatattagatctaattaccgcgacatgcacacacacatggtgaaattcaaccagcggtctgtggaagatgcgttgacgtctctcaagatggggaagttggacgccttcatatacgacgcagccgtgctcaattacatggcgggcaaggatgaaggctgcaaactagtaacgattggtagcggaaaagtcttcgcaaccacaggctatggaatagccatgcagaaagattcacattggaagagggcaattgacctggcgctgcttcagtttttaggcgacggggagactcagaaactggaaacagtatggctcagcggcatctgccagaatgaaaagaacgaggttatgagttccaaactcgatattgataacatggccggagtgttttacatgttgctggtggcaatgggtctcgctttgctggtgttcgcctgggaacacctagtctattggaaactgagacacagcgtcccaaactcgtcacaactggattttttactggcttttagtcgtgttggcgctcatccaagcccacacaggccaaagttctag

SEQ ID NO: 98685 - DNA, 3032 bp, Artificial Sequence
  derived and/or modified sequence
gcgagtcccgcttcttccccttccagctctgccccatctcctttgccccagcctagctctctccttcctgcgacctgggagaatcggagtgggcttccagagtagtggcatcttgcagatgctggcccgtgcccggctcccgggcttccagagcgcaaagggaagggtaggcagagagggcactgggcgagcaagacctggcgctgggccctggctgcgcaccagccgcctgcgccggtctctgggggcttcgcccaggatccccgacggcggggaggggaagccccgagtctcctgtttcctgcctacgcgggcagggcggggacacgcggagcaaaggcacccggcaacctgaacccccaggtgcgtcccgcgaccctgcaaggagctgctgggaccctccggtggacatgggtggggccctggggccggccctgttgctcacctcgctcttcggtgcctgggcagggctgggtccggggcagggcgagcagggcatgacggtggctgtggtgtttagcagctcagggccgccccaggcccagttccgtgcccgcctcaccccccagagcttcctggacctacccctggagatccagccgctcacagttggggtcaacaccaccaaccccagcagcctcctcacccagatctgcggcctcctgggtgctgcccacgtccacggcattgtctttgaggacaacgtggacaccgaggcggtggcccagatccttgacttcatctcctcccagacccatgtgcccatcctcagcatcagcggaggctctgctgtggtcctcacccccaaggagccgggctccgccttcctgcagctgggcgtgtccctggagcagcagctgcaggtgctgttcaaggtgctggaagagtacgactggagcgccttcgccgtcatcaccagcctgcacccgggccacgcgctcttcctggagggcgtgcgcgccgtcgccgacgccagccacgtgagttggcggctgctggacgtggtcacgctggagctgggcccgggagggccgcgcgcgcgcacgcagcgcctgctgcgccagctcgacgcgcccgtgtttgtggcctactgctcgcgcgaggaggccgaggtgctcttcgccgaggcggcgcaggccggtctggtggggcccggccacgtgtggctggtgcccaacctggcgctgggcagcaccgatgcgccccccgccaccttccccgtgggcctcatcagcgtcgtcaccgagagctggcgcctcagcctgcgccagaaggtgcgcgacggcgtggccattctggccctgggcgcccacagctactggcgccagcatggaaccctgccagccccggccggggactgccgtgttcaccctgggcccgtcagccctgcccgggaggccttctacaggcacctactgaatgtcacctgggagggccgagacttctccttcagccctggtgggtacctggtccagcccaccatggtggtgatcgccctcaaccggcaccgcctctgggagatggtggggcgctgggagcatggcgtcctatacatgaagtaccccgtgtggcctcgctacagtgcctctctgcagcctgtggtggacagtcggcacctgacggtggccacgctggaagagcggccctttgtcatcgtggagagccctgaccctggcacaggaggctgtgtccccaacaccgtgccctgccgcaggcagagcaaccacaccttcagcagcggggacgtggccccctacaccaagctctgctgtaagggattctgcatcgacatcctcaagaagctggccagagtggtcaaattctcctacgacctgtacctggtgaccaacggcaagcatggcaagcgggtgcgcggcgtatggaacggcatgattggggaggtgtactacaagcgggcagacatggccatcggctccctcaccatcaatgaggaacgctccgagatcgtagacttctctgtaccctttgtggagacgggcatcagtgtgatggtggctcgcagcaatggcaccgtctccccctcggccttcttggagccatatagccctgcagtgtgggtgatgatgtttgtcatgtgcctcactgtggtggccatcaccgtcttcatgttcgagtacttcagccctgtcagctacaaccagaacctcaccagaggcaagaagtccgggggcccagctttcactatcggcaagtccgtgtggctgctgtgggcgctggtcttcaacaactcagtgcccatcgagaacccgcggggcaccaccagcaagatcatggttctggtctgggccttctttgctgtcatcttcctcgccagctacacggccaacctggccgccttcatgatccaagagcaatacatcgacactgtgtcgggcctcagtgacaagaagtttcagcggcctcaagatcagtacccacctttccgcttcggcacggtgcccaacggcagcacggagcggaacatccgcagtaactaccgtgacatgcacacccacatggtcaagttcaaccagcgctcggtggaggacgcgctcaccagcctcaagatggggaagctggatgccttcatctatgatgctgctgtcctcaactacatggcaggcaaggacgagggctgcaagctggtcaccattgggtctggcaaggtctttgctaccactggctacggcatcgccatgcagaaggactcccactggaagcgggccatagacctggcgctcttgcagttcctgggggacggagagacacagaaactggagacagtgtggctctcagggatctgccagaatgagaagaacgaggtgatgagcagcaagctggacatcgacaacatggcaggcgtcttctacatgctgctggtggccatggggctggccctgctggtcttcgcctgggagcacctggtctactggaagctgcgccactcggtgcccaactcatcccagctggacttcctgctggctttcagcagggtgggtgcccacccctccccacacaggccaaagttttaa

SEQ ID NO: 98686 - DNA, 2724 bp, Artificial Sequence
  derived and/or modified sequence
cggggccagggcggggacaccaggagcaagggcacccggcagcctgagcccccaggggccagccgggaccctgcccggagctgctgggacccccctgtggacatgggcggggccctgggccctgccctgctgctgaccagcctgtttggagcctgggccggcctgggccctggccagggcgagcagggcatgacagtggccgtggtgttcagcagcagcggccccccccaggcccagttccgggcccggctgaccccccagagcttcctggacctgcccctggagatccagcccctgactgtgggcgtgaacaccaccaaccccagcagcctgctgacccagatctgtggcctgctgggcgccgcccacgtgcatggaattgtgtttgaggacaacgtggacacagaagctgtggcccagatcctggacttcatcagcagccagacccacgtgcccatcctgagcatcagcggcggcagcgctgtggtgctgacccccaaggagcccggcagcgccttcctgcagctgggcgtgtccctggagcagcagctgcaggtgctcttcaaggtgctggaggagtatgactggagcgcctttgctgtgatcaccagcctgcaccctggccacgccctcttcctggagggcgtgcgggctgtggctgatgccagccacgtgtcctggaggctgctggatgtggtgaccctggagctgggccctgggggcccccgggcccggacccagaggctgctgcggcagctggatgcccctgtgtttgtggcctactgcagccgggaggaggccgaggtgctgtttgctgaggccgcccaggccggcctggtgggccctggccacgtgtggctggtgcccaacctggccctgggcagcacagatgcccccccagccaccttccctgtgggcctcatctctgtggtgacagagagctggaggctgagcctgcggcagaaggtgagagatggagtggccatcctggccctgggcgcccacagctactggaggcagcacggcaccctgcctgccccagctggggactgccgggtgcaccctggccctgtgtccccagcccgggaggccttctaccgccacctgctgaatgtgacctgggagggccgggacttctccttcagccctgggggctacctggtgcagcccaccatggtggtgattgccctgaacagacaccggctgtgggagatggtgggccgctgggagcacggcgtgctgtacatgaagtaccctgtgtggccccgctacagcgccagcctgcagcctgtggtggacagccgccacctgactgtggccaccctggaggagcggccctttgtgattgtggagagcccagaccccggcactggaggctgtgtgcccaacacagtgccctgccggcggcagagcaaccacaccttcagcagtggagatgtggccccctacaccaagctgtgctgcaagggcttctgcatcgacatcctgaagaagctggcccgggtggtgaagttctcctatgacctgtacctggtgaccaacgggaagcacggcaagagggtgcggggcgtgtggaatggcatgattggagaggtgtactacaagagagctgacatggccatcggcagcctgaccatcaatgaggagaggagtgaaattgtggacttctctgtgccctttgtggagaccggcatctctgtgatggtggcccggagcaatggaacagtgagccccagcgccttcctggagccctacagccctgctgtgtgggtgatgatgtttgtgatgtgcctgactgtggtggccatcaccgtcttcatgtttgagtacttcagccctgtgtcctacaaccagaacctgacccggggcaagaagagcggcggccctgccttcaccatcggcaagtctgtgtggctgctgtgggccctggtgttcaacaacagcgtgcccatcgagaacccccggggcaccaccagcaagatcatggtgctggtgtgggccttctttgctgtgatcttcctggccagctacacagccaacctggccgccttcatgatccaggagcagtacatcgacacagtgtctggcctgagtgacaagaagttccagaggccccaggaccagtacccacccttccgcttcggcaccgtgcccaacggcagcacagagaggaacatccgcagcaactacagagacatgcacacccacatggtgaagttcaaccagaggtctgtggaggatgccctgaccagcctgaagatgggcaagctggatgccttcatctatgatgctgctgtgctgaactacatggccggcaaggatgagggctgcaagctggtgaccatcggcagcggcaaggtgtttgccaccaccggctatggaattgccatgcagaaggacagccactggaagagggccatcgacctggccctgctgcagttcctgggagatggagagacccagaagctggagaccgtgtggctgagcggcatctgccagaatgagaagaatgaggtgatgagcagcaagctggacatcgacaacatggccggggtcttctacatgctgctggtggccatgggcctggccctgctggtgtttgcctgggagcacctggtgtactggaagctgcggcacagcgtgcccaacagcagccagctggacttcctgctggccttcagccgggtgggcgcccaccccagcccccaccggcccaagttctag

SEQ ID NO: 98687 - DNA, 2724 bp, Artificial Sequence
  derived and/or modified sequence
cggggccagggcggcgacacccggagcaagggcacccggcagcccgagccgcccggtgcctcgcgggaccctgcccgctcatgctgggaccctcctgtggatatgggcggagccctaggtccagccctccttctcacaagtctctttggcgcttgggccgggctgggccctgggcagggggagcagggcatgactgtcgcagttgttttctcaagttctggccccccccaggctcagtttcgagcccgcctcaccccacaaagcttcctggacttgcccttggaaatccagccactgacggtcggcgtgaacactacaaatccttctagcctcctcacccaaatctgcgggctccttggcgcggcccatgtgcacggaatcgtcttcgaggacaatgttgatacagaggcagtggcccaaatccttgacttcatctcaagccagacgcacgtcccaatactgtccatatctggcggatctgctgtggtgttaacccctaaggaacccggcagtgcttttcttcagctgggagtttccctggaacaacagctgcaggtattattcaaagtcctcgaggaatatgattggtctgcctttgctgtaattaccagcctgcatcccggtcacgcactttttctggagggggtgcgcgccgtcgccgatgcttcccacgtgtcctggaggctgctagacgtggtgacactcgagctgggcccagggggaccccgggcgcgcacccagcggctgcttcgccagctggacgctccggtgttcgtcgcatattgtagccgtgaagaggccgaagtgctctttgcggaggcggcgcaagcagggttggtaggccccggacacgtttggcttgtaccaaacctggcattgggctctacggacgctcccccagccacattccccgtggggctgattagcgttgttacagaaagctggagactgtcgctccgtcagaaggtgagggacggagtggctatccttgctttgggggcccattcttattggcgtcagcacggaacactccctgcacctgctggtgattgccgagtgcaccctggtccagtctctccagctcgtgaggctttttatcgccatctgcttaatgtgacctgggaaggacgggacttttccttttcccctggaggctatctcgtccagcccaccatggtggttattgcgctgaacagacataggttgtgggagatggtcggaaggtgggaacatggcgttctgtacatgaagtacccagtatggccccgttacagcgctagccttcagcctgtcgtggatagcagacacctcaccgtagctacgttagaagaacgtccatttgtgatagtggagtcccccgatccaggaacaggcgggtgtgtccccaatacggtcccctgtcggcgccagtctaaccacacattttcatcaggagacgtggccccatatactaaactgtgttgcaaagggttctgcattgacatactaaagaagctggccagggtcgtcaagttcagctacgacctgtacctggttacaaacggtaaacacggcaagagagtaagaggcgtctggaatggaatgatcggtgaggtgtactataagagagccgacatggctattgggtcattaaccattaacgaagagagaagcgaaattgtggacttctccgtgcccttcgtggaaaccggaatttccgttatggttgcccgctcaaacggtacggtgtctccaagcgctttcctggagccctacagtccagccgtgtgggtcatgatgttcgtcatgtgtctcaccgttgttgcaataaccgtcttcatgttcgagtatttctctcctgtgtcatataatcagaacttaactagggggaagaagtcgggcgggcctgcttttaccataggcaaatctgtctggctgctttgggccttggtattcaacaactctgtacccatcgagaatcctcgcggaaccacgtcaaagattatggttctggtatgggcctttttcgcagtgatttttctggcctcctataccgcaaacctggcagctttcatgattcaggagcaatacatcgataccgtgtccggcttaagcgacaagaagttccagaggccacaggaccaatacccccctttccgctttggtacagtgcccaacggcagtacagagcggaacatcaggagcaattatagagatatgcacacccacatggtgaaattcaaccagaggagtgtggaggacgctctcaccagtctcaaaatgggaaaactcgacgccttcatttacgacgccgccgtactgaactacatggccggaaaagatgaggggtgtaagctggtaaccattggttctggtaaagtcttcgccactaccggctatgggatcgccatgcagaaggactcccactggaagagggccatagaccttgcattgctgcagtttttgggtgacggggagacgcaaaagctagaaaccgtgtggctgtcaggaatctgtcaaaatgagaagaacgaggtgatgagcagtaaactggacatcgataatatggccggagtgttctatatgttgttggtagcgatgggtcttgcactgctggtcttcgcatgggaacatctggtatactggaagcttaggcacagtgtgcctaatagttcccagctagattttctgttagccttcagtagggtgggcgctcatccgagccctcacagacctaagttttag

SEQ ID NO: 98688 - DNA, 2724 bp, Artificial Sequence
  derived and/or modified sequence
agaggtcagggcggagatacccgctccaaggggacccgccagcccgagccacctggtgcatcgcgagacccggctagaagttgttgggaccctccagttgacatggggggagcactgggacctgccttgctcctcacaagcttatttggagcttgggctgggttaggtcctggacagggggaacaaggcatgactgtcgcagtggtattttctagcagcggcccaccccaggcccagttcagagctcgcttaaccccccagtcttttctggacctgcccctcgaaatccaaccgttgactgtaggcgtgaacaccacaaacccctcctccctgctcacccagatttgtggactcttgggagctgcacacgtgcacggcatcgtgtttgaggacaacgtagacactgaggctgttgcccaaatactcgatttcatttcgtcccagactcacgtccccatcctgagcattagtggaggtagcgcagttgtgctcacaccgaaggaaccaggtagcgctttcttgcagctgggtgtctctctcgagcaacagctgcaggtgttgtttaaagtgctggaggaatacgattggtctgcatttgccgttattacctccttgcatccgggacatgccctgttcctggaaggtgtcagggctgtggcggacgcatctcatgtcagctggcggctgctggacgtcgtgactctcgagttgggccctggaggcccacgcgctcgtacccagcgtcttctgaggcagcttgatgccccagtgttcgtcgcctattgcagccgcgaggaagccgaggtgctgtttgcggaagctgcccaggcaggcttggtgggcccaggtcacgtgtggcttgtgccaaatttggcattgggatccaccgacgcccctcccgcaaccttccccgttggactgatttccgtcgtcactgagtcctggcggcttagtcttcgacaaaaagtgagagacggagttgcaatcttagcgttgggtgcccatagttactggcggcagcacggaacgctgccagccccagcaggcgactgcagagtccatccaggcccagtctctcccgcaagggaggcgttctacaggcatctgctcaacgtgacgtgggagggcagggacttttctttctcacccggaggatacctggtacagcctactatggtcgtgattgcactgaaccgccatcgtctgtgggaaatggtgggcagatgggaacatggagtcctatacatgaagtaccccgtgtggccccgatattcagcatctctccagcctgtcgtggattcccggcacctgaccgtagccacactcgaagaaaggcctttcgtgatagtggaatctcccgacccgggaacaggcggttgtgtaccgaacacagtaccatgccgtcgccagtctaatcacacattcagctcgggcgacgtggcaccctacaccaagttgtgttgcaagggattttgcatcgatattctgaagaaactggcacgggtggtgaagtttagctatgacttatacctagtcacaaatggcaagcacggtaagcgggtgcgcggtgtttggaacggaatgataggcgaggtgtactacaaacgagcagacatggccatcgggagtctcactattaatgaagagaggtcggagattgtcgatttctctgtgcctttcgtggagactgggatatctgtcatggttgctcgtagtaacggaaccgtttctccctcagcattcctggagccctactcccccgctgtgtgggttatgatgtttgtgatgtgcttgacagtggtggctataactgtgtttatgtttgaatacttttctcccgtatcatacaaccagaacctcactagaggaaaaaagagcggtgggcctgcctttactataggaaagtcagtgtggttgctctgggctttggtatttaataatagcgtgccgatcgagaacccaagaggcacgactagtaagattatggtgttagtgtgggctttctttgcagtgatattcctcgcaagctacacagctaatctcgccgcattcatgatccaagagcagtatattgatacagtgtccgggctatcagacaaaaagttccagcggcctcaagaccagtacccccctttccgttttggcaccgtccctaatggctcaaccgagaggaacattagaagtaactacagagatatgcacacgcacatggtaaagttcaatcagcgtagcgttgaggatgcactgacatcactcaaaatgggcaaactggacgcatttatatacgatgctgcggttctgaactacatggccggaaaggacgaaggttgtaaactcgttaccatcggaagcggcaaggtgttcgccacaacaggatatggcattgcgatgcagaaggactctcattggaaaagagctatcgacctggccctgcttcagtttctaggggacggcgagactcaaaaactggaaacggtctggctgagcggcatttgtcagaacgagaagaatgaggtgatgtcctctaaattggatattgacaacatggccggtgtgttctacatgttattggtggcgatgggcctcgctctgctggtgtttgcctgggaacacctggtctattggaaactgcgccatagtgtgcccaatagctcccaattagacttccttctggccttctcacgggtgggggcacatccctctccccaccggcctaagttctag

SEQ ID NO: 98689 - DNA, 2724 bp, Artificial Sequence
  derived and/or modified sequence
agaggccagggcggcgacaccagaagcaagggcaccagacagcccgagccccccggcgccagcagagaccccgccagaagctgctgggacccccccgtggacatgggcggcgccctgggccccgccctgctgctgaccagcctgttcggcgcctgggccggcctgggccccggccagggcgagcagggcatgaccgtggccgtggtgttcagcagcagcggccccccccaggcccagttcagagccagactgaccccccagagcttcctggacctgcccctggagatccagcccctgaccgtgggcgtgaacaccaccaaccccagcagcctgctgacccagatctgcggcctgctgggcgccgcccacgtgcacggcatcgtgttcgaggacaacgtggacaccgaggccgtggcccagatcctggacttcatcagcagccagacccacgtgcccatcctgagcatcagcggcggcagcgccgtggtgctgacccccaaggagcccggcagcgccttcctgcagctgggcgtgagcctggagcagcagctgcaggtgctgttcaaggtgctggaggagtacgactggagcgccttcgccgtgatcaccagcctgcaccccggccacgccctgttcctggagggcgtgagagccgtggccgacgccagccacgtgagctggagactgctggacgtggtgaccctggagctgggccccggcggccccagagccagaacccagagactgctgagacagctggacgcccccgtgttcgtggcctactgcagcagagaggaggccgaggtgctgttcgccgaggccgcccaggccggcctggtgggccccggccacgtgtggctggtgcccaacctggccctgggcagcaccgacgccccccccgccaccttccccgtgggcctgatcagcgtggtgaccgagagctggagactgagcctgagacagaaggtgagagacggcgtggccatcctggccctgggcgcccacagctactggagacagcacggcaccctgcccgcccccgccggcgactgcagagtgcaccccggccccgtgagccccgccagagaggccttctacagacacctgctgaacgtgacctgggagggcagagacttcagcttcagccccggcggctacctggtgcagcccaccatggtggtgatcgccctgaacagacacagactgtgggagatggtgggcagatgggagcacggcgtgctgtacatgaagtaccccgtgtggcccagatacagcgccagcctgcagcccgtggtggacagcagacacctgaccgtggccaccctggaggagagacccttcgtgatcgtggagagccccgaccccggcaccggcggctgcgtgcccaacaccgtgccctgcagaagacagagcaaccacaccttcagcagcggcgacgtggccccctacaccaagctgtgctgcaagggcttctgcatcgacatcctgaagaagctggccagagtggtgaagttcagctacgacctgtacctggtgaccaacggcaagcacggcaagagagtgagaggcgtgtggaacggcatgatcggcgaggtgtactacaagagagccgacatggccatcggcagcctgaccatcaacgaggagagaagcgagatcgtggacttcagcgtgcccttcgtggagaccggcatcagcgtgatggtggccagaagcaacggcaccgtgagccccagcgccttcctggagccctacagccccgccgtgtgggtgatgatgttcgtgatgtgcctgaccgtggtggccatcaccgtgttcatgttcgagtacttcagccccgtgagctacaaccagaacctgaccagaggcaagaagagcggcggccccgccttcaccatcggcaagagcgtgtggctgctgtgggccctggtgttcaacaacagcgtgcccatcgagaaccccagaggcaccaccagcaagatcatggtgctggtgtgggccttcttcgccgtgatcttcctggccagctacaccgccaacctggccgccttcatgatccaggagcagtacatcgacaccgtgagcggcctgagcgacaagaagttccagagaccccaggaccagtacccccccttcagattcggcaccgtgcccaacggcagcaccgagagaaacatcagaagcaactacagagacatgcacacccacatggtgaagttcaaccagagaagcgtggaggacgccctgaccagcctgaagatgggcaagctggacgccttcatctacgacgccgccgtgctgaactacatggccggcaaggacgagggctgcaagctggtgaccatcggcagcggcaaggtgttcgccaccaccggctacggcatcgccatgcagaaggacagccactggaagagagccatcgacctggccctgctgcagttcctgggcgacggcgagacccagaagctggagaccgtgtggctgagcggcatctgccagaacgagaagaacgaggtgatgagcagcaagctggacatcgacaacatggccggcgtgttctacatgctgctggtggccatgggcctggccctgctggtgttcgcctgggagcacctggtgtactggaagctgagacacagcgtgcccaacagcagccagctggacttcctgctggccttcagcagagtgggcgcccaccccagcccccacagacccaagttctag

SEQ ID NO: 98690 - protein, 178 aa, Artificial Sequence [sequence omitted]

SEQ ID NO: 98691 - protein, 167 aa, Artificial Sequence
  derived and/or modified sequence
MPAYHSSLMDPDTKLIGNMALLPIRSQFKGPAPRETKDTDIVDEAIYYFKANVFFKNYEIKNEADRTLIYITLYISECLKKLQKCNSKSQGEKEMYTLGITNFPIPGEPGFPLNAIYAKPANKQEDEVMRAYLQQLRQETGLRLCEKVIKGDLKFSAALKLALNKNK

SEQ ID NO: 98692 - DNA, 504 bp, Artificial Sequence
  derived and/or modified sequence
atgcccgcctaccacagcagcctgatggaccccgacaccaagctgatcggcaacatggccctgctgcccatcagaagccagttcaagggccccgcccccagagagaccaaggacaccgacatcgtggacgaggccatctactacttcaaggccaacgtgttcttcaagaactacgagatcaagaacgaggccgacagaaccctgatctacatcaccctgtacatcagcgagtgcctgaagaagctgcagaagtgcaacagcaagagccagggcgagaaggagatgtacaccctgggcatcaccaacttccccatccccggcgagcccggcttccccctgaacgccatctacgccaagcccgccaacaagcaggaggacgaggtgatgagagcctacctgcagcagctgagacaggagaccggcctgagactgtgcgagaaggtgatcaagggcgacctgaagttcagcgccgccctgaagctggccctgaacaagaacaagtag

SEQ ID NO: 98693 - DNA, 504 bp, Artificial Sequence
  derived and/or modified sequence
atgccggcctatcactcgtccttgatggatccagacaccaaactcatcggcaatatggcactgctgcccatacggtctcagttcaagggtcctgcaccgagagagacgaaggataccgatatagtagatgaggcgatctactacttcaaggctaatgtgttcttcaagaactatgaaattaaaaacgaggccgaccgcacactcatctatatcacattatatatttcagaatgtctgaagaagcttcagaagtgtaatagtaagtctcagggtgaaaaagagatgtatacactggggatcacgaactttcccattcccggggaacctggcttccctctgaatgccatttacgccaagccggccaacaagcaggaggacgaggtcatgagagcatacctgcagcagctccgacaggagaccgggctgcggctgtgtgaaaaggtcattaagggagacttgaagttttccgccgcccttaaactcgcactgaacaagaataagtag

SEQ ID NO: 98694 - DNA, 504 bp, Artificial Sequence
  derived and/or modified sequence
atgcctgcctaccacagcagcctgatggaccctgacaccaagctgattggcaacatggccctgctgcccatccgcagccagttcaagggccctgccccccgggagaccaaggacacagacatcgtggatgaggccatctactacttcaaggccaacgtgttcttcaagaactatgagatcaagaatgaggccgacaggaccctcatctacatcaccctgtacatcagtgaatgtctgaagaagctgcagaagtgcaacagcaagagccagggcgagaaggagatgtacaccctgggcatcaccaacttccccatccctggagagcccggcttccccctgaatgccatctatgccaagccagccaacaagcaggaggatgaggtgatgagggcctacctgcagcagctgcggcaggagaccggcctgcggctgtgtgagaaggtgatcaagggggacctgaagttctctgctgccctgaagctggccctgaacaagaacaagtag

SEQ ID NO: 98695 - DNA, 615 bp, Artificial Sequence
  derived and/or modified sequence
acctcgcccaggctgccagaccggaagcgctccgctgtacctggatcctgctcctctgggttgaaacccgggcgccgccaagatgccggcttaccactcttctctcatggatcctgataccaaactcatcggaaacatggcactgttgcctatcagaagtcaattcaaaggacctgcccccagagagacaaaagatacagatattgtggatgaagccatctattacttcaaggccaatgtcttcttcaaaaactatgaaattaagaatgaagctgataggaccttgatatatataactctctacatttctgaatgtctgaagaaactgcaaaagtgcaattccaaaagccaaggtgagaaagaaatgtatacgctgggaatcactaattttcccattcctggagagcctggttttccacttaacgcaatttatgccaaacctgcaaacaaacaggaagatgaagtgatgagagcctatttacaacagctaaggcaagagactggactgagactttgtgagaaagttatcaagggtgatttgaaattttctgcagcattaaagctggcgcttaataagaataagtaataataaagaaatttctaacattccatgtc

SEQ ID NO: 98696 - DNA, 1014 bp, Artificial Sequence
  derived and/or modified sequence
agaagcggaactgcaaggccggaagctccacgtccgcacccgccccttccgtttcgcttccgcctacctcgcccaggctgccagaccggaagcgctccgctgtacctggatcctgctcctctgggttgaaacccgggcgccgccaagatgccggcttaccactcttctctcatggatcctgataccaaactcatcggaaacatggcactgttgcctatcagaagtcaattcaaaggacctgcccccagagagacaaaagatacagatattgtggatgaagccatctattacttcaaggccaatgtcttcttcaaaaactatgaaattaagaatgaagctgataggaccttgatatatataactctctacatttctgaatgtctgaagaaactgcaaaagtgcaattccaaaagccaaggtgagaaagaaatgtatacgctgggaatcactaattttcccattcctggagagcctggttttccacttaacgcaatttatgccaaacctgcaaacaaacaggaagatgaagtgatgagagcctatttacaacagctaaggcaagagactggactgagactttgtgagaaagttttcgaccctcagaatgataaacccagcaagtggtggacttgctttgtgaagagacagttcatgaacaagagtctttcaggacctggacagtgaagggagcccgggcagccaccgtctccagagccctgggcagcattttccagcaagatgtacacaatcttttgcctttatttcgtaaagttttatacagaagagagaagagcatgtctttacttgaaaaactcttgatcaagaatttgggtgggagaaaagaaagtgggttatcaagggtgatttgaaattttctgcagcattaaagctggcgcttaataagaataagtaataataaagaaatttctaacattccatgtcagaaaaactttattgccagtctttgacattcacttacaatttgttttgagataaaattcacattccataatg

SEQ ID NO: 98697 - DNA, 504 bp, Artificial Sequence
  derived and/or modified sequence
atgcccgcctaccacagcagcctgatggaccccgacaccaagctgataggcaacatggccctgttgcccatacgttcccagtttaaaggtcccgcaccacgtgagaccaaggataccgatattgtggatgaagctatctattacttcaaggcaaacgttttcttcaagaattacgagataaaaaatgaggctgacaggacactcatctacattactctgtacatctcagagtgtctgaagaagctccagaaatgtaatagtaagtcacagggagaaaaggagatgtataccttgggcatcactaacttccccattccgggagaacccggatttccgctgaacgccatttatgcaaagccagcgaataagcaggaggacgaggtgatgagggcatatctacagcagctccggcaggagaccggtttgagattatgcgaaaaggtaatcaagggcgacctgaagttcagcgcagccctcaaactggctctcaacaagaacaagtag

SEQ ID NO: 98698 - DNA, 504 bp, Artificial Sequence
  derived and/or modified sequence
atgccagcttatcactcgagcctgatggaccccgatacgaaacttattggcaatatggcccttcttcctatccgatcccagttcaaaggaccagcgcctcgtgagacaaaggatacagatatcgtggatgaggctatttactactttaaggccaatgtattttttaaaaactatgagatcaagaacgaggcagaccgtaccctcatatacattactctttacatctccgaatgccttaaaaaacttcagaagtgtaactccaagagtcagggcgagaaagagatgtacaccttaggaataacaaacttcccaatccccggagagcctggttttcccctaaatgctatctatgctaagcctgccaataaacaggaagacgaggtcatgcgtgcctatcttcagcagcttcgtcaggagactggtctgagattgtgtgagaaggtgatcaaaggagacctcaagttctcagccgcactcaagctagccctcaataagaacaagtag

SEQ ID NO: 98699 - DNA, 537 bp, Artificial Sequence
  derived and/or modified sequence
atgcccgcctaccacagcagcctgatggaccccgacaccaagctgatcggcaacatggccctgctgcccatcagaagccagttcaagggccccgcccccagagagaccaaggacaccgacatcgtggacgaggccatctactacttcaaggccaacgtgttcttcaagaactacgagatcaagaacgaggccgacagaaccctgatctacatcaccctgtacatcagcgagtgcctgaagaagctgcagaagtgcaacagcaagagccagggcgagaaggagatgtacaccctgggcatcaccaacttccccatccccggcgagcccggcttccccctgaacgccatctacgccaagcccgccaacaagcaggaggacgaggtgatgagagcctacctgcagcagctgagacaggagaccggcctgagactgtgcgagaaggtgttcgacccccagaacgacaagcccagcaagtggtggacctgcttcgtgaagagacagttcatgaacaagagcctgagcggccccggccagtag

SEQ ID NO: 98700 - DNA, 537 bp, Artificial Sequence
  derived and/or modified sequence
atgccagcataccactcttctttgatggatcctgatacaaagctaataggtaacatggctctactacctatcagatcacagttcaaaggacccgccccccgggaaacaaaagacaccgacatcgtcgatgaagctatatactacttcaaagctaacgttttttttaagaattatgagataaaaaacgaggctgatagaaccctcatttatataaccctctatatctccgaatgtctgaaaaaactgcaaaaatgcaactccaaatcccagggcgaaaaggaaatgtatacattagggatcaccaatttccctatcccaggcgaaccgggatttccattgaacgctatttatgccaagccagccaacaagcaggaagacgaagtcatgcgcgcatacctgcaacagctgcgccaggaaaccggcttaaggctgtgcgaaaaggtgttcgatccacaaaacgacaagccctctaaatggtggacctgcttcgtaaagagacagttcatgaataaatctctgtctggacccggacagtag

SEQ ID NO: 98701 - DNA, 537 bp, Artificial Sequence
  derived and/or modified sequence
atgcctgcctaccacagcagcctgatggaccctgacaccaagctgattggcaacatggccctgctgcccatccgcagccagttcaagggccctgccccccgggagaccaaggacacagacatcgtggatgaggccatctactacttcaaggccaacgtgttcttcaagaactatgagatcaagaatgaggccgacaggaccctcatctacatcaccctgtacatcagtgaatgtctgaagaagctgcagaagtgcaacagcaagagccagggcgagaaggagatgtacaccctgggcatcaccaacttccccatccctggagagcccggcttccccctgaatgccatctatgccaagccagccaacaagcaggaggatgaggtgatgagggcctacctgcagcagctgcggcaggagaccggcctgcggctgtgtgagaaggtgtttgacccccagaatgacaagcccagcaagtggtggacctgctttgtgaagaggcagttcatgaacaagagcctgagcggccctggccagtag

SEQ ID NO: 98702 - DNA, 537 bp, Artificial Sequence
  derived and/or modified sequence
atgcccgcctaccacagcagcctgatggaccccgacaccaagctgattggtaacatggccctcctccccatacggagccagtttaagggccccgctccaagggagaccaaggacactgatatcgtcgacgaggctatctattatttcaaggctaatgtgttttttaagaactatgaaataaaaaatgaggctgatagaaccctcatctacatcaccctgtacattagcgagtgcctaaagaaactccagaagtgcaactccaagagtcagggtgagaaggagatgtacacgctcggaatcaccaatttccccatcccgggcgagcccgggttcccattgaatgctatttacgccaagccagctaacaaacaggaagacgaggtcatgcgggcttatcttcagcaactgcgccaggaaacgggtcttcgcctgtgtgaaaaggttttcgaccctcaaaatgacaagccaagcaagtggtggacgtgcttcgtaaagcgccagtttatgaataagagcctgagcggccctggtcagtag

SEQ ID NO: 98703 - DNA, 537 bp, Artificial Sequence
  derived and/or modified sequence
atgcccgcataccattccagcctcatggatcccgacacaaaattaattgggaatatggctctgctgccgataaggagtcagttcaagggccctgcgcctcgagagactaaagacactgatattgtcgatgaggctatttactattttaaagccaatgttttctttaaaaactacgaaatcaagaatgaggctgataggactctgatttatattacactatatatctccgagtgtctcaagaagctgcagaagtgtaattcaaaaagccagggtgagaaggaaatgtatactttggggataactaacttccccatacccggtgagcccggattccccctgaacgccatttacgcgaagccagccaacaaacaggaagatgaagtgatgcgggcatatctgcagcagttgcggcaagagactggattgcgtctctgcgagaaagtgtttgatccccagaatgacaagccgagcaaatggtggacttgcttcgtcaaacgacagtttatgaacaaatccttaagcggtcctggtcagtag

SEQ ID NO: 98704 - protein, 440 aa, Artificial Sequence
  derived and/or modified sequence
MKLALLLPWACCCLCGSALATGFLYPFSAAALQQHGYPEPGAGSPGSGYASRRHWCHHTVTRTVSCQVQNGSETVVQRVYQSCRWPGPCANLVSYRTLIRPTYRVSYRTVTVLEWRCCPGFTGSNCDEECMNCTRLSDMSERLTTLEAKVLLLEAAERPSSPDNDLPAPESTPPTWNEDFLPDAIPLAHPVPRQRRPTGPAGPPGQTGPPGPAGPPGSKGDRGQTGEKGPAGPPGLLGPPGPRGLPGEMGRPGPPGPPGPAGNPGPSPNSPQGALYSLQPPTDKDNGDSRLASAIVDTVLAGVPGPRGPPGPPGPPGPRGPPGPPGTPGSQGLAGERGTVGPSGEPGVKGEEGEKAATAEGEGVQQLREALKILAERVLILEHMIGIHDPLASPEGSGQDAALRANLKMKRGGAQPDGVLAALLGPDPGQKSVDQASSRK

SEQ ID NO: 98705 - DNA, 1323 bp, Artificial Sequence
  derived and/or modified sequence
atgaaactggccctcctgttgccctgggcctgttgctgtctgtgtggatccgccctcgccaccggctttctatatccattctccgccgctgcgctgcagcaacacggatatcccgagccaggagcgggttcgcctgggtcaggctacgcatctcgacgtcactggtgccatcataccgtaacacgcactgtatcgtgccaagtgcagaacggctccgaaaccgtcgtacagcgagtctatcagtcttgcagatggcccggaccttgcgctaacttagtgtcatatcggactctgattaggccaacttacagggtgtcttaccggactgtgacagttcttgagtggcgttgttgccccggatttacgggatcaaattgtgacgaggaatgtatgaactgcacacgcctgtctgacatgtctgagaggcttaccacactcgaggctaaggtgctactcttagaagccgcagagcgaccaagctcgcccgataacgacttaccagctcctgaaagtacccctcctacttggaatgaggattttctccctgatgccattccacttgcccatcctgtgcctcggcagcgaagacccaccggacccgctggtccccctggccagaccgggcctcctggaccagccggtcctccgggaagcaagggagataggggccagactggggagaaaggtccagccggtccaccaggactcctgggtcctcccggacctcgtggccttccaggcgagatggggcgacctggtcctcctgggcctcccggtccagcagggaatccaggaccttccccaaattcaccccagggcgctctgtattccctgcagcctccgacggataaggataacggtgacagtagacttgccagtgccatagttgacaccgtactggccggtgtgcccggtccgagaggacccccaggaccccctggcccacctgggcctagggggcctcccggacctccgggaacacccggttctcagggacttgccggtgagcgaggaaccgtggggccaagcggggagcctggtgtgaagggcgaggaaggagagaaggctgccaccgccgagggtgagggagtccaacagctaagagaggctttgaagatcctagctgagcgcgtactgatcctggaacacatgattggaattcacgatcctctggcctcccccgagggaagcggccaggatgcagcgttgcgagctaacctgaagatgaagagagggggtgcacagcccgacggcgttctggccgctctgttaggacccgatcccggtcaaaagagtgtcgaccaggccagtagcagaaaatag

SEQ ID NO: 98706 - DNA, 1323 bp, Artificial Sequence
  derived and/or modified sequence
atgaaactcgctcttctgctcccttgggcgtgctgttgcctctgtggatctgccctggcaaccggatttctctacccgttctccgcagccgccctccagcagcatggatatcctgaaccaggagccggttctccaggttcaggttatgctagccgccgccattggtgtcaccacacagtgaccaggaccgtgagctgccaagtccagaatggttccgagacagtggtccagagggtatatcaatcttgtcgatggcctggcccctgtgcaaatctggtcagctatcgcaccctcattcgaccaacctacagggtgtcgtaccgcaccgtgacggtgctcgagtggcgctgttgtcctggctttaccggctcaaattgcgatgaagagtgtatgaactgcacccgattgagtgatatgtcagaacggctgaccactttggaggcaaaggtgttactcctcgaagctgccgagagaccatccagccctgacaatgatctgcccgcaccagagtccactccgcccacatggaacgaagactttctaccagacgctatcccacttgcccaccccgtcccaagacagcggcggcccaccggccctgcgggtccgcccggccagacaggacctcccggccccgccggacctcccggatccaagggcgataggggacaaaccggggaaaaaggccccgcaggtccacccgggctgctgggcccaccaggcccccgaggattacctggcgaaatgggacgtccaggcccccccggtccgcctggccctgctggaaatccaggcccctccccaaacagcccgcaaggtgctctctacagcctccagcccccaaccgacaaagacaatggcgattcccgattggcctccgccatcgtggatactgtcctggcaggcgtgccaggcccccgtggaccacctggcccgcctggtcctcccggcccaagaggtcctcctggcccccccgggactccagggtcccagggactggctggagagagaggaacagtcgggcccagcggagagccaggcgtgaagggcgaggagggagaaaaggctgcaacagccgagggcgaaggcgtgcaacagctgcgcgaggcgctcaaaattctcgcggaacgcgtgctaatcctggagcacatgattggcatccacgatcctctggcctcacccgaagggagcggacaagatgccgcactgcgcgctaatctcaagatgaaacggggaggcgcacaacccgatggagtgctggccgcgttactcggccctgatcccgggcaaaaaagtgtggaccaggcatcatcccggaagtag

SEQ ID NO: 98707 - DNA, 1323 bp, Artificial Sequence
  derived and/or modified sequence
atgaaacttgcactcctcctaccttgggcttgctgctgtctttgtgggtctgcattagctacaggattcctctatcccttttctgccgccgccctgcagcagcatggctatcccgaaccgggcgccgggagccccggctctggctatgcaagcagacgtcactggtgccaccacaccgtaaccagaacggtgagttgtcaggtccaaaacggctccgaaacagtagtccaacgcgtgtatcagagctgccgatggcccggaccgtgtgctaacttggtgtcttacagaacccttatccgacccacttaccgagtgtcttaccgcaccgtaacagttcttgaatggcgttgctgccccggattcacagggtctaattgtgatgaggaatgtatgaactgcaccaggctgtctgacatgtcagagcgactaacgaccttggaggctaaggtgctcttactcgaagcagccgaacgtccctctagcccagataatgacttaccggcaccagaatcgactccccctacttggaacgaggacttccttccagacgccatcccactggcacaccctgtcccacgccagaggagaccaacaggcccagctggacctccggggcagacaggtcctcccggacccgccgggccgcctggatcaaagggcgatcgcggtcagactggagagaaaggacccgccgggccccctggactgctgggaccccctggaccccgcgggctcccaggagagatgggtcggcctggtcccccaggaccgccgggacccgccgggaatcccggacctagtcctaattcaccacaaggggccctctacagcctgcaaccccctacagacaaagataacggtgacagtagactcgcatccgccatcgttgacaccgtacttgctggcgtaccaggaccaagaggacctccaggaccacccggcccccccggcccacgcggtccaccgggcccacccggcacacctggttcgcagggtttagctggtgaaagaggaactgtggggccctccggcgagcctggtgtcaaaggcgaggaaggggagaaagcagctactgctgaaggggagggggttcaacagctgcgcgaagcactcaaaatcttagccgaaagggtgcttatcctcgaacacatgattggaatccacgaccctttggctagccccgagggctccggtcaagacgcggctttacgggcaaacctaaaaatgaaacgcgggggggcgcagccagacggggtcctcgccgctttgctcggcccagatcccggccagaaaagcgttgaccaggcttctagtagaaagtag

SEQ ID NO: 98708 - DNA, 1323 bp, Artificial Sequence
  derived and/or modified sequence
atgaagctggccctgctgctgccctgggcctgctgctgcctgtgcggcagcgccctggccaccggcttcctgtaccccttcagcgccgccgccctgcagcagcacggctaccccgagcccggcgccggcagccccggcagcggctacgccagcagaagacactggtgccaccacaccgtgaccagaaccgtgagctgccaggtgcagaacggcagcgagaccgtggtgcagagagtgtaccagagctgcagatggcccggcccctgcgccaacctggtgagctacagaaccctgatcagacccacctacagagtgagctacagaaccgtgaccgtgctggagtggagatgctgccccggcttcaccggcagcaactgcgacgaggagtgcatgaactgcaccagactgagcgacatgagcgagagactgaccaccctggaggccaaggtgctgctgctggaggccgccgagagacccagcagccccgacaacgacctgcccgcccccgagagcaccccccccacctggaacgaggacttcctgcccgacgccatccccctggcccaccccgtgcccagacagagaagacccaccggccccgccggcccccccggccagaccggcccccccggccccgccggcccccccggcagcaagggcgacagaggccagaccggcgagaagggccccgccggcccccccggcctgctgggcccccccggccccagaggcctgcccggcgagatgggcagacccggcccccccggcccccccggccccgccggcaaccccggccccagccccaacagcccccagggcgccctgtacagcctgcagccccccaccgacaaggacaacggcgacagcagactggccagcgccatcgtggacaccgtgctggccggcgtgcccggccccagaggcccccccggcccccccggcccccccggccccagaggcccccccggcccccccggcacccccggcagccagggcctggccggcgagagaggcaccgtgggccccagcggcgagcccggcgtgaagggcgaggagggcgagaaggccgccaccgccgagggcgagggcgtgcagcagctgagagaggccctgaagatcctggccgagagagtgctgatcctggagcacatgatcggcatccacgaccccctggccagccccgagggcagcggccaggacgccgccctgagagccaacctgaagatgaagagaggcggcgcccagcccgacggcgtgctggccgccctgctgggccccgaccccggccagaagagcgtggaccaggccagcagcagaaagtag

SEQ ID NO: 98709 - DNA, 3007 bp, Artificial Sequence
  derived and/or modified sequence
gaatttgaaaaggcggccccggagaggcgtgggcgccccccacacatttccagctcgcacccgggctccgaccgctcgccccgctcctctcgctgtgctcccggccggtgccgcgggttcggtccgggcgccggtgcgctcctgccggtcctcgtgcccgggactccgggtccccgcgggctgctgcgcacgatgaagctggccctgctcctgccctgggcgtgttgctgcctctgcgggtcggcgctggccaccggcttcctctatcccttctcggccgcagctctgcagcagcacggctaccccgagcccggcgccggctcccctggcagcggctacgcgagccgccggcactggtgccatcacacagtgacacggacggtgtcctgccaggtgcagaatggctcggagacggtggtccagcgcgtgtaccagagctgccggtggccggggccctgcgccaacctcgtaagttacaggactctgatcagacccacctacagagtgtcctaccgcacggtgacggtgctggagtggagatgctgccctggcttcaccgggagcaactgtgatgaggaatgcatgaactgcacccggctcagtgacatgagtgagcgactgaccacactggaggccaaggtcctcctgctagaagcagcagaacggccctccagcccggacaacgacctgccagcccccgagagcactccgccgacctggaatgaggacttcctccccgacgccatccctcttgctcaccctgtgccacgacagagaaggcccacgggcccagccgggcccccggggcagacaggaccaccagggcctgcaggcccccccgggtctaaaggtgaccgaggccagacaggagagaagggtccagcggggccgcctgggctcctggggcctccagggccccgtgggcttcctggagagatggggcgccccggccccccaggaccacccggcccagcaggcaacccaggcccctcaccaaacagcccccagggcgccctctactccctgcagccgcctacagacaaagacaatggagactcaaggctggcctctgccatcgtggacacagtgctggcaggtgtcccaggaccccggggtccccctggtccaccaggtccccctgggcctcgaggtcccccaggacccccaggaacacctggatcccagggcctggctggagagcgaggcacagtggggccgtccggtgaacctggcgtgaagggggaagaaggagagaaagccgccactgcagagggcgagggggtgcagcagctgagagaggccctgaagatcctggcagagcgagtcctcatcctggagcacatgattgggatccacgatcccctggcctccccagagggttctggccaggatgctgccctgagagccaacctcaagatgaagaggggtggcgcccaacccgatggggtccttgctgccctgcttgggcccgaccctggacagaagagcgtggaccaggccagcagcaggaagtgagagcccactgctccaggacaccctatcctggctagagacccagccccagaggcctgagccgccgctgtttcctaaagatgcccccaggggaactgggctccaggcatggatgattgtgaggacatggggggctttggggacagataatgtctccaggggcagggtctggaggggccaacaccctcatcagagccctcctctggcctgtcccctcccctacccccactcccggctggagacggggtctgggtgggctgggtgctgggaatgagaataatcctaatacccatcatttattgagtccctgctgtaactggccctgtccagggaactttcgttacgttgtctcattatttaacccttaggaggtaagcttattatccccacttcacaaggggaccgaggctcagacggtagaaataaccctctcttggccaccagatcacgggtggcaggggcaggatttgaacccaggaccctcagttcctgaagccatgttctctcgaccctgccagcttcccctcttcgagagaaaactcagacagggagggcgcagggccagaacggctccttaaggcaggcagggctgcggggaggctgggccagccagcctgagggggtaggcagggtcctgcagggcctggggcttcccttcctcatcccccttccccactggctgggggagcagcctggactgcagctctcagaggccagggagaccctgaataaatcactgccagccatacggacttgaggaccttgagagagaagcattgggggtgcaagtgtccaccaaaccagataggcatccctggccactgcctcccagtcttgctgagcccacccgctctctctgggtccatcccatccctgagccaggggaggcagcatttcatgggcatgtctatcagaggtgggacttgcagcctctgccccacgagtttgtctctcagtggactctataggtttgctacttttgcatgacacagcaagcccagtgtcccctttgcaagctgcagagagggaaacagagtcccaggcctgctgggaagagatgctcctgcctcccaccttccagagttgggggcctggcaggctccatggcaggcaccaggtccctagcagcccagaacagctctgactggagccctcaaggcctctggggccagggtctccgtgatcagctcagccctggtgttcctctcttgctgggctgggacctgggacacagccacggcagcaaactcagagaattgaaggtgctggcgccaccctggggcactctgtcttcacagcaggagtgactgtctccagtgctcttggtactcctgtttggctgtggcctggtccctctgggccctgggatcttcttctggcccttgaggcaggtctggagaggcagtctctgtcttcatggaggggtggtcagaggcgggcgggaccaccagcctgtagcgttattattatatgtgacaataaaggtgctctcccc

SEQ ID NO: 98710 - DNA, 1323 bp, Artificial Sequence
  derived and/or modified sequence
atgaaactcgccttgctgctgccatgggcctgctgttgtctctgtgggagcgccttggccactgggttcctgtaccccttttctgccgctgccctgcagcagcacgggtaccccgaacctggagctggatcaccggggtctggttatgctagtagacgacactggtgccatcacactgtcactagaactgtgtcttgtcaggttcagaatgggtccgagaccgtagtgcagcgcgtgtatcagagctgccggtggccgggaccctgcgccaatcttgtgtcttaccggaccctgattagacctacatacagggttagttatcgcaccgtcactgtcctcgaatggcggtgctgccctggatttactgggagcaattgtgacgaggagtgcatgaactgtacacgactgtcagacatgagtgagcggctgaccaccctggaagctaaggtccttctgcttgaggccgcagagcgcccctcctctcccgacaatgacttacctgctccagaatctacgccaccaacgtggaacgaagatttcctgccagatgcaattcccctagctcatcccgtgccacgtcagcgcagaccaacaggaccggccgggccccccgggcagaccggacctccagggccagctggacccccaggatccaagggagaccgaggccagacaggggagaagggcccagcgggccctcctggtctgctgggaccacccgggccgcggggcctgccaggggaaatgggccgcccaggtccccccggaccgcctgggcctgccgggaatcctggccccagccccaacagccctcagggggcactctactccctacaaccacctactgataaggataacggggatagtaggcttgcctctgccattgtggacaccgtcctggctggggttcccggcccccgaggaccacctggccctccagggccgcctggtccccgcggcccgcctggtccacccggcacccctgggtcccagggcctcgctggcgagcgcggtaccgtcggccctagcggcgagcccggggtaaagggggaagaaggggagaaggccgcaacagccgagggcgaaggggtgcagcagctgagagaggcactaaagatcctggcagagcgagttttgattctggaacacatgatcgggatacatgatcccttggcttctcctgaaggctccggccaggacgcagccctcagagctaacctcaagatgaagcggggcggcgctcagccagacggcgtactggccgccctactgggaccagatcccgggcaaaaaagtgtggaccaggccagttccagaaagtag

SEQ ID NO: 98711 - DNA, 1323 bp, Artificial Sequence
  derived and/or modified sequence
atgaagctggccctgctgctgccctgggcctgctgctgcctgtgtggcagcgccctggccaccggcttcctgtaccccttctctgctgctgccctgcagcagcacggctacccagagcccggggccggcagccctggcagcggctacgccagccgccgccactggtgccaccacacagtgaccaggacagtgtcctgccaggtgcagaatggcagcgagaccgtggtgcagagggtgtaccagagctgccgctggccaggcccctgtgccaacctggtgtcctaccgcaccctcatccggcccacctacagagtgtcctacagaacagtgacagtgctggagtggcgctgctgccccggcttcaccggcagcaactgtgatgaggagtgcatgaactgcacccggctgagtgacatgtctgagcggctgaccaccctggaggccaaggtgctgctgctggaggccgctgagcggcccagcagcccagacaatgacctgcctgcccctgagagcaccccacccacctggaatgaagacttcctgcctgatgccatccccctggcccaccctgtgccccggcagaggcggcccaccggccctgctggccccccaggccagacaggccccccaggccctgctggccccccaggcagcaaaggagaccggggccagacaggagagaagggccctgctggccccccaggcctgctgggccccccaggcccccggggcctgcccggggagatgggccggcccggccccccaggccccccaggccctgctggcaaccctggccccagccccaacagcccccagggcgccctgtacagcctgcagcccccaacagacaaggacaacggggacagccggctggccagcgccatcgtggacacagtgctggccggcgtgcccggcccccggggccccccaggccccccaggccccccaggcccccggggccccccaggccccccaggcaccccaggcagccagggcctggccggggagcggggcaccgtgggccccagcggggagcccggggtgaagggggaggagggggagaaggccgccacagctgagggggagggcgtgcagcagctgcgggaggccctgaagatcctggccgagcgggtgctgatcctggagcacatgattggcatccatgaccccctggccagccctgagggcagcggccaggatgctgccctgcgggccaacctgaagatgaagaggggcggggcccagccagatggagtgctggccgccctgctgggccctgaccccggccagaagtctgtggaccaggccagcagcaggaagtag

SEQ ID NO: 98712 - DNA, 1323 bp, Artificial Sequence
  derived and/or modified sequence
atgaagctggccctgctgctgccctgggcctgctgctgcctgtgcggttctgcattggccaccggcttcctttacccgtttagtgcagcggcactccaacaacacgggtaccctgaaccgggcgctggctcacctggatcaggatacgcatccagaaggcattggtgccaccataccgtcacgagaacagtgtcctgtcaggttcaaaatggttcagagaccgttgtgcagcgggtatatcagtcatgtcgttggccaggcccttgcgccaacctggtatcttatcgtactctcatacggcccacgtaccgtgtgtcatatcggacagttacagttctggagtggaggtgttgtcccgggttcacaggctcgaactgtgacgaggaatgcatgaattgtacccgccttagtgacatgagtgaacggctcaccactttggaagcgaaggtgctgcttctcgaggctgccgaacggccatcctctcccgataatgatcttccggctccagagtcaacaccaccaacgtggaatgaggacttcctccctgacgcgatccccctcgcccatcccgtacctaggcaacggaggccaactggccccgcaggaccacctgggcagaccggcccccctggtcccgctggcccccctggaagtaaaggcgatcgtggccagaccggcgaaaaaggccctgctggtccacctggcctgcttggccccccaggaccacgtggtttgcccggggagatgggtcgtcctggcccgcccggacctcccggcccagccggcaatcctggcccttcccctaatagccctcagggcgctctgtacagcctgcagcccccaaccgacaaagataacggggattcccggttagcctccgctattgtagacacagtgttggccggagttccaggccccaggggtcctcctgggccacccggccctccaggtccacgcgggcctcctggccctcccggcacaccaggatcccaggggctggccggtgaacgcggtaccgtggggccatcaggggagcctggcgtgaaaggggaggaaggggaaaaagcagccactgctgagggagaaggggtgcaacaactccgcgaagccctcaaaatcctagccgagagagtcctgatcttggaacacatgataggcattcatgatcccctagccagtcccgagggctcaggccaggatgccgctctgcgcgcaaacctgaaaatgaagcgcggcggcgcccagcctgatggcgtactcgccgcgctgttggggcccgaccctggccagaaatcagtggatcaagctagctcccgcaaatag

SEQ ID NO: 98713 - RNA, 1323 nt, Artificial Sequence
  derived and/or modified sequence
augaaacucgcucuucugcucccuugggcgugcuguugccucuguggaucugcccuggcaaccggauuucucuacccguucuccgcagccgcccuccagcagcauggauauccugaaccaggagccgguucuccagguucagguuaugcuagccgccgccauuggugucaccacacagugaccaggaccgugagcugccaaguccagaaugguuccgagacagugguccagaggguauaucaaucuugucgauggccuggccccugugcaaaucuggucagcuaucgcacccucauucgaccaaccuacagggugucguaccgcaccgugacggugcucgaguggcgcuguuguccuggcuuuaccggcucaaauugcgaugaagaguguaugaacugcacccgauugagugauaugucagaacggcugaccacuuuggaggcaaagguguuacuccucgaagcugccgagagaccauccagcccugacaaugaucugcccgcaccagaguccacuccgcccacauggaacgaagacuuucuaccagacgcuaucccacuugcccaccccgucccaagacagcggcggcccaccggcccugcggguccgcccggccagacaggaccucccggccccgccggaccucccggauccaagggcgauaggggacaaaccggggaaaaaggccccgcagguccacccgggcugcugggcccaccaggcccccgaggauuaccuggcgaaaugggacguccaggcccccccgguccgccuggcccugcuggaaauccaggccccuccccaaacagcccgcaaggugcucucuacagccuccagcccccaaccgacaaagacaauggcgauucccgauuggccuccgccaucguggauacuguccuggcaggcgugccaggcccccguggaccaccuggcccgccugguccucccggcccaagagguccuccuggcccccccgggacuccagggucccagggacuggcuggagagagaggaacagucgggcccagcggagagccaggcgugaagggcgaggagggagaaaaggcugcaacagccgagggcgaaggcgugcaacagcugcgcgaggcgcucaaaauucucgcggaacgcgugcuaauccuggagcacaugauuggcauccacgauccucuggccucacccgaagggagcggacaagaugccgcacugcgcgcuaaucucaagaugaaacggggaggcgcacaacccgauggagugcuggccgcguuacucggcccugaucccgggcaaaaaaguguggaccaggcaucaucccggaaguag

SEQ ID NO: 98714 - RNA, 1323 nt, Artificial Sequence
  derived and/or modified sequence
augaaacuugcacuccuccuaccuugggcuugcugcugucuuugugggucugcauuagcuacaggauuccucuaucccuuuucugccgccgcccugcagcagcauggcuaucccgaaccgggcgccgggagccccggcucuggcuaugcaagcagacgucacuggugccaccacaccguaaccagaacggugaguugucagguccaaaacggcuccgaaacaguaguccaacgcguguaucagagcugccgauggcccggaccgugugcuaacuuggugucuuacagaacccuuauccgacccacuuaccgagugucuuaccgcaccguaacaguucuugaauggcguugcugccccggauucacagggucuaauugugaugaggaauguaugaacugcaccaggcugucugacaugucagagcgacuaacgaccuuggaggcuaaggugcucuuacucgaagcagccgaacgucccucuagcccagauaaugacuuaccggcaccagaaucgacucccccuacuuggaacgaggacuuccuuccagacgccaucccacuggcacacccugucccacgccagaggagaccaacaggcccagcuggaccuccggggcagacagguccucccggacccgccgggccgccuggaucaaagggcgaucgcggucagacuggagagaaaggacccgccgggcccccuggacugcugggacccccuggaccccgcgggcucccaggagagaugggucggccuggucccccaggaccgccgggacccgccgggaaucccggaccuaguccuaauucaccacaaggggcccucuacagccugcaacccccuacagacaaagauaacggugacaguagacucgcauccgccaucguugacaccguacuugcuggcguaccaggaccaagaggaccuccaggaccacccggcccccccggcccacgcgguccaccgggcccacccggcacaccugguucgcaggguuuagcuggugaaagaggaacuguggggcccuccggcgagccuggugucaaaggcgaggaaggggagaaagcagcuacugcugaaggggaggggguucaacagcugcgcgaagcacucaaaaucuuagccgaaagggugcuuauccucgaacacaugauuggaauccacgacccuuuggcuagccccgagggcuccggucaagacgcggcuuuacgggcaaaccuaaaaaugaaacgcgggggggcgcagccagacgggguccucgccgcuuugcucggcccagaucccggccagaaaagcguugaccaggcuucuaguagaaaguag

SEQ ID NO: 98715 - protein, 513 aa, Artificial Sequence
  derived and/or modified sequence
MGAAAKLAFAVFLISCSSGAILGRSETQECLFFNANWEKDRTNQTGVEPCYGDKDKRRHCFATWKNISGSIEIVKQGCWLDDINCYDRTDCVEKKDSPEVYFCCCEGNMCNEKFSYFPEMEVTQPTSNPVTPKPPYYNILLYSLVPLMLIAGIVICAFWVYRHHKMAYPPVLVPTQDPGPPPPSPLLGLKPLQLLEVKARGRFGCVWKAQLLNEYVAVKIFPIQDKQSWQNEYEVYSLPGMKHENILQFIGAEKRGTSVDVDLWLITAFHEKGSLSDFLKANVVSWNELCHIAETMARGLAYLHEDIPGLKDGHKPAISHRDIKSKNVLLKNNLTACIADFGLALKFEAGKSAGDTHGQVGTRRYMAPEVLEGAINFQRDAFLRIDMYAMGLVLWELASRCTAADGPVDEYMLPFEEEIGQHPSLEDMQEVVVHKKKRPVLRDYWQKHAGMAMLCETIEECWDHDAEARLSAGCVGERITQMQRLTNIITTEDIVTVVTMVTNVDFPPKESSL

SEQ ID NO: 98716 - DNA, 1542 bp, Artificial Sequence
  derived and/or modified sequence
atgggggccgcagctaagctggcctttgcggtgttcctgatcagctgcagctctggagccatactgggcagaagtgagacacaggagtgcctgttcttcaacgccaactgggagaaagaccggaccaaccagacaggcgttgaaccttgctacggtgataaagataaacggcggcactgttttgcaacctggaagaatattagcggtagcattgaaatcgttaagcagggatgctggcttgacgacatcaactgctatgatcgcacagattgtgttgaaaaaaaagactctcctgaagtatacttctgctgctgcgagggcaatatgtgcaacgaaaagttcagttatttccccgagatggaggtgacccagcctacaagtaatccagttacaccaaagccaccctactataatatccttttgtattcactggtgcctctaatgttaatcgcaggtatcgtgatttgcgctttttgggtgtatagacatcacaagatggcctatccccctgtgcttgtgccaacccaggatcccgggccccctcctccttccccactcctcggacttaagcctcttcagctgctggaagtcaaggcccgtggaaggttcgggtgtgtatggaaggctcagctattgaacgaatacgtcgccgttaaaatctttcccattcaagataagcaaagctggcaaaatgagtatgaggtttatagcctccccgggatgaagcacgagaacatcctccaattcataggtgcggaaaaaaggggcacttctgtggatgtggacctgtggctgatcactgcttttcacgagaagggctcgcttagcgattttttgaaggctaacgtggtctcatggaatgagctgtgccatatcgctgagaccatggcgagaggactggcctacctccatgaagatatccccggcctgaaagacggacataaacccgctatctctcacagggatattaaaagcaaaaatgtattgctgaagaataatctcacagcatgtatcgccgacttcggcttagctttaaaatttgaggctggtaagtccgctggggatactcatgggcaggtgggcaccaggcggtacatggccccagaggtgttggaaggagccattaatttccagcgggatgctttcctgagaatagacatgtatgcaatgggacttgtactgtgggaactggccagccggtgcacagccgccgacggacctgttgatgagtacatgctgccttttgaagaagagatcggacagcaccccagcttggaagatatgcaagaagtggtggtgcacaagaaaaaaaggcccgtgttacgggattactggcagaagcatgcggggatggcaatgctttgcgaaactatcgaggaatgttgggaccatgacgccgaagccaggctgtccgctggctgtgtgggcgagcgaatcacacagatgcaacgacttactaacatcataacaacagaggacatcgttacagtcgtgaccatggtcaccaacgtggacttcccacccaaggagtcgtccctgtag

SEQ ID NO: 98717 - DNA, 1542 bp, Artificial Sequence
  derived and/or modified sequence
atgggagctgcggccaaactggctttcgccgtgtttttaatttcttgttcgtctggagccattctcgggagatcagagacacaggaatgcctgttctttaatgcgaattgggagaaagacaggaccaaccaaacgggagtggagccgtgctatggcgataaggataagcggcgccactgtttcgcgacatggaagaatattagtggctcaatcgaaatcgtgaaacagggatgttggctggatgacatcaattgctacgatagaacagactgtgttgagaaaaaggattcaccggaggtatatttctgctgttgtgagggcaatatgtgcaacgagaagttttcttatttccctgaaatggaagtgactcagccaacctctaatcctgtcacccccaagccgccctactacaacatccttctttacagtttggttccgttgatgctgatagcaggaatcgtcatttgtgccttctgggtgtaccgacaccacaaaatggcgtatcctcctgtactggtcccaactcaggatcctggccctccacccccatccccgctcctcggcctaaagccgctccagttgctcgaggtgaaggcgcgcggaaggttcggctgtgtctggaaagcccaactgctgaatgagtacgtggccgtgaaaatcttccccattcaagataagcagagctggcagaacgagtacgaagtgtattctttaccgggcatgaaacacgaaaacattctgcagttcattggagccgaaaagagaggaacctccgtggacgtggacctttggctcattacagcctttcacgagaagggcagcctgagcgatttcctgaaggccaatgtggtcagctggaacgaactgtgccatatcgccgagaccatggctcgcggcctcgcatacctgcatgaggatataccaggcctgaaagacgggcacaagcctgccatatcccatcgcgatatcaagagcaagaatgtactcttaaaaaataatttaactgcgtgtattgccgactttggtctggcccttaaattcgaggccgggaagtccgcgggcgacacccatggccaggtcggaaccagacgatacatggcacccgaagtgctggaaggcgctatcaattttcagagggacgcattcttgcgtattgatatgtacgctatgggcctggtgctgtgggaactggctagccgctgcacagcagccgatggccctgttgacgagtacatgctcccgtttgaagaggagatcggtcagcatccatccctcgaggacatgcaggaggtggtggtacacaaaaaaaagcgccccgtccttagagactattggcagaagcatgcagggatggcaatgctctgcgagacgatcgaagagtgctgggaccacgacgcggaggcccgcctgtccgcaggatgtgtgggtgagcggatcacccagatgcagagactgaccaatattattaccacagaggatatcgtcaccgtggtcaccatggtaacgaatgttgatttccctcctaaagagtcatctctgtag

SEQ ID NO: 98718 - DNA, 1542 bp, Artificial Sequence
  derived and/or modified sequence
atgggcgccgccgccaagctggcctttgctgtgttcctgatcagctgcagcagcggggccatcctgggccgctctgagacccaggagtgcctcttcttcaatgccaactgggagaaggacaggaccaaccagacaggagtggagccctgctatggagacaaggacaagagaagacactgctttgccacctggaagaacatcagcggcagcattgaaattgtgaagcagggctgctggctggatgacatcaactgctatgacagaacagactgtgtggagaagaaggacagccctgaggtgtacttctgctgctgtgagggcaacatgtgcaatgagaagttctcctacttccctgagatggaggtgacccagcccaccagcaaccctgtgacccccaagccaccctactacaacatcctgctgtacagcctggtgcccctgatgctgattgctggcatcgtcatctgtgccttctgggtgtaccgccaccacaagatggcctacccacctgtgctggtgcccacccaggaccccggccccccaccacccagccccctgctgggcctgaagcccctgcagctgctggaggtgaaggcccggggccgcttcggctgtgtgtggaaggcccagctgctgaatgaatatgtggccgtgaagatcttccccatccaggacaagcagagctggcagaatgaatatgaggtgtacagcctgcccggcatgaagcatgagaacatcctgcagttcatcggggctgagaagaggggcacctctgtggatgtggacctgtggctgatcacagccttccacgagaagggcagcctgagtgacttcctgaaggccaacgtggtgtcctggaatgagctgtgccacatcgccgagaccatggcccggggcctggcctacctgcacgaggacatccctggcctgaaggatggccacaagccagccatcagccaccgggacatcaagagcaagaatgtgctgctgaagaacaacctgacagcctgcatcgctgactttggcctggccctgaagtttgaagctgggaagtctgctggggacacccacggccaggtgggcacccggcgctacatggcccctgaggtgctggagggcgccatcaacttccagagagatgccttcctgagaattgacatgtatgccatgggcctggtgctgtgggagctggccagccgctgcacagctgctgatggccctgtggatgagtacatgctgccctttgaggaggagatcggccagcaccccagcctggaggacatgcaggaggtggtggtgcacaagaagaagaggcctgtgctgcgggactactggcagaagcatgctggcatggccatgctgtgtgagaccatcgaggagtgctgggaccatgatgctgaggcccggctgtctgctggctgtgtgggggagcgcatcacccagatgcagaggctgaccaacatcatcaccacagaggacatcgtgacagtggtgaccatggtgaccaacgtggacttcccccccaaggagagcagcctgtag

SEQ ID NO: 98719 - DNA, 1542 bp, Artificial Sequence
  derived and/or modified sequence
atgggcgccgccgccaagctggccttcgccgtgttcctgatcagctgttcaagcggagctatactgggccgtagtgagacacaggaatgcttatttttcaacgccaattgggagaaagatcggaccaatcagaccggcgttgagccttgctacggcgataaagataaaagacgacattgttttgctacctggaagaacatcagcggctctatcgagatagtaaaacagggatgttggcttgacgatattaattgttacgatagaacggactgcgtggaaaagaaagactctccggaagtttacttctgctgctgcgagggaaacatgtgcaatgagaaattctcatacttccctgagatggaagtgacccagcctacaagtaatcccgtgacgcctaagcccccatattataacatactgctgtatagtctcgtgcctttaatgctcatagcaggaattgtaatttgcgccttttgggtttaccggcaccacaagatggcctatccgcctgtgttggtcccaacacaggatcctggtcctcccccaccttctcccctcttaggactgaagcccctgcaactgctcgaggttaaagcgcgcgggcgatttggatgtgtgtggaaggcgcaactgctcaacgagtacgtcgcagtcaagattttccccatccaggacaaacagagctggcagaacgagtacgaagtttactcactacccggcatgaagcacgagaacatcctccaatttatcggcgcggagaagcggggcacatctgtagatgtcgatttgtggctgataaccgcgtttcatgagaaaggttccctctcggacttcctgaaggccaacgtggtgagctggaatgagctttgccacattgctgagactatggcccggggcttggcatacttgcacgaagatatacctggcctgaaggatggacacaaaccggctatctctcatagagatatcaaatcaaagaacgtgttactaaaaaacaatctgacggcctgtatcgcagatttcggcctagctctgaagtttgaggccgggaagtcagcgggagatacccatggacaggtgggcactagaagatacatggctcctgaggtcctagaaggcgcgattaactttcagcgtgacgcttttctgcgcatagatatgtacgccatgggcttagtactctgggagctggcctcaagatgtacagcggctgacggcccagttgacgagtacatgcttccgttcgaggaagagatcggccagcacccttcactggaggatatgcaggaggtggtggtccacaagaagaaacggccggtcctccgggattattggcaaaaacacgcaggaatggccatgctgtgtgagactattgaggaatgctgggaccatgatgccgaagctcgattgagtgccggttgtgttggcgagcggatcacccagatgcagagacttacgaacatcataaccaccgaagatattgtcaccgttgtgacaatggtgaccaacgtggacttcccccctaaggaatctagcctctag

SEQ ID NO: 98720 - DNA, 1542 bp, Artificial Sequence
  derived and/or modified sequence
atgggcgccgccgccaagctggccttcgccgtgttcctgatcagctgctctagcggagcaatactggggagaagtgagacccaggagtgcctgttctttaacgctaactgggagaaggatcggacaaaccagaccggcgtagaaccttgctatggagacaaggacaagaggaggcattgtttcgccacttggaaaaacatctcaggctccatcgagattgttaagcaaggttgttggctcgacgacatcaactgttatgatcgtacagactgcgtggagaagaaagactcccccgaggtgtacttctgttgctgtgagggtaacatgtgcaacgaaaaatttagctattttcccgaaatggaggtgacgcaaccaacgagcaaccccgtgacgccaaagcccccttattataacatcctgctgtactctctggtccctctgatgctgattgccgggatcgtgatctgcgcattctgggtataccggcaccataagatggcatatcctcccgttttggtgcccacacaggatccggggcctcctccaccaagcccgctgttaggtctgaagccacttcaactcctcgaggtcaaagcgaggggacgctttgggtgcgtgtggaaggcgcaactgctgaatgagtatgttgcggttaagattttccctatccaagataaacagtcatggcagaatgagtatgaggtgtattctctcccagggatgaaacatgaaaacattctccagtttataggcgcagagaagagaggaaccagcgtcgacgttgacctatggctgataacggcctttcacgaaaagggcagtcttagcgacttcctcaaggctaatgtggtttcttggaatgagttatgtcatatcgccgagactatggccaggggacttgcctacttgcatgaggatattcctggtcttaaggacggccataaacccgctattagccaccgggacatcaagtcaaagaatgtactgttaaaaaataatttaaccgcttgcatcgccgacttcggtctggcccttaaatttgaggccggtaaatctgccggagacactcacggccaggtggggaccagacggtatatggcccccgaagtcctcgagggggccattaacttccagcgtgatgccttcctgcgcatagacatgtacgctatgggcttagtactgtgggaactagcctccagatgtactgctgcggacgggccagtggacgagtacatgctgccattcgaggaggaaataggacagcacccctcactggaggatatgcaagaggtcgtagtacacaagaaaaaaagacctgtcctccgggattattggcagaaacacgccggaatggcgatgctctgtgagaccattgaagagtgctgggatcacgacgcggaggcccgcctcagtgctgggtgcgtgggcgagagaattacacaaatgcagcggctgaccaatatcattaccactgaagacattgtcacagttgttactatggtcacaaacgtggacttccctcccaaggagtcttccctttag

SEQ ID NO: 98721 - DNA, 1542 bp, Artificial Sequence
  derived and/or modified sequence
atgggggctgccgctaagcttgcatttgccgtcttcctgatctcctgctcctccggggcaattctaggcagatccgaaacgcaggaatgccttttcttcaatgccaattgggaaaaggatcgtacgaaccagaccggcgttgagccatgttatggggacaaagataaacgcagacactgttttgctacatggaagaatatcagcggctcaatagaaatagtcaaacaaggttgctggttggatgatatcaattgttatgatcgtaccgactgcgtcgagaagaaagactccccggaagtgtacttctgctgctgcgaaggcaacatgtgcaatgaaaagttttcttatttccctgaaatggaggtaacacaacctacttccaaccctgtgacaccaaaaccgccttactacaacatcctcctttatagcctagtccccctcatgctcatcgctggaatcgtgatctgcgctttttgggtttatcgccaccacaaaatggcatacccccctgtgctcgttccaacacaggatcccggtccaccccctccatccccactgttggggcttaagcccctccaactcctggaagttaaggcacggggacgatttggatgtgtttggaaggcccagctgctcaatgaatacgtggcagtgaagattttcccaatccaggataaacagtcctggcagaacgagtacgaggtatatagcctgcccggaatgaaacacgagaatattctgcagttcatcggggcagagaaacggggaactagcgtcgacgtggatctctggctgattacagcctttcacgaaaagggctccctttctgatttcttgaaagccaatgtggtctcatggaacgaattatgccacatcgccgagaccatggccagaggtctcgcttacctccatgaagacatcccagggcttaaggatggacacaaacccgcaatttcccatcgggatattaagagcaaaaacgtactgttgaagaacaacctgacagcctgtatcgcggactttgggctggctttgaagtttgaagccggaaagtccgccggagacacacacggtcaggtcggaactcgcagatatatggcgcctgaagtgcttgagggtgcaattaatttccagcgtgatgcattcctgagaatcgatatgtacgcgatgggcttagtgttatgggagctggcgtcaaggtgcactgccgctgatggacctgtagatgaatatatgctgcccttcgaagaggagattgggcagcacccatccctcgaagatatgcaggaggtggtcgttcacaagaagaaacgcccagtattgagagactattggcagaagcacgcagggatggcgatgctttgcgaaaccatcgaagagtgttgggaccacgatgcggaggctcggctgagtgccggttgcgttggagaacgaataacccaaatgcagcggttgacaaacatcattaccactgaggatatcgttacggtggtaacgatggtcaccaatgtggacttcccacccaaggaatcttctctgtag

SEQ ID NO: 98722 - DNA, 1542 bp, Artificial Sequence
  derived and/or modified sequence
atgggcgctgcagcgaaactggccttcgcagtgttcctgatctcctgctccagcggggcaattctcgggagatctgagactcaggaatgtctgttttttaacgctaactgggaaaaagatcgtactaaccagacgggggtggagccctgttatggtgacaaagataagagaaggcactgctttgccacctggaaaaatatttccgggtcaatcgagattgttaagcagggctgctggctggatgacatcaactgttatgacaggacagattgtgtggaaaaaaaagactcacctgaagtctacttctgttgctgtgaagggaacatgtgtaatgagaaattttcctacttcccggagatggaagtgacacagcccaccagtaaccccgttacccccaagcccccttactacaacattcttctgtattcactcgtgccgctgatgctgatcgcgggtatcgttatctgtgccttctgggtgtatcgtcatcataagatggcctatccaccagttttagttccaactcaagacccaggcccaccacccccatctccattgctcggcctcaagccgctgcagctccttgaagtcaaggcgagggggcgattcggatgtgtctggaaggctcagttactgaacgagtatgtggccgtgaaaatcttcccaatccaggataagcaatcctggcaaaacgaatacgaggtttatagcctgcctggcatgaaacacgaaaatatcctgcaattcattggagctgagaagaggggaacgtctgtggatgtcgacctgtggttgatcacagcgttccacgaaaaaggctcgctaagtgactttctgaaagctaacgtcgtgtcctggaatgagctctgtcatattgcagagaccatggcccgtggtctcgcctacctgcatgaggacatccctggcctcaaggatgggcataagcccgctataagccatcgagatattaagtcgaaaaatgttctccttaaaaataatttaacagcttgcatcgccgattttggactggcgcttaaattcgaggcaggcaaaagcgctggggatacccacggtcaggttggcacccggcgttatatggctccagaggttttagagggagccataaattttcagcgggatgctttcctgcgtattgacatgtacgccatgggattggtgttgtgggaactggcctcacgatgcacagccgcagatggacccgtggatgaatacatgttaccatttgaagaagaaattggtcagcatccatcactggaggacatgcaagaagttgtggtgcacaagaaaaagcggccagtcttacgggactactggcaaaagcatgccggtatggctatgctttgcgagactattgaggaatgctgggatcatgatgccgaggccaggctgagcgctggctgtgtgggcgaacggataactcagatgcagagacttacaaacattattactaccgaggatatcgtgaccgtcgtgactatggtcacaaacgtggacttcccacctaaggaaagctcactgtag

SEQ ID NO: 98723 - DNA, 1542 bp, Artificial Sequence
  derived and/or modified sequence
atgggcgccgccgccaagctggccttcgccgtgttcctgatcagctgcagcagcggcgccatcctgggcagaagcgagacccaggagtgcctgttcttcaacgccaactgggagaaggacagaaccaaccagaccggcgtggagccctgctacggcgacaaggacaagagaagacactgcttcgccacctggaagaacatcagcggcagcatcgagatcgtgaagcagggctgctggctggacgacatcaactgctacgacagaaccgactgcgtggagaagaaggacagccccgaggtgtacttctgctgctgcgagggcaacatgtgcaacgagaagttcagctacttccccgagatggaggtgacccagcccaccagcaaccccgtgacccccaagcccccctactacaacatcctgctgtacagcctggtgcccctgatgctgatcgccggcatcgtgatctgcgccttctgggtgtacagacaccacaagatggcctacccccccgtgctggtgcccacccaggaccccggcccccccccccccagccccctgctgggcctgaagcccctgcagctgctggaggtgaaggccagaggcagattcggctgcgtgtggaaggcccagctgctgaacgagtacgtggccgtgaagatcttccccatccaggacaagcagagctggcagaacgagtacgaggtgtacagcctgcccggcatgaagcacgagaacatcctgcagttcatcggcgccgagaagagaggcaccagcgtggacgtggacctgtggctgatcaccgccttccacgagaagggcagcctgagcgacttcctgaaggccaacgtggtgagctggaacgagctgtgccacatcgccgagaccatggccagaggcctggcctacctgcacgaggacatccccggcctgaaggacggccacaagcccgccatcagccacagagacatcaagagcaagaacgtgctgctgaagaacaacctgaccgcctgcatcgccgacttcggcctggccctgaagttcgaggccggcaagagcgccggcgacacccacggccaggtgggcaccagaagatacatggcccccgaggtgctggagggcgccatcaacttccagagagacgccttcctgagaatcgacatgtacgccatgggcctggtgctgtgggagctggccagcagatgcaccgccgccgacggccccgtggacgagtacatgctgcccttcgaggaggagatcggccagcaccccagcctggaggacatgcaggaggtggtggtgcacaagaagaagagacccgtgctgagagactactggcagaagcacgccggcatggccatgctgtgcgagaccatcgaggagtgctgggaccacgacgccgaggccagactgagcgccggctgcgtgggcgagagaatcacccagatgcagagactgaccaacatcatcaccaccgaggacatcgtgaccgtggtgaccatggtgaccaacgtggacttcccccccaaggagagcagcctgtag

SEQ ID NO: 98724 - DNA, 5728 bp, Artificial Sequence
  derived and/or modified sequence
aggagaccgaaaacgcggccgagcccggagcccggagctggagccagagcctggaccagaacttggccgccgcctgcaccgccgccgccgctgccgcccgccgccccttccccgcgccgcagccgcctcgccgccaccgccgcgagctcggccgccagtggtcctcggactttaggtgtctgggttgaaggtcggtccggacatcggacccagtcagttcccagactgtccgggcggcagcggacgccgctgccgccgccgcctcttcgtcgcctcagcctggcgttttgttccgagagacgggagaggcgagcggagctgacagtgattttgacagtgatttaaacccgcttttgttgttgttggcttttcgttgtttggttttgtgtgttgtgcgtgtgtgtggcggtttttcccccgtggtgcattttattttttatcgttgtgctcttttttttcttttttttttttaacccagtgagcgtttttttttttttttttttttttttttggtctgggcttccgaatatgttttatgacggttgattttacaccaggaggtttgtctccgaggaagacccagggaactggatatctagcgagaacttcctccggattccccggcgcctcgggaaaatgggagctgctgcaaagttggcgtttgccgtctttcttatctcctgttcttcaggtgctatacttggtagatcagaaactcaggagtgtcttttctttaatgctaattgggaaaaagacagaaccaatcaaactggtgttgaaccgtgttatggtgacaaagataaacggcggcattgttttgctacctggaagaatatttctggttccattgaaatagtgaaacaaggttgttggctggatgatatcaactgctatgacaggactgattgtgtagaaaaaaaagacagccctgaagtatatttttgttgctgtgagggcaatatgtgtaatgaaaagttttcttattttccggagatggaagtcacacagcccacttcaaatccagttacacctaagccaccctattacaacatcctgctctattccttggtgccacttatgttaattgcggggattgtcatttgtgcattttgggtgtacaggcatcacaagatggcctaccctcctgtacttgttccaactcaagacccaggaccacccccaccttctccattactaggtttgaaaccactgcagttattagaagtgaaagcaaggggaagatttggttgtgtctggaaagcccagttgcttaacgaatatgtggctgtcaaaatatttccaatacaggacaaacagtcatggcaaaatgaatacgaagtctacagtttgcctggaatgaagcatgagaacatattacagttcattggtgcagaaaaacgaggcaccagtgttgatgtggatctttggctgatcacagcatttcatgaaaagggttcactatcagactttcttaaggctaatgtggtctcttggaatgaactgtgtcatattgcagaaaccatggctagaggattggcatatttacatgaggatatacctggcctaaaagatggccacaaacctgccatatctcacagggacatcaaaagtaaaaatgtgctgttgaaaaacaacctgacagcttgcattgctgactttgggttggccttaaaatttgaggctggcaagtctgcaggcgatacccatggacaggttggtacccggaggtacatggctccagaggtattagagggtgctataaacttccaaagggatgcatttttgaggatagatatgtatgccatgggattagtcctatgggaactggcttctcgctgtactgctgcagatggacctgtagatgaatacatgttgccatttgaggaggaaattggccagcatccatctcttgaagacatgcaggaagttgttgtgcataaaaaaaagaggcctgttttaagagattattggcagaaacatgctggaatggcaatgctctgtgaaaccattgaagaatgttgggatcacgacgcagaagccaggttatcagctggatgtgtaggtgaaagaattacccagatgcagagactaacaaatattattaccacagaggacattgtaacagtggtcacaatggtgacaaatgttgactttcctcccaaagaatctagtctatgatggttgcgccatctgtgcacactaagaaatgggactctgaactggagctgctaagctaaagaaactgcttacagtttattttctgtgtaaaatgagtaggatgtctcttggaaatgttaagaaagaagaccctttgttgaaaaatgttgctctgggagacttactgcattgccgacagcacagatgtgaaggacatgagactaagagaaaccttgcaaactctataaagaaacttttgaaaaagtgtacatgaagaatgtagccctctccaaatcaaggatcttttggacctggctaatggagtgtttgaaaactgacatcagatttcttaatgtctgtcagaagacactaattccttaaatgaactactgctattttttttaaatcaaaaacttttcatttcagattttaaaaagggtaacttgtttttattgcatttgctgttgtttctataaatgactattgtaatgccaatatgacacagcttgtgaatgtttagtgtgctgctgttctgtgtacataaagtcatcaaagtggggtacagtaaagaggcttccaagcattactttaacctccctcaacaaggtatacctcagttccacggttgctaaattataaaattgaaaacactaacaaaatttgaataataaatcgatccatgttttgtaacaaattcactgtgttatttaaggaaaaaaaggtaagctatgcttagtgccaacaataagtggccattcgtaaagcagtgttttagcatttcttgtgctggcttgtaatgtagggaaaaaaagtgctgttttttgaaaagatggtgtcatttcccccttcttcccatgttttaaagccccatcttatatccagttcccaaaatttgcatacttacctaagtattttttttaggtgtgctgtgtttggggaatatttgaaaatttaaagcatgatttaaaattttttaaagtgagctgtgacactggaaagctcttcattttatcttttaaaatagagttttttctatttatatatgtaaaattgtagtgtatttcttttcaccaaacagtgtgtgggacattctttatcactgttttaggatcacctcaggaagtgtcgttacccagaattccccactgtctgctatgagacttgtaactttatcactatacttctgcttggtgccatcttgtcagagtaatatttgatgtctgtgatatgtaaagaattatcctaggataaagatattaaactttaagcagatttcagatgttactgctttaaaacaaatcagggataacaaattaaacgtataacttaaaatatgcaatgacatttagaggtaaccaatgttgatataggtagcatagcctagcctcctccccaaaattgcttttacaactaacactgatactaatttaggatagttcatgccttatccttgctaagaaaatggaattgatggtaggcaggtgctaaagtgcttttcaaaacaatattacgttagaatacaattggattcttcctcaaatttatacaggccaaaaagtaaaacattaattttctgaatttccagattaccaatcaattaatcaacaaatagccagtattatgctgtgtatttctgtcaggtcattttaaaatccatgttaattttataaaagaattttttacatgtcactgtcaggagctcactgtgaatgtgttgtcttcaaatggttatttaaccacacagtacactacattttacatatatgtacgtaatctctgggaatagtaaattaattatgttatttataaacaatacataggtcaacagactttaagcagggaggaaaagaagagtaatagcgtctgtgtgctgcagaccattcagaactgtcacgtgtgtccccatggtctcattcattgtattcctagcaattcccttttcaatgttgagttcacctctttatttcacaaagtacttggtctctcaatttcttgatctggttttgcttccatttaaaaactaatcaagaagggaaaatattgagaatgtgcatacaagaaaatcattaatttcctgaagatgaatttctacctgttgtgaacatttaactttctttttaaaagttaaacaaaaataaacaagggatattatgatgaatgtttggcttatgtgagtactagagataaaatttttaaacccagttattcacaatataaaatgttttcaagttagaaaaaatttttagaaatcctgggtattgtatttaactgtagctaaccaattttaaaacttgtattcttttgagaactattattaatagaaaaactttttataagcagtaaaataagaatgttccagtgactacctgtccttatacctagtcttgttaaaactttcttttgcagggtatttagtgtttggtttacagtcagtgcagagtgggcaagttaacagaaagtttgagctagagatactggaaaaaaaaaagatcaaagaatgagaaaaatggtgatccattttggggcaaactgagaccccccaaataactctttcctcatgtgtatggtgctcctcatgactcgtcttgtattttgcctttctgatacccatcagaactgctgctgctctaacttatactctttaccttgcccagatctccgcgtaaggaatgctttatgatcaacttgccataggactgatggattaaccagtgttcggctttatttgaagtctatgccctgcacagctcttgtatgtattttagatgctagaagtttttttagcatgtgatgtgtgattcttgtttgaattctaggtaccttgtgaattccagaaaaagagactgtgcttcacgattgttagtcccatgaacttgcactatctatctttcatggtgatgttttgaaaatacaatcaggaaaaaacccaacacctttggaatttaaaatagaatcatatcatgaaatttaaaaagaatctcttctgttgcatttcctcacccctaagtaacagctacatttaagtaaaatgcaggtggtaggggaaaaaaaaccatggcgagatggtggtttagtggaataaactgattactggtttttttgtttttttttttttttttaaagaaagaagcttcatcacagatactttccagtttctcttttatacttttttgaaagattactttttaggaacatttggtatgatatgcataaaattatttatccatttatgggcaaaatgatacaagtagcatcttgattgaacatcatttacctcagatattcaaccagcagtacgttttttatgcagtctcaacccatatcccatttgttacctctcagaatattggtaagcagttattttcgctttactctgtatttcttgtgttttgggcacaggttattgtactactgtcaaatcgtacttgctattttttctgcaagtatttaacagaaagcttaaaatccccataaaaccccaccttggataagtgattgttaaatattgtacaaataaaatgtatgctatccccattccatccccaagttaaataaaaaaatgaatacggta

SEQ ID NO: 98725 - DNA, 2367 bp, Artificial Sequence
  derived and/or modified sequence
gccgccccttccccgcgccgcagccgcctcgccgccaccgccgcgagctcggccgccagtggtcctcggactttaggtgtctgggttgaaggaggtttgtctccgaggaagacccagggaactggatatctagcgagaacttcctccggattccccggcgcctcgggaaaatgggagctgctgcaaagttggcgtttgccgtctttcttatctcctgttcttcaggtgctatacttggtagatcagaaactcaggagtgtcttttctttaatgctaattgggaaaaagacagaaccaatcaaactggtgttgaaccgtgttatggtgacaaagataaacggcggcattgttttgctacctggaagaatatttctggttccattgaaatagtgaaacaaggttgttggctggatgatatcaactgctatgacaggactgattgtgtagaaaaaaaagacagccctgaagtatatttttgttgctgtgagggcaatatgtgtaatgaaaagttttcttattttccggagatggaagtcacacagcccacttcaaatccagttacacctaagccaccctattacaacatcctgctctattccttggtgccacttatgttaattgcggggattgtcatttgtgcattttgggtgtacaggcatcacaagatggcctaccctcctgtacttgttccaactcaagacccaggaccacccccaccttctccattactaggtttgaaaccactgcagttattagaagtgaaagcaaggggaagatttggttgtgtctggaaagcccagttgcttaacgaatatgtggctgtcaaaatatttccaatacaggacaaacagtcatggcaaaatgaatacgaagtctacagtttgcctggaatgaagcatgagaacatattacagttcattggtgcagaaaaacgaggcaccagtgttgatgtggatctttggctgatcacagcatttcatgaaaagggttcactatcagactttcttaaggctaatgtggtctcttggaatgaactgtgtcatattgcagaaaccatggctagaggattggcatatttacatgaggatatacctggcctaaaagatggccacaaacctgccatatctcacagggacatcaaaagtaaaaatgtgctgttgaaaaacaacctgacagcttgcattgctgactttgggttggccttaaaatttgaggctggcaagtctgcaggcgatacccatggacaggttggtacccggaggtacatggctccagaggtattagagggtgctataaacttccaaagggatgcatttttgaggatagatatgtatgccatgggattagtcctatgggaactggcttctcgctgtactgctgcagatggacctgtagatgaatacatgttgccatttgaggaggaaattggccagcatccatctcttgaagacatgcaggaagttgttgtgcataaaaaaaagaggcctgttttaagagattattggcagaaacatgctggaatggcaatgctctgtgaaaccattgaagaatgttgggatcacgacgcagaagccaggttatcagctggatgtgtaggtgaaagaattacccagatgcagagactaacaaatattattaccacagaggacattgtaacagtggtcacaatggtgacaaatgttgactttcctcccaaagaatctagtctatgatggttgcgccatctgtgcacactaagaaatgggactctgaactggagctgctaagctaaagaaactgcttacagtttattttctgtgtaaaatgagtaggatgtctcttggaaatgttaagaaagaagaccctttgttgaaaaatgttgctctgggagacttactgcattgccgacagcacagatgtgaaggacatgagactaagagaaaccttgcaaactctataaagaaacttttgaaaaagtgtacatgaagaatgtagccctctccaaatcaaggatcttttggacctggctaatggagtgtttgaaaactgacatcagatttcttaatgtctgtcagaagacactaattccttaaatgaactactgctattttttttaaatcaaaaacttttcatttcagattttaaaaagggtaacttgtttttattgcatttgctgttgtttctataaatgactattgtaatgccaatatgacacagcttgtgaatgtttagtgtgctgctgttctgtgtacataaagtcatcaaagtggggtacagtaaagaggcttccaagcattactttaacctccctcaacaaggtatacctcagttccacggttgctaaattataaaattgaaaacactaacaaaatttgaataataaatcga

SEQ ID NO: 98726 - DNA, 1956 bp, Artificial Sequence
  derived and/or modified sequence
aggagaccgaaaacgcggccgagcccggagcccggagctggagccagagcctggaccagaacttggccgccgcctgcaccgccgccgccgctgccgcccgccgccccttccccgcgccgcagccgcctcgccgccaccgccgcgagctcggccgccagtggtcctcggactttaggtgtctgggttgaagacagaaccaatcaaactggtgttgaaccgtgttatggtgacaaagataaacggcggcattgttttgctacctggaagaatatttctggttccattgaaatagtgaaacaaggttgttggctggatgatatcaactgctatgacaggactgattgtgtagaaaaaaaagacagccctgaagtatatttttgttgctgtgagggcaatatgtgtaatgaaaagttttcttattttccggagatggaagtcacacagcccacttcaaatccagttacacctaagccaccctattacaacatcctgctctattccttggtgccacttatgttaattgcggggattgtcatttgtgcattttgggtgtacaggcatcacaagatggcctaccctcctgtacttgttccaactcaagacccaggaccacccccaccttctccattactaggtttgaaaccactgcagttattagaagtgaaagcaaggggaagatttggttgtgtctggaaagcccagttgcttaacgaatatgtggctgtcaaaatatttccaatacaggacaaacagtcatggcaaaatgaatacgaagtctacagtttgcctggaatgaagcatgagaacatattacagttcattggtgcagaaaaacgaggcaccagtgttgatgtggatctttggctgatcacagcatttcatgaaaagggttcactatcagactttcttaaggctaatgtggtctcttggaatgaactgtgtcatattgcagaaaccatggctagaggattggcatatttacatgaggatatacctggcctaaaagatggccacaaacctgccatatctcacagggacatcaaaagtaaaaatgtgctgttgaaaaacaacctgacagcttgcattgctgactttgggttggccttaaaatttgaggctggcaagtctgcaggcgatacccatggacaggttggtacccggaggtacatggctccagaggtattagagggtgctataaacttccaaagggatgcatttttgaggatagatatgtatgccatgggattagtcctatgggaactggcttctcgctgtactgctgcagatggacctgtagatgaatacatgttgccatttgaggaggaaattggccagcatccatctcttgaagacatgcaggaagttgttgtgcataaaaaaaagaggcctgttttaagagattattggcagaaacatgctggaatggcaatgctctgtgaaaccattgaagaatgttgggatcacgacgcagaagccaggttatcagctggatgtgtaggtgaaagaattacccagatgcagagactaacaaatattattaccacagaggacattgtaacagtggtcacaatggtgacaaatgttgactttcctcccaaagaatctagtctatgatggttgcgccatctgtgcacactaagaaatgggactctgaactggagctgctaagctaaagaaactgcttacagtttattttctgtgtaaaatgagtaggatgtctcttggaaatgttaagaaagaagaccctttgttgaaaaatgttgctctgggagacttactgcattgccgacagcacagatgtgaaggacatgagactaagagaaaccttgcaaactctataaagaaacttttgaaaaagtgtacatgaagaatgtagccctctccaaatcaaggatcttttggacctggctaatggagtgtttgaaaactgacatcagatttcttaatgtctgtcag

SEQ ID NO: 98727 - protein, 405 aa, Artificial Sequence
  derived and/or modified sequence
MCNEKFSYFPEMEVTQPTSNPVTPKPPYYNILLYSLVPLMLIAGIVICAFWVYRHHKMAYPPVLVPTQDPGPPPPSPLLGLKPLQLLEVKARGRFGCVWKAQLLNEYVAVKIFPIQDKQSWQNEYEVYSLPGMKHENILQFIGAEKRGTSVDVDLWLITAFHEKGSLSDFLKANVVSWNELCHIAETMARGLAYLHEDIPGLKDGHKPAISHRDIKSKNVLLKNNLTACIADFGLALKFEAGKSAGDTHGQVGTRRYMAPEVLEGAINFQRDAFLRIDMYAMGLVLWELASRCTAADGPVDEYMLPFEEEIGQHPSLEDMQEVVVHKKKRPVLRDYWQKHAGMAMLCETIEECWDHDAEARLSAGCVGERITQMQRLTNIITTEDIVTVVTMVTNVDFPPKESSL

SEQ ID NO: 98728 - DNA, 1218 bp, Artificial Sequence
  derived and/or modified sequence
atgtgcaacgagaagtttagctactttcccgaaatggaggtgacccagcctacctcaaatcctgtcacgccaaagcccccctattataatatactcctgtactcgctcgtgcctctaatgctcattgcgggtatcgtcatctgcgctttttgggtgtaccgccaccataaaatggcgtacccccccgttctggtccccacccaggatcccggtcctccccctcctagcccgctgctgggcctgaagccgctgcaacttctcgaggtcaaggcccgcggccggtttggttgtgtgtggaaggctcagttgcttaacgaatatgtggctgtcaagatcttccccatccaggataaacaatcttggcagaatgaatacgaggtttattcgttgcccggaatgaagcacgaaaacattctccagttcattggggctgagaagcggggcacaagtgttgacgttgacttgtggcttattactgcctttcatgagaaagggtcccttagtgatttcttgaaggcaaacgtcgtctcttggaacgaactctgccacatcgcggagactatggctaggggacttgcgtatctgcatgaggatatacctgggttaaaagacggacataagcctgctatcagccaccgtgacatcaagtccaagaacgtgttactaaagaataacctgacggcctgcatagctgacttcgggttagcccttaagtttgaagctggcaagtcagcaggagacacccacgggcaggtgggcacccgccgctatatggcccctgaggtgctagaaggcgctatcaatttccagagagacgctttcttacgcattgacatgtacgccatgggcttagtgttatgggagcttgccagtaggtgcaccgcagccgatggtcccgtcgatgagtatatgttaccatttgaagaggagatcggccagcaccctagcctcgaggatatgcaagaagtggtggtccacaaaaagaaacggcccgtactgcgggattattggcagaagcacgccggaatggccatgctgtgtgagactatagaggagtgctgggaccatgacgctgaggcgcggctctccgcgggatgcgtgggagagagaatcacccagatgcagcgcctgacaaacatcattaccacagaagatatcgtcaccgttgttacaatggtgaccaatgtagacttcccccctaaggagtcgagtctctag

SEQ ID NO: 98729 - DNA, 1218 bp, Artificial Sequence
  derived and/or modified sequence
atgtgcaatgagaagttctcctacttccctgagatggaggtgacccagcccaccagcaaccctgtgacccccaagccaccctactacaacatcctgctgtacagcctggtgcccctgatgctgattgctggcatcgtcatctgtgccttctgggtgtaccgccaccacaagatggcctacccacctgtgctggtgcccacccaggaccccggccccccaccacccagccccctgctgggcctgaagcccctgcagctgctggaggtgaaggcccggggccgcttcggctgtgtgtggaaggcccagctgctgaatgaatatgtggccgtgaagatcttccccatccaggacaagcagagctggcagaatgaatatgaggtgtacagcctgcccggcatgaagcatgagaacatcctgcagttcatcggggctgagaagaggggcacctctgtggatgtggacctgtggctgatcacagccttccacgagaagggcagcctgagtgacttcctgaaggccaacgtggtgtcctggaatgagctgtgccacatcgccgagaccatggcccggggcctggcctacctgcacgaggacatccctggcctgaaggatggccacaagccagccatcagccaccgggacatcaagagcaagaatgtgctgctgaagaacaacctgacagcctgcatcgctgactttggcctggccctgaagtttgaagctgggaagtctgctggggacacccacggccaggtgggcacccggcgctacatggcccctgaggtgctggagggcgccatcaacttccagagagatgccttcctgagaattgacatgtatgccatgggcctggtgctgtgggagctggccagccgctgcacagctgctgatggccctgtggatgagtacatgctgccctttgaggaggagatcggccagcaccccagcctggaggacatgcaggaggtggtggtgcacaagaagaagaggcctgtgctgcgggactactggcagaagcatgctggcatggccatgctgtgtgagaccatcgaggagtgctgggaccatgatgctgaggcccggctgtctgctggctgtgtgggggagcgcatcacccagatgcagaggctgaccaacatcatcaccacagaggacatcgtgacagtggtgaccatggtgaccaacgtggacttcccccccaaggagagcagcctgtag

SEQ ID NO: 98730 - DNA, 1218 bp, Artificial Sequence
  derived and/or modified sequence
atgtgcaacgagaagttcagctacttccccgagatggaggtgacccagccgacttctaatcccgtcacacccaaaccaccatattacaatattttactatacagtctggtgccactgatgctgattgctggcatcgtaatttgtgccttctgggtatataggcaccataagatggcctatcctcctgtcttggtacctacacaagatcctggtccaccaccccccagtccgttactggggctcaagccactccagttgctggaggtcaaggctcgcggtagatttggctgcgtttggaaggcccagcttctgaatgagtatgtcgcagtgaaaatttttcctatacaggataaacaatcatggcaaaacgaatatgaggtttactcgctccccggcatgaagcatgagaacatactgcaatttataggagcagaaaagcggggtacatcagttgacgtcgatctgtggctgattactgcatttcacgagaaaggaagcctttccgacttcctcaaggcaaacgtggtcagctggaatgaactgtgtcatatcgccgagaccatggctagaggtctggcctacctgcacgaagacattcctggcctcaaagacggccataagccggccatttcccatagggacatcaaaagcaagaacgtgctgcttaaaaataacctgacagcctgtatcgctgacttcggccttgcccttaaattcgaagcagggaagtccgctggcgacacccacggacaagtgggaacaagaaggtatatggcaccggaagttctcgagggggccattaatttccaacgggatgcttttctgaggattgacatgtacgcaatgggcctggtgctctgggagctcgcatcacgctgtacagcggccgacggacctgtggacgagtatatgctaccatttgaggaggagatcggccaacacccaagtctcgaagacatgcaggaggtggtggtgcacaaaaagaagcgaccagtcttacgtgactattggcagaagcacgccgggatggcaatgctatgtgaaaccatcgaagagtgctgggaccacgatgccgaggccaggttatccgctggttgcgtcggtgagaggatcactcagatgcagcgcctcaccaacataatcaccaccgaagacatcgtcactgtggttaccatggtcactaatgtggacttccctccaaaggaaagttctctatag

SEQ ID NO: 98731 - DNA, 1218 bp, Artificial Sequence
  derived and/or modified sequence
atgtgtaacgagaagttttcatatttcccggaaatggaggtgacccagccaacctcaaaccccgtgacccccaagcctccctattacaacatactgctatatagtctggtcccgctgatgcttatcgctgggatcgtaatctgtgcattttgggtgtatcgtcaccataaaatggcctatcctccagtcttggtgcccacacaagaccctggtcctccacctccaagtcccctcttggggctgaagcccctgcagttgctcgaggtgaaagcaaggggtaggttcggatgcgtttggaaggcccagctactcaatgaatacgtggctgtcaagatctttccaatccaggacaagcagagttggcagaatgaatacgaagtttattctctccctggtatgaagcatgagaatatcctgcagttcatcggagccgagaagaggggaacatccgtcgatgtcgacctctggctgataactgccttccacgagaaagggagccttagcgatttcctgaaggctaacgtggtaagctggaatgagctgtgtcatattgccgaaactatggctagaggcctggcatacctacacgaagacatcccaggactcaaggatgggcataagccagccatctcccatagagacattaagagcaaaaacgtcctcctcaagaacaacctgaccgcatgcattgcagacttcggacttgccttgaagttcgaagccggtaaatctgccggtgacacacacggtcaggttggaacacggaggtatatggcgccagaggtactggaaggcgctataaacttccaacgagatgcattcctgcgaatagatatgtatgcgatgggattagtgttgtgggaacttgcgtctcggtgtaccgccgctgacgggcctgttgacgaatatatgctgccatttgaggaggagatcggtcagcacccctcccttgaggacatgcaggaggtggtggtacacaaaaagaagcggcctgtgcttcgagattattggcagaagcacgcaggcatggcaatgttgtgtgaaaccatcgaggaatgctgggaccacgatgccgaggccaggttgagtgccggatgtgtcggggagcgtattacgcaaatgcagcgcttaactaatatcatcacaactgaagacatcgttaccgtggttaccatggttactaatgtcgactttccgccaaaagagagcagcctgtag

SEQ ID NO: 98732 - DNA, 1218 bp, Artificial Sequence
  derived and/or modified sequence
atgtgcaacgagaagttcagctacttccccgagatggaggtgacccagcccaccagcaaccccgtgacccccaagcccccctactacaacatcctgctgtacagcctggtgcccctgatgctgatcgccggcatcgtgatctgcgccttctgggtgtacagacaccacaagatggcctacccccccgtgctggtgcccacccaggaccccggcccccccccccccagccccctgctgggcctgaagcccctgcagctgctggaggtgaaggccagaggcagattcggctgcgtgtggaaggcccagctgctgaacgagtacgtggccgtgaagatcttccccatccaggacaagcagagctggcagaacgagtacgaggtgtacagcctgcccggcatgaagcacgagaacatcctgcagttcatcggcgccgagaagagaggcaccagcgtggacgtggacctgtggctgatcaccgccttccacgagaagggcagcctgagcgacttcctgaaggccaacgtggtgagctggaacgagctgtgccacatcgccgagaccatggccagaggcctggcctacctgcacgaggacatccccggcctgaaggacggccacaagcccgccatcagccacagagacatcaagagcaagaacgtgctgctgaagaacaacctgaccgcctgcatcgccgacttcggcctggccctgaagttcgaggccggcaagagcgccggcgacacccacggccaggtgggcaccagaagatacatggcccccgaggtgctggagggcgccatcaacttccagagagacgccttcctgagaatcgacatgtacgccatgggcctggtgctgtgggagctggccagcagatgcaccgccgccgacggccccgtggacgagtacatgctgcccttcgaggaggagatcggccagcaccccagcctggaggacatgcaggaggtggtggtgcacaagaagaagagacccgtgctgagagactactggcagaagcacgccggcatggccatgctgtgcgagaccatcgaggagtgctgggaccacgacgccgaggccagactgagcgccggctgcgtgggcgagagaatcacccagatgcagagactgaccaacatcatcaccaccgaggacatcgtgaccgtggtgaccatggtgaccaacgtggacttcccccccaaggagagcagcctgtag

SEQ ID NO: 98733 - protein, 1003 aa, Artificial Sequence
  derived and/or modified sequence
MATPGPRDIPLLPGSPRRLSPQAGSRGGQGPKHGQQCLKMPGPRAPGLQGGSNRDPGQPCGGESTRSSSVINNYLDANEPVSLEARLSRMHFHDSQRKVDYVLAYHYRKRGVHLAQGFPGHSLAIVSNGETGKEPHAGGPGDIELGPLDALEEERKEQREEFEHNLMEAGLELEKDLENKSQGSIFVRIHAPWQVLAREAEFLKIKVPTKKEMYEIKAGGSIAKKFSAALQKLSSHLQPRVPEHSNNKMKNLSYPFSREKMYLYNIQEKDTFFDNATRSRIVHEILKRTACSRANNTMGINSLIANNIYEAAYPLHDGEYDSPEDDMNDRKLLYQEWARYGVFYKFQPIDLIRKYFGEKIGLYFAWLGLYTSFLIPSSVIGVIVFLYGCATIEEDIPSREMCDQQNAFTMCPLCDKSCDYWNLSSACGTAQASHLFDNPATVFFSIFMALWATMFLENWKRLQMRLGYFWDLTGIEEEEERAQEHSRPEYETKVREKMLKESNQSAVQKLETNTTECGDEDDEDKLTWKDRFPGYLMNFASILFMIALTFSIVFGVIVYRITTAAALSLNKATRSNVRVTVTATAVIINLVVILILDEIYGAVAKWLTKIEVPKTEQTFEERLILKAFLLKFVNAYSPIFYVAFFKGRFVGRPGSYVYVFDGYRMEECAPGGCLMELCIQLSIIMLGKQLIQNNIFEIGVPKLKKLFRKLKDETEAGETDSAHSKHPEQWDLDYSLEPYTGLTPEYMEMIIQFGFVTLFVASFPLAPVFALLNNVIEVRLDAKKFVTELRRPDAVRTKDIGIWFDILSGIGKFSVISNAFVIAITSDFIPRLVYQYSYSHNGTLHGFVNHTLSFFNVSQLKEGTQPENSQFDQEVQFCRFKDYREPPWAPNPYEFSKQYWFILSARLAFVIIFQNLVMFLSVLVDWMIPDIPTDISDQIKKEKSLLVDFFLKEEHEKLKLMDEPALRSPGGGDRSRSRAASSAPSGQSQLGSMMSSGSQHTNV

SEQ ID NO: 98734 - DNA, 3012 bp, Artificial Sequence
  derived and/or modified sequence
atggcaacacccggtcccagggatatcccgctcctccctgggtcgccacgccgcctcagcccccaagcgggttctcggggcggccagggcccaaagcacgggcagcagtgtctcaaaatgcccggaccacgggctccaggcctccagggcggctccaaccgcgatccaggccaaccctgcggcggcgaatccactcgctcgagcagcgtaatcaacaactatctggacgctaatgaaccggtgagtctggaagctcgactatcccgtatgcatttccacgactcacagcggaaggtggattacgtcctggcgtaccactacaggaaacggggtgtgcacctcgcccagggctttcccgggcacagccttgcgattgtcagtaatggcgaaacaggaaaggaaccccatgccggcgggcccggagatattgagctgggcccgctcgatgccctcgaggaggagagaaaggagcagcgggaagagttcgaacacaatctgatggaggctggactggagctggagaaagatctggagaacaaaagtcaaggtagtatttttgtcagaattcacgccccttggcaggtcctggccagagaagctgagttcttaaagataaaggtgcccacaaagaaggagatgtacgaaatcaaggccgggggttcaatcgccaaaaagttctcagctgcactccaaaagctgagcagccacttacagccacgggtccccgagcatagcaataataagatgaagaacttatcttaccctttcagccgggagaagatgtacctctataacatccaggagaaagataccttcttcgacaacgcaacgcgctcccgtatagtgcacgaaattctaaagcggactgcctgcagccgggccaataacaccatggggatcaactccttgatcgcaaacaacatctatgaggccgcgtatcccttgcacgatggggagtacgatagcccggaggacgatatgaatgacagaaagctgctgtaccaggagtgggctaggtatggcgtcttctataaattccaaccaattgaccttatacggaaatactttggcgagaagatcggcttgtactttgcttggctggggctttatacatcctttctgataccatcctccgttattggagtgattgtgttcctttacggctgcgccaccatcgaggaggacatcccatctagagaaatgtgcgatcaacagaacgctttcaccatgtgcccgctttgcgacaagtcgtgtgactactggaacctttcctccgcctgcgggaccgcacaagcatcccatttatttgacaaccctgcaacagtgttcttcagcatcttcatggctctctgggctacaatgtttttagagaactggaagcgcctgcagatgcgcctgggttatttttgggaccttacgggaatcgaagaggaagaggaaagagcacaggagcactctcgccctgagtatgagaccaaagtacgtgagaaaatgctgaaggagtctaatcaaagtgccgtgcaaaaactggagaccaacactactgaatgcggggatgaggacgacgaggacaagctgacctggaaagaccgcttccccggctatttaatgaactttgctagtatcctcttcatgattgcactcacattcagcatcgtcttcggggtcattgtatatcgtatcacgaccgcggccgcactgtcccttaacaaggctacgagatcaaacgtaagggtaactgtgaccgcaactgctgtgataatcaatctggtggttatactgattttagacgaaatctacggagcagtagctaaatggctcactaagattgaagtccctaagacagaacagaccttcgaagaaaggctcattctgaaggcgttcctgcttaagttcgtaaacgcctattcgcccatcttttacgtggctttcttcaaaggacggtttgtcggtcgccctggaagctatgtgtacgtctttgatggctacagaatggaggaatgcgctcccggaggatgcttaatggagctttgtatccagctgtccataatcatgctggggaagcagctgatccaaaataacattttcgaaattggtgtccccaaattaaaaaaacttttcaggaagcttaaggatgagaccgaagccggggagacagattctgcccactctaaacatcccgaacagtgggatctggactacagtctagagccttacacagggttgaccccggaatatatggaaatgatcatccagttcggcttcgtaaccctgtttgtggcttcattccctctggcacccgtcttcgccctgctcaataatgtgattgaagtaagactggatgcgaaaaaattcgtgacagaactgcggcgacctgatgcggtcagaactaaggacataggcatctggttcgatatacttagtggcattggcaaatttagtgtaatcagtaacgcgtttgttatcgctattactagcgactttattcctagactggtgtatcagtactcttactctcacaatgggacactgcacgggttcgtaaaccatacactaagcttctttaacgtgtcccagcttaaagagggcacacaacccgaaaacagccagtttgaccaggaagtacagttctgtaggtttaaggactaccgtgagccaccctgggctcccaatccctacgagttttccaagcagtactggttcatcctgtcagcaagactggcatttgtgatcatatttcagaatcttgttatgtttctctctgtcttggtggactggatgattccagacattcccaccgacatctccgatcagattaagaaggagaaaagcctgttggtggatttctttctcaaggaagaacacgaaaagctcaagttaatggacgagccagctcttcggtctcctggcgggggggatcgtagcagatcaagagccgcttcaagcgctcctagcgggcagtcacagcttggtagtatgatgtcgtccgggtcccagcataccaacgtgtag

SEQ ID NO: 98735 - DNA, 3012 bp, Artificial Sequence
  derived and/or modified sequence
atggccaccccaggcccccgggacatccccctgctgcccggcagcccccggcggctgagcccccaggccggcagcagaggaggccagggccccaagcacggccagcagtgcctgaagatgcctggcccccgggcccctggcctgcagggcggcagcaacagagaccccggccagccctgtggcggggagagcaccaggagcagcagcgtcatcaacaactacctggatgccaatgaacctgtgtccctggaggcccggctgagcaggatgcacttccatgacagccagaggaaggtggactatgtgctggcctaccactacaggaagaggggcgtgcacctggcccagggcttccctggccacagcctggccatcgtgtccaatggagaaacaggcaaggagccccatgctgggggccctggggacatcgagctgggccccctggatgccctggaggaggagaggaaggagcagcgggaggagtttgagcacaacctgatggaggccggcctggagctggagaaggacctggagaacaagagccagggcagcatctttgtgcgcatccacgccccctggcaggtgctggcccgggaggccgagttcctgaagatcaaggtgcccaccaagaaggagatgtatgagatcaaggccggcggcagcatcgccaagaagttctctgctgccctgcagaagctgagcagccacctgcagccccgggtgcctgagcacagcaacaacaagatgaagaacctgagctaccccttcagccgggagaagatgtacctgtacaacatccaggagaaggacaccttctttgacaatgccaccaggagcagaattgtgcatgagatcctgaagaggacagcctgcagccgggccaacaacaccatgggcatcaacagcctcatcgccaacaacatctatgaagctgcctaccccctgcatgatggagaatatgacagcccagaagatgacatgaatgacaggaagctgctgtaccaggagtgggcccgctatggagtcttctacaagttccagcccatcgacctgatcaggaagtactttggagagaagattggcctgtactttgcctggctgggcctgtacaccagcttcctgatccccagcagcgtcatcggcgtgattgtgttcctgtatggctgtgccaccatcgaggaggacatccccagccgggagatgtgtgaccagcagaatgccttcaccatgtgccccctgtgtgacaagagctgtgactactggaacctgagcagcgcctgtggcacagcccaggccagccacctgtttgacaacccagccaccgtcttcttcagcatcttcatggccctgtgggccaccatgttcctggagaactggaagaggctgcagatgaggctgggctacttctgggacctgactggaattgaggaggaggaggagcgggcccaggagcacagcaggccagaatatgagaccaaggtgcgggagaagatgctgaaggagagcaaccagagcgctgtgcagaagctggagaccaacaccacagaatgtggagatgaagatgatgaggacaagctgacctggaaggaccgcttccctggctacctgatgaactttgccagcatcctcttcatgattgccctgaccttcagcatcgtgtttggagtgattgtgtaccgcatcaccacagctgctgccctgagcctgaacaaggccaccaggagcaatgtgcgggtgacagtgacagccacagctgtgatcatcaacctggtggtgatcctgatcctggatgagatctacggggctgtggccaagtggctgaccaagattgaggtgcccaagacagagcagacctttgaggagcggctcatcctgaaggccttcctgctgaagtttgtgaatgcctacagccccatcttctacgtggccttcttcaagggccgctttgtgggccggcccggcagctatgtgtatgtgtttgatggctacaggatggaggagtgtgcccctgggggctgcctgatggagctgtgcatccagctgagcatcatcatgctgggcaagcagctgatccagaacaacatctttgaaattggagtgcccaagctgaagaagctgttcaggaagctgaaggatgaaacagaggccggggagacagattctgcccacagcaagcaccctgagcagtgggacctggactacagcctggagccctacacaggcctgaccccagagtacatggagatgatcatccagtttggatttgtgaccctgtttgtggccagcttccccctggcccctgtgtttgccctgctgaacaacgtcatcgaggtgcggctggatgccaagaagtttgtgacagagctgcggcggccagatgctgtgaggaccaaggacatcggcatctggtttgacatcctgagcggcatcggcaagttcagcgtcatcagcaatgccttcgtcatcgccatcaccagtgacttcatcccccggctggtgtaccagtacagctacagccacaacggcaccctgcacggctttgtgaaccacaccctgtccttcttcaacgtgtcccagctgaaggagggcacccagcctgagaacagccagtttgaccaggaggtgcagttctgccgcttcaaggactaccgggagcccccctgggcccccaacccctatgagttcagcaagcagtactggttcatcctgagcgcccggctggcctttgtgatcatcttccagaacctggtgatgttcctgtctgtgctggtggactggatgatcccagacatccccacagacatcagtgaccagatcaagaaggagaagagcctgctggtggacttcttcctgaaggaggagcacgagaagctgaagctgatggatgagcccgccctgcggagccctgggggcggggacaggagccgcagcagagctgccagcagcgcccccagcggccagagccagctgggctccatgatgagcagcggcagccagcacaccaacgtgtag

SEQ ID NO: 98736 - DNA, 3012 bp, Artificial Sequence
  derived and/or modified sequence
atggccacccccggcccccgggacatccccctgctgcccggcagcccacgcagactgagcccacaggctggctcacgtggtggccagggtccgaaacacggccagcagtgcctcaaaatgcctggaccaagagctccaggcctgcagggtggatccaaccgcgatccagggcagccctgcgggggagaatctacgaggtcctcatcagttattaataattatctcgatgctaacgaacctgtcagtctcgaggctaggttgagcaggatgcactttcacgacagccagagaaaggtagattatgtgttggcgtaccattacagaaaaaggggcgtgcatctggcccagggttttccaggccattctctggccatcgtttcgaacggagagacaggaaaggaaccgcacgccggagggcctggagatattgaactaggaccactggacgccctggaggaagaacgcaaagagcagcgcgaagagtttgagcacaacctgatggaagcaggcttagagttggagaaagatttggagaacaaaagtcagggatccatctttgtaagaattcacgctccctggcaggtgcttgcacgcgaggccgagttcctcaagatcaaggttcccacaaaaaaggagatgtacgaaattaaggcaggaggatctattgcgaagaaattctcagccgcgttgcagaaactgtcctcacacctgcagccaagggtcccggaacattctaacaacaagatgaagaacctaagctacccgttttcccgtgagaaaatgtacctctataacatccaggaaaaagataccttttttgataatgcaactaggagccgaattgtacacgagatactgaagaggactgcatgctccagagcgaacaatacgatgggcataaactctctgattgctaataatatctacgaagccgcttatccactgcacgatggcgagtatgattccccggaagatgacatgaacgacagaaagttgctgtatcaggaatgggcgagatacggcgtgttttataagttccagccaatcgacctcattcggaagtatttcggagaaaaaatcggcctgtatttcgcttggctcggcctgtacacatcctttttaataccaagttcggtgataggcgtgattgttttcctgtatggctgtgccactatcgaggaggatattccgtcccgcgagatgtgcgatcagcagaacgccttcactatgtgccccttatgtgataagagctgtgattactggaacctcagtagtgcctgcgggaccgcccaggcaagtcacttatttgataacccagctacggtctttttctctattttcatggccctctgggctaccatgttcttagagaactggaagcgcttgcaaatgcgcctgggttatttttgggatctgactggtatcgaagaagaggaggaaagagctcaggaacatagccgtccagagtacgaaactaaggtaagagagaagatgctgaaggaatcaaaccagtccgcggtccaaaaattggaaacaaacacaacagaatgtggcgacgaagacgatgaggacaagctgacctggaaggatagattccctggctatctgatgaatttcgcctccatcctcttcatgattgctctcactttctcaatcgtctttggagtgatagtgtacaggatcactacagctgctgctctcagcctcaataaagctacaaggagtaatgtccgcgtgactgttaccgcaaccgccgtcatcatcaacctggtggttatattgatcctcgatgagatttacggggccgtcgccaaatggttgaccaagatcgaagtccccaagactgagcagaccttcgaagagcgcttaattcttaaagccttcctactgaagttcgtgaatgcctacagccctattttttacgttgctttctttaaaggccgtttcgtgggcagacccggcagctatgtgtatgttttcgatggttatcgcatggaagaatgtgcaccaggcggatgtcttatggaactatgtattcagctgtcgataattatgctggggaaacagcttatacagaacaacatcttcgagattggtgtgcccaagctaaagaagctgtttcggaagctgaaggatgagaccgaggcaggtgagactgactcagcccacagtaagcaccccgaacagtgggatcttgactattccctggagccttacactggtctgactcccgaatacatggaaatgattattcagtttggcttcgtcacactgttcgtcgcatcctttccactagcaccggtgttcgccctcctgaacaacgtgatcgaggttagactggacgctaaaaagttcgttactgagttacggcgacctgatgctgtgagaaccaaggacatcggaatctggttcgacattctgtcaggcataggcaaattctccgtgatttctaacgccttcgtgattgccatcacttccgacttcattcctaggctggtctatcagtattcatatagccataatggaaccctgcacgggttcgttaaccacacgctgagcttctttaacgtgagtcaattgaaggagggcactcagccagagaattcccagttcgaccaggaagtgcaattctgtagatttaaagactacagggagcccccttgggcgcctaatccttatgaattttcaaagcagtactggttcattctttccgctagactagcgttcgtcatcatatttcagaatctagttatgtttctgtccgtgctggtggactggatgatacctgacataccgaccgacatttcggaccagatcaagaaagaaaagtcactcctggtggacttctttctgaaagaggagcatgaaaaacttaagctcatggatgaacccgcattgcggtcaccgggcggaggcgaccggagccggtccagggccgctagttctgcccctagcggccagagccaactgggaagcatgatgtccagtggtagtcagcataccaacgtttag

SEQ ID NO: 98737 - DNA, 3012 bp, Artificial Sequence
  derived and/or modified sequence
atggctacgcccggacctcgggatatcccactgcttcccggatcccctagaagactcagtcctcaggcagggtccaggggcggtcaaggacctaagcatggccagcagtgtttaaagatgccagggccacgggcacccggtttacagggtgggtcaaaccgagatccgggacagccgtgcggtggggaaagtacccgatcatcctctgtgattaataattaccttgacgccaacgagccagtgagcctggaggccagactgagtcgcatgcatttccatgacagccaaagaaaggttgattatgtgctggcctatcactatcgtaaaagaggtgtccacctggcccagggcttcccaggtcattcactcgctatcgtctctaacggcgagaccgggaaagagcctcatgccggagggccaggggacatcgagttggggccactggatgcactcgaggaggagcggaaagagcagcgggaggagttcgagcataacctgatggaggctgggcttgaactggaaaaggatctggaaaataaaagtcaaggttccatctttgtcagaatccacgcaccctggcaggtcttggcaagggaagcagagttcctcaagatcaaggtccccactaaaaaggagatgtatgagattaaagctggcggtagcattgctaagaagttctccgctgccttgcaaaagttaagcagtcacttgcagccacgggtacccgaacattccaacaataagatgaaaaatctcagctatccatttagtcgagagaaaatgtacctctataacattcaggaaaaggacacattcttcgataacgccacgcgcagtcgaattgtgcacgagattttgaagagaaccgcatgttctcgggctaataacaccatgggcatcaactctttaattgctaacaacatatatgaggccgcttatcccctgcacgatggggagtatgactctcctgaggatgacatgaatgacaggaagcttctctaccaggagtgggccagatacggtgtattctacaagtttcagcccatcgacctgatccgcaagtacttcggggagaagattgggttatattttgcctggcttggattgtatacatcattcttgattccctctagcgttataggtgtgattgttttcctgtatggatgcgccacgatcgaggaggatattccttcacgggagatgtgcgatcagcagaacgccttcaccatgtgtcctttatgtgataaatcttgcgactactggaacctcagctctgcatgcggcactgcccaagcctctcacttatttgacaacccagccactgtattctttagcatctttatggctctttgggccacaatgtttctagaaaactggaagagattacaaatgaggctgggatatttctgggaccttacagggattgaagaggaggaagagcgtgcacaggaacacagtcgacctgaatatgaaaccaaggttagagaaaaaatgctgaaggaaagcaaccagtccgccgtccaaaagctggagaccaacacgacagaatgtggggacgaggatgacgaagataagttaacgtggaaagacagatttcctggataccttatgaatttcgcctccattctttttatgatcgccctcaccttttccatcgtgttcggcgttatcgtgtatagaatcaccaccgctgccgcactgagtctgaacaaagctacacgcagtaacgtgagagtcacagtcactgcaaccgcagtgattatcaatctggttgtcattttgattctcgacgaaatctatggagccgtggcaaagtggcttaccaaaatcgaggtccccaagacagagcaaacgtttgaggagagacttatactcaaggctttcctgctgaagtttgtgaatgcatatagcccaatattctatgtcgcgtttttcaagggccgttttgttggcaggcctgggagctatgtctacgtcttcgacggatatcgaatggaagagtgtgctcctggcggttgtctgatggagttgtgtattcaactgagtattatcatgttaggtaaacagcttatccagaacaacatttttgaaatcggagtccccaaactcaaaaagctcttcagaaagctaaaggatgaaacggaagccggagaaacagattcagcccattccaagcatcccgagcaatgggatctcgactattcacttgagccatataccggactcaccccagaatatatggagatgattatccagtttggctttgttacactgtttgtggccagtttccccttagctccagtcttcgccctgctgaacaacgtgatagaggtgcgcctagatgctaagaagttcgtcaccgagctgaggaggcccgatgctgtcaggactaaggacatcggaatctggttcgatatcctgtctggaatcggaaagttctctgtgatcagtaatgcctttgtaatcgccattacatctgacttcattcccagactcgtgtaccagtactcatattcccataatggaacactgcacgggtttgtcaatcacaccctcagcttcttcaatgtgtctcaactaaaggaaggcacacagcccgagaatagccagttcgaccaggaggtccagttttgcaggtttaaggattaccgcgagcccccttgggcaccaaacccatacgagttctctaaacaatactggttcatcttatctgcgcgactggcgttcgtcatcatcttccaaaaccttgttatgttcctgtcggtgttggtggattggatgatccccgacatcccaaccgacatctccgatcagatcaagaaggaaaaaagcctcctggtagacttttttctcaaggaggaacacgaaaagctgaagctgatggatgagcctgctctccgcagcccaggcggaggtgataggtcacggtcaagggcagcctcatcggcgccatctggtcagtcccagctcggtagcatgatgtcttctggctctcagcatactaacgtatag

SEQ ID NO: 98738 - DNA, 3673 bp, Artificial Sequence
  derived and/or modified sequence
ggtctgcgtccacatcatggcgactcccgggccgcgcgatatacccctgctccctggctccccacgccggctgagccctcaggcagggtccagagggggccagggccccaaacatggacagcagtgtctcaagatgccaggtccccgggccccaggtctgcagggcggttccaacagagatcctggccagccctgcggtggagagagcacccgcagcagctctgtcatcaacaactatctggatgccaatgagcctgtgtccttggaggcccgtcttagccgcatgcacttccatgacagtcagaggaaggtcgactatgtacttgcctaccactaccggaaacgcggggtgcacctggcccaaggcttccctggccactcgctggctatcgtctccaatggggagacaggcaaggagcctcatgctgggggcccaggtgacattgagctgggaccgctcgatgccctggaggaggagaggaaggagcagcgggaggaatttgagcacaatctgatggaggctggactggagcttgagaaggacttggagaataaaagccagggatccatctttgtccggatacacgccccgtggcaggtgctggccagagaggcagaattcttgaagatcaaagttcctaccaagaaagagatgtacgagatcaaagcaggaggcagcattgcaaagaagttcagcgcggctctgcagaagctgagctcgcacctgcagccccgagttccagaacacagcaacaacaagatgaaaaacctctcctacccattctccagggagaagatgtacctgtacaacatccaggaaaaggacaccttctttgataatgccacccgcagccgcattgtgcacgagatcctgaagcgcacagcctgctcccgagccaacaacacgatgggtattaactctctgatcgcaaacaatatctatgaggctgcctaccctcttcatgacggtgaatacgatagtccagaggacgatatgaatgacaggaagctgctatatcaagaatgggcgcgctatggagtgttctataagttccaacctattgacctcatcagaaagtattttggagaaaaaattggactgtattttgcctggctgggattatatacatcattcctcatcccatcttctgtaattggagtgattgtgtttctttatggatgtgcaacaattgaagaagatattcccagcagagagatgtgtgaccagcagaatgccttcaccatgtgtcccctgtgtgacaagtcctgtgattactggaacctcagctcagcctgtgggaccgcgcaggccagccacctgtttgacaaccctgccaccgtcttcttctctatcttcatggctctgtgggctaccatgttcctggaaaactggaagaggctacagatgcgactgggctacttttgggacctgactggcatagaagaggaagaagaacgtgcccaggaacattccaggcctgagtatgaaaccaaagttcgagagaaaatgctaaaggagagcaaccagtctgctgtccagaaattggaaacaaacacgacggagtgtggcgatgaggatgatgaagataaactgacctggaaggatcgtttcccaggttacctgatgaactttgcctccatcttattcatgattgccctgacattctcaatcgtctttggggtgatagtgtatcgaataacaactgcagccgctctgtctctcaataaggctacacgctccaatgtccgggtgacagtgacagcaacagcagtcatcatcaacctcgtggtcatcctcatcctggacgagatctacggcgctgtggccaagtggctcaccaaaattgaggttccgaaaacagaacagacttttgaagagcgcctgatcctcaaagctttcttgctcaagtttgtcaatgcctactcccccatcttctatgtggcctttttcaaagggaggtttgtgggcaggcctggaagctacgtctatgtattcgatggttaccgcatggaagagtgtgctccagggggctgtctcatggagctctgcattcagctcagcatcatcatgttggggaagcagttgatccagaacaacatctttgagattggagtcccgaagctaaagaaactatttcgaaagctgaaagatgagaccgaagctggagaaactgactctgcccattcgaaacatccagagcagtgggacctagactacagcttggaaccatacacaggactgactccggagtacatggaaatgatcatccagtttggttttgtcaccctcttcgtggcctcctttcccctggcacctgtgtttgccctcctcaacaacgtcattgaagtgcggctcgatgcaaagaagtttgttacagagctgagacggccggatgctgtaagaaccaaagatatcggaatctggtttgacattctctctggaattggcaagttctctgttatcagcaacgcttttgtcattgcgatcacctccgactttatcccccgcctggtgtaccagtactcctacagtcacaatgggactctgcacggctttgtcaaccacaccctctcctttttcaacgtcagccagctgaaggaggggacgcagccagaaaactcacagtttgaccaggaggttcagttctgcaggtttaaggattaccgagagccgccatgggccccgaacccttatgagttttcgaaacagtactggtttattctgtccgcccgtctggcttttgtcataatcttccagaacctcgtgatgttcctgagcgtcctcgtggactggatgattccagacatccccacggacatcagcgaccagatcaagaaagagaagagcttattagtggatttcttcctgaaagaggagcatgagaagctcaagctgatggatgagccggctctgaggagcccaggaggtggggatcgaagcaggagccgggcagccagctcagcaccttcaggccaaagccagctgggcagcatgatgtcgtcaggctctcagcacaccaatgtgtgagcagttcagcctgcagcagaggagggcacggcagcagagacacgcacatgcacgtaagcatgttcctacacccacatggcgtgctgtctgtctgcaggggcctggcttgatggggtcttgaagagggggcagtgtgtaaaaagaaagagcctgacagaatgagtgtaggaaggaagagaaatgatgctacatctcagaaacttcaagcttaagtttcttttaggtccccttttaagctgcatccttttgagggattggaaccccactggggtctctccaccccagagtctcaggcaccgcgagcattcccatgtaccctggggcaccctcttgtacttcaccatcatttctgactttgaccagctgtaagagaaatgcagtcaggagcacagcatcccctacttactatcactacaagaaaactgagtcacttgcagtggggctgccacagtctcagcagatgcaaattaagttacaaggctgaatggtgcagccgctggacctgatagtaaggtgcaaaggtccaaacctgggcttgtctccacttcacgtcacaaaaacgtttggagctaaatgcagataaccatcattttatgaaagttcagatttaaaataataaaataaatggacacattctttataaag

SEQ ID NO: 98739 - DNA, 3012 bp, Artificial Sequence
  derived and/or modified sequence
atggccacccccggccccagagacatccccctgctgcccggcagccccagaagactgagcccccaggccggcagcagaggcggccagggccccaagcacggccagcagtgcctgaagatgcccggccccagagcccccggcctgcagggcggcagcaacagagaccccggccagccctgcggcggcgagagcaccagaagcagcagcgtgatcaacaactacctggacgccaacgagcccgtgagcctggaggccagactgagcagaatgcacttccacgacagccagagaaaggtggactacgtgctggcctaccactacagaaagagaggcgtgcacctggcccagggcttccccggccacagcctggccatcgtgagcaacggcgagaccggcaaggagccccacgccggcggccccggcgacatcgagctgggccccctggacgccctggaggaggagagaaaggagcagagagaggagttcgagcacaacctgatggaggccggcctggagctggagaaggacctggagaacaagagccagggcagcatcttcgtgagaatccacgccccctggcaggtgctggccagagaggccgagttcctgaagatcaaggtgcccaccaagaaggagatgtacgagatcaaggccggcggcagcatcgccaagaagttcagcgccgccctgcagaagctgagcagccacctgcagcccagagtgcccgagcacagcaacaacaagatgaagaacctgagctaccccttcagcagagagaagatgtacctgtacaacatccaggagaaggacaccttcttcgacaacgccaccagaagcagaatcgtgcacgagatcctgaagagaaccgcctgcagcagagccaacaacaccatgggcatcaacagcctgatcgccaacaacatctacgaggccgcctaccccctgcacgacggcgagtacgacagccccgaggacgacatgaacgacagaaagctgctgtaccaggagtgggccagatacggcgtgttctacaagttccagcccatcgacctgatcagaaagtacttcggcgagaagatcggcctgtacttcgcctggctgggcctgtacaccagcttcctgatccccagcagcgtgatcggcgtgatcgtgttcctgtacggctgcgccaccatcgaggaggacatccccagcagagagatgtgcgaccagcagaacgccttcaccatgtgccccctgtgcgacaagagctgcgactactggaacctgagcagcgcctgcggcaccgcccaggccagccacctgttcgacaaccccgccaccgtgttcttcagcatcttcatggccctgtgggccaccatgttcctggagaactggaagagactgcagatgagactgggctacttctgggacctgaccggcatcgaggaggaggaggagagagcccaggagcacagcagacccgagtacgagaccaaggtgagagagaagatgctgaaggagagcaaccagagcgccgtgcagaagctggagaccaacaccaccgagtgcggcgacgaggacgacgaggacaagctgacctggaaggacagattccccggctacctgatgaacttcgccagcatcctgttcatgatcgccctgaccttcagcatcgtgttcggcgtgatcgtgtacagaatcaccaccgccgccgccctgagcctgaacaaggccaccagaagcaacgtgagagtgaccgtgaccgccaccgccgtgatcatcaacctggtggtgatcctgatcctggacgagatctacggcgccgtggccaagtggctgaccaagatcgaggtgcccaagaccgagcagaccttcgaggagagactgatcctgaaggccttcctgctgaagttcgtgaacgcctacagccccatcttctacgtggccttcttcaagggcagattcgtgggcagacccggcagctacgtgtacgtgttcgacggctacagaatggaggagtgcgcccccggcggctgcctgatggagctgtgcatccagctgagcatcatcatgctgggcaagcagctgatccagaacaacatcttcgagatcggcgtgcccaagctgaagaagctgttcagaaagctgaaggacgagaccgaggccggcgagaccgacagcgcccacagcaagcaccccgagcagtgggacctggactacagcctggagccctacaccggcctgacccccgagtacatggagatgatcatccagttcggcttcgtgaccctgttcgtggccagcttccccctggcccccgtgttcgccctgctgaacaacgtgatcgaggtgagactggacgccaagaagttcgtgaccgagctgagaagacccgacgccgtgagaaccaaggacatcggcatctggttcgacatcctgagcggcatcggcaagttcagcgtgatcagcaacgccttcgtgatcgccatcaccagcgacttcatccccagactggtgtaccagtacagctacagccacaacggcaccctgcacggcttcgtgaaccacaccctgagcttcttcaacgtgagccagctgaaggagggcacccagcccgagaacagccagttcgaccaggaggtgcagttctgcagattcaaggactacagagagcccccctgggcccccaacccctacgagttcagcaagcagtactggttcatcctgagcgccagactggccttcgtgatcatcttccagaacctggtgatgttcctgagcgtgctggtggactggatgatccccgacatccccaccgacatcagcgaccagatcaagaaggagaagagcctgctggtggacttcttcctgaaggaggagcacgagaagctgaagctgatggacgagcccgccctgagaagccccggcggcggcgacagaagcagaagcagagccgccagcagcgcccccagcggccagagccagctgggcagcatgatgagcagcggcagccagcacaccaacgtgtag

SEQ ID NO: 98740 - protein, 998 aa, Artificial Sequence
  derived and/or modified sequence
MPEDIPLLPGSPRRLSPQAGSRGGQGPKHGQQCLKMPGPRAPGLQGGSNRDPGQPCGGESTRSSSVINNYLDANEPVSLEARLSRMHFHDSQRKVDYVLAYHYRKRGVHLAQGFPGHSLAIVSNGETGKEPHAGGPGDIELGPLDALEEERKEQREEFEHNLMEAGLELEKDLENKSQGSIFVRIHAPWQVLAREAEFLKIKVPTKKMYEIKAGGSIAKKFSAALQKLSSHLQPRVPEHSNNKMKNLSYPFSREKMYLYNIQEKDTFFDNATRSRIVHEILKRTACSRANNTMGINSLIANNIYEAAYPLHDGEYDSPEDDMNDRKLLYQEWARYGVFYKFQPIDLIRKYFGEKIGLYFAWLGLYTSFLIPSSVIGVIVFLYGCATIEEDIPSREMCDQQNAFTMCPLCDKSCDYWNLSSACGTAQASHLFDNPATVFFSIFMALWATMFLENWKRLQMRLGYFWDLTGIEEEEERAQEHSRPEYETKVREKMLKESNQSAVQKLETNTTECGDEDDEDKLTWKDRFPGYLMNFASILFMIALTFSIVFGVIVYRITTAAALSLNKATRSNVRVTVTATAVIINLVVILILDEIYGAVAKWLTKIEVPKTEQTFEERLILKAFLLKFVNAYSPIFYVAFFKGRFVGRPGSYVYVFDGYRMEECAPGGCLMELCIQLSIIMLGKQLIQNNIFEIGVPKLKKLFRKLKDETEAGETDSAHSKHPEQWDLDYSLEPYTGLTPEYMEMIIQFGFVTLFVASFPLAPVFALLNNVIEVRLDAKKFVTELRRPDAVRTKDIGIWFDILSGIGKFSVISNAFVIAITSDFIPRLVYQYSYSHNGTLHGFVNHTLSFFNVSQLKEGTQPENSQFDQEVQFCRFKDYREPPWAPNPYEFSKQYWFILSARLAFVIIFQNLVMFLSVLVDWMIPDIPTDISDQIKKEKSLLVDFFLKEEHEKLKLMDEPALRSPGGGDRSRSRAASSAPSGQSQLGSMMSSGSQHTNV

SEQ ID NO: 98741 - protein, 999 aa, Artificial Sequence
  derived and/or modified sequence
MPEDIPLLPGSPRRLSPQAGSRGGQGPKHGQQCLKMPGPRAPGLQGGSNRDPGQPCGGESTRSSSVINNYLDANEPVSLEARLSRMHFHDSQRKVDYVLAYHYRKRGVHLAQGFPGHSLAIVSNGETGKEPHAGGPGDIELGPLDALEEERKEQREEFEHNLMEAGLELEKDLENKSQGSIFVRIHAPWQVLAREAEFLKIKVPTKKEMYEIKAGGSIAKKFSAALQKLSSHLQPRVPEHSNNKMKNLSYPFSREKMYLYNIQEKDTFFDNATRSRIVHEILKRTACSRANNTMGINSLIANNIYEAAYPLHDGEYDSPEDDMNDRKLLYQEWARYGVFYKFQPIDLIRKYFGEKIGLYFAWLGLYTSFLIPSSVIGVIVFLYGCATIEEDIPSREMCDQQNAFTMCPLCDKSCDYWNLSSACGTAQASHLFDNPATVFFSIFMALWATMFLENWKRLQMRLGYFWDLTGIEEEEERAQEHSRPEYETKVREKMLKESNQSAVQKLETNTTECGDEDDEDKLTWKDRFPGYLMNFASILFMIALTFSIVFGVIVYRITTAAALSLNKATRSNVRVTVTATAVIINLVVILILDEIYGAVAKWLTKIEVPKTEQTFEERLILKAFLLKFVNAYSPIFYVAFFKGRFVGRPGSYVYVFDGYRMEECAPGGCLMELCIQLSIIMLGKQLIQNNIFEIGVPKLKKLFRKLKDETEAGETDSAHSKHPEQWDLDYSLEPYTGLTPEYMEMIIQFGFVTLFVASFPLAPVFALLNNVIEVRLDAKKFVTELRRPDAVRTKDIGIWFDILSGIGKFSVISNAFVIAITSDFIPRLVYQYSYSHNGTLHGFVNHTLSFFNVSQLKEGTQPENSQFDQEVQFCRFKDYREPPWAPNPYEFSKQYWFILSARLAFVIIFQNLVMFLSVLVDWMIPDIPTDISDQIKKEKSLLVDFFLKEEHEKLKLMDEPALRSPGGGDRSRSRAASSAPSGQSQLGSMMSSGSQHTNV

SEQ ID NO: 98742 - protein, 999 aa, Artificial Sequence
  derived and/or modified sequence
MPEDIPLLPGSPRRLSPQAGSRGGQGPKHGQQCLKMPGPRAPGLQGGSNRDPGQPCGGESTRSSSVINNYLDANEPVSLEARLSRMHFHDSQRKVDYVLAYHYRKRGVHLAQGFPGHSLAIVSNGETGKEPHAGGPGDIELGPLDALEEERKEQREEFEHNLMEAGLELEKDLENKSQGSIFVRIHAPWQVLAREAEFLKIKVPTKKEMYEIKAGGSIAKKFSAALQKLSSHLQPRVPEHSNNKMKNLSYPFSREKMYLYNIQEKDTFFDNATRSRIVHEILKRTACSRANNTMGINSLIANNIYEAAYPLHDGEYDSPEDDMNDRKLLYQEWARYGVFYKFQPIDLIRKYFGEKIGLYFAWLGLYTSFLIPSSVIGVIVFLYGCATIEEDIPSREMCDQQNAFTMCPLCDKSCDYWNLSSACGTAQASHLFDNPATVFFSIFMALWATMFLENWKRLQMRLGYFWDLTGIEEEEPRVQEHSRPEYETKVREKMLKESNQSAVQKLETNTTECGDEDDEDKLTWKDRFPGYLMNFASILFMIALTFSIVFGVIVYRITTAAALSLNKATRSNVRVTVTATAVIINLVVILILDEIYGAVAKWLTKIEVPKTEQTFEERLILKAFLLKFVNAYSPIFYVAFFKGRFVGRPGSYVYVFDGYRMEECAPGGCLMELCIQLSIIMLGKQLIQNNIFEIGVPKLKKLFRKLKDETEAGETDSAHSKHPEQWDLDYSLEPYTGLTPEYMEMIIQFGFVTLFVASFPLAPVFALLNNVIEVRLDAKKFVTELRRPDAVRTKDIGIWFDILSGIGKFSVISNAFVIAITSDFIPRLVYQYSYSHNGTLHGFVNHTLSFFNVSQLKEGTQPENSQFDQEVQFCRFKDYREPPWAPNPYEFSKQYWFILSARLAFVIIFQNLVMFLSVLVDWMIPDIPTDISDQIKKEKSLLVDFFLKEEHEKLKLMDEPALRSPGGGDRSRSRAASSAPSGQSQLGSMMSSGSQHTNV

SEQ ID NO: 98743 - DNA, 2997 bp, Artificial Sequence
  derived and/or modified sequence
atgccagaagatatccccctgctgccggggtcacccagacggctctcgccacaagccggctccaggggcggtcagggacctaagcatggacaacaatgtttaaagatgccaggacctagagcgccaggcctgcagggcggatctaatagggatcccggccagccgtgcggtggggagagcacccggagcagcagtgtgattaacaactacttggacgccaacgagcccgtctctttagaagcccggctgtctcggatgcactttcacgacagtcagagaaaggtggattacgtgttggcataccactatagaaagcggggcgtgcacttggctcagggcttcccagggcactccctggccatcgtatccaacggcgaaacaggcaaggagcctcacgccgggggtcctggtgatattgagctgggacctctggatgccctagaggaggagcgtaaggaacagcgcgaggagttcgaacacaatctgatggaagccggtctggagctggaaaaggatctggagaacaaatcccagggctccatcttcgtacggatccacgccccctggcaggtccttgccagggaggctgagttcctgaaaatcaaagtgcccacaaagaagatgtatgagataaaggcaggtgggagcatcgccaagaagttctcagctgctctgcagaagttaagttctcacctgcaaccgcgcgtgccggagcattctaacaacaagatgaaaaatctgtcctacccctttagcagggagaaaatgtatctctataacatccaagagaaggacactttcttcgacaatgccacacgatcaaggatcgtacatgagattctaaaacggactgcttgcagcagggcgaataatacgatgggcattaatagcctcattgcaaataacatctatgaggccgcttatcctctgcacgacggagagtacgatagtcctgaagatgatatgaatgatcgtaaactactttaccaggagtgggcccggtacggggtgttctataagttccaaccaatcgacttaatccgcaagtacttcggcgaaaagatcggcctatacttcgcctggctcggtctgtatacatctttcttgattccttcaagcgtaattggcgtgattgtctttctgtacggctgtgcgactatcgaggaagacataccatcaagggaaatgtgcgaccagcagaatgcttttacgatgtgccctctatgcgacaaatcctgcgactactggaacctgtctagcgcctgtgggaccgcccaagcaagccatttattcgacaatcccgccactgtgttctttagtatcttcatggccctctgggccacaatgtttctggagaactggaagaggcttcagatgaggctcggctacttctgggatttgaccggcattgaagaagaagaggagagggctcaggagcactcacgacccgaatacgaaacaaaagtccgagagaaaatgcttaaggagagcaatcagagtgccgtccagaaactggagaccaataccacagagtgtggcgacgaagacgacgaggataaattgacgtggaaagatcggtttcccgggtatctaatgaacttcgcctcaatcctgttcatgatcgcactaacatttagcattgtgtttggagtgatcgtgtacaggatcaccacggcggccgcactgtcgctcaacaaggctacccggtcaaacgttagagttaccgttaccgctaccgccgtcattattaatctggtagtgattctgatcttagatgaaatctacggcgctgtagctaaatggctgacaaagattgaggtccctaaaacagaacaaacttttgaggagcgtctgatactgaaagccttcctgctcaagttcgtcaatgcctacagcccgatcttttatgttgccttttttaaaggcaggtttgttgggcgacccggtagctatgtatatgtgtttgatggatatagaatggaagagtgcgcccctggaggctgcctgatggagctgtgcattcagctcagcataatcatgctcgggaagcagttaattcaaaataatatctttgagataggggtccccaaactgaaaaagctgtttagaaagctgaaggatgagaccgaagctggcgaaacggactccgcccattccaagcatcccgagcagtgggaccttgattatagccttgagccgtacaccggtttgacccccgagtatatggagatgatcatccaattcgggtttgtgactctgttcgtcgcttcattccccctggccccagtgtttgcacttttaaacaatgtaattgaagtgcggttggacgctaagaaatttgttacagaactccggcgccctgatgcagttcggacgaaggatatcggaatctggttcgatattctgtccggcatcggaaaattctccgtgatttccaacgcatttgtgatagctattacttctgattttatcccgcgcctggtgtatcagtatagctacagccacaacggcacccttcacggatttgtcaatcatactttatctttctttaatgtgagccaacttaaagaaggcacacaacccgagaattcccagttcgaccaggaagttcaattctgccggtttaaggattacagagaaccgccctgggccccgaacccttacgagttctctaaacaatactggttcattttgtctgctaggctggccttcgtcataatattccagaatctggtcatgttcctctcagtgctggtggactggatgatccccgacatcccaacagacatttcagatcaaattaagaaagagaaatcattactggtcgacttcttcctcaaggaggaacacgaaaagctgaagctaatggacgagcccgccctaagaagtcctggggggggagaccgcagccggtcccgtgctgccagcagcgcaccaagcgggcagtctcaactgggaagcatgatgtcgtctggttcccagcacactaacgtgtag

SEQ ID NO: 98744 - DNA, 3000 bp, Artificial Sequence
  derived and/or modified sequence
atgccagaagatatcccccttctcccgggaagtcctagacgactgagccctcaggcgggcagtcggggcggccagggtccgaaacatggacagcaatgcctcaagatgcctggacctcgtgctccaggcctacaaggtggcagtaatagagaccctgggcaaccttgcggtggggaatccacgagaagtagctccgtgataaacaactatctggatgccaatgagcctgtgtctctcgaagcaaggctctctaggatgcactttcatgattcccagcgcaaggtcgactacgttcttgcttatcactataggaaaagaggggttcacttggctcagggatttcccggtcacagcctggctatcgtgtccaacggggagacaggaaaagaaccacacgccggcggtccaggggacattgaactgggacctctagacgccttagaagaagaacgaaaggaacagcgcgaagagttcgaacacaatttaatggaggcgggcctcgagttggagaaggatctggaaaataagtctcaaggttccatctttgttcgtattcacgcgccctggcaggtccttgcgcgggaagcggaatttctgaagatcaaggtgcccacaaagaaggaaatgtacgagattaaagccggcggatcgatagcaaagaaattctctgctgctctgcagaagctctcaagtcatctccagcccagggtgcccgagcactctaataataaaatgaagaatctctcttacccattcagccgggaaaagatgtacttgtacaatatccaggagaaggataccttctttgacaacgccactaggtctaggatcgtccatgaaatcctgaagcgaactgcctgtagccgggcaaataatacaatgggcatcaattccctgatcgccaataacatctatgaagccgcttaccccctccacgacggtgagtatgacagccccgaggatgacatgaatgaccgtaagcttttgtatcaggagtgggcacgctatggggtgttctataagttccagcctattgacctgatcagaaagtattttggggagaagattggactatacttcgcctggttgggtctgtatacgagttttctgataccgtcctctgtgatcggcgtcatcgtgttcctgtatggatgcgccacaatcgaggaggatataccctctcgggagatgtgtgatcagcagaacgccttcactatgtgtccactttgcgacaagagttgtgattattggaatcttagttctgcatgcggtaccgcccaggccagccatcttttcgataacccggccaccgtcttcttcagtattttcatggccttatgggccacaatgtttttggaaaactggaagcgattgcaaatgaggttgggctacttttgggatttgaccggcatagaagaagaggaagagcgggctcaagaacactcacgaccagagtacgagactaaggtgagggagaagatgcttaaggagtcaaaccagtcagccgtccaaaaactcgaaacaaataccaccgagtgcggtgatgaggatgatgaggataagctgacttggaaggacaggtttcctggttacctgatgaacttcgccagcattctatttatgatagctctgacattcagcatcgtgttcggtgtaatcgtttatcggataacaaccgcggccgctctgagcttgaataaagccactcgcagcaacgtgagggtcactgtaaccgctacagcagtcatcatcaatcttgtggtgatactgatacttgacgaaatctacggcgcagtcgccaaatggctgacaaaaatcgaagtccccaagactgagcagacgtttgaagaaagactaattctaaaggcattccttctgaaattcgtgaacgcttactcgcctatcttctacgtggctttcttcaaagggaggttcgtggggcggcccggcagttatgtctacgtgttcgacgggtatcgcatggaagagtgcgcaccaggcgggtgtctcatggagctgtgcattcagctgtctattattatgttaggcaagcagctgatccagaataacatcttcgagatcggggtgccaaaactcaaaaaactcttccggaaactgaaggatgagaccgaagccggcgagaccgatagtgcccatagcaagcatcccgaacaatgggatctcgattactccctggaaccttatacagggctcaccccagaatacatggagatgattattcagttcggcttcgtcaccttgtttgtggctagcttccccctggctccagtgttcgctttactcaataatgtgatcgaggtgcggctcgatgcaaaaaaattcgtgacggaactgaggaggccagatgccgtgagaaccaaggacatcggaatatggttcgatatcctgagcggaattggcaagttctctgtcatatcaaacgcctttgtgatagccatcaccagcgatttcatcccccgattagtttatcagtatagctacagccacaatggtaccctgcacggattcgtcaaccatactctgagcttctttaacgtatcccagctgaaggaaggaacacagcctgagaactctcagtttgaccaggaagtgcaattctgtcgctttaaggattaccgagagcctccctgggcccccaacccatacgaattttctaaacaatactggttcatcctgagcgcacgcctggccttcgtgataatattccaaaatttagtaatgtttctgagcgtgctggtcgactggatgatccctgatattccaacagacatctctgatcagataaagaaggaaaaaagcctcttggtggatttttttctgaaggaggaacatgagaaattgaagcttatggatgagcccgccttgcggtctcctggggggggagaccgatcccgctccagagcagcctcgagcgcaccatctggccaaagccagctggggagtatgatgtcctcaggctctcagcacacaaacgtgtag

SEQ ID NO: 98745 - DNA, 3000 bp, Artificial Sequence
  derived and/or modified sequence
atgcccgaagatattcccctcttaccgggtagtccacgcaggctgagcccccaggcagggtcgaggggagggcagggcccgaagcacgggcagcagtgcctaaaaatgcccggaccccgagccccgggcctgcaaggcggctcgaaccgagaccccgggcagccgtgtggaggagagagcacaaggtcaagctcggtcatcaacaattatcttgacgccaacgaaccagtatccctggaggccaggctttctaggatgcactttcatgattcccagcgcaaagtagactacgttttagcctatcactacagaaagagaggtgtccacttggcccaggggtttcccgggcattcactggccattgtgtcaaatggcgaaaccggaaaggagccacacgccggaggaccgggagacattgagttgggaccactggacgccctggaagaggagcgcaaggaacagagggaggagttcgaacataatctcatggaggctgggctcgaactggagaaggacctcgaaaacaagtctcaggggagtatttttgttcggattcatgccccctggcaggtgctcgcccgcgaagctgagtttttaaaaatcaaagtgcctaccaaaaaggaaatgtacgaaattaaggccggcggtagcatagccaagaaattcagcgccgccctccagaagctgagtagccatctgcagccacgggtccctgaacactcaaacaataagatgaaaaacctatcttacccctttagcagagaaaaaatgtacctgtacaacatccaggaaaaagacactttttttgacaacgcaaccaggtctagaatcgtgcacgagatcttgaaaagaactgcctgtagtagggccaataatacaatgggcataaacagcctgattgctaacaacatctacgaggcggcctatcctctgcatgatggggagtatgattctccggaggacgacatgaatgaccgcaagctgctgtatcaggaatgggcccgatatggcgtgttttacaagtttcagcccattgatcttatccggaaatacttcggcgaaaagatcggtctctacttcgcctggctcggactgtacacaagtttcctaatcccttcaagcgtaatcggggttatcgtcttcctatacggatgtgccacgattgaggaggacattccttctagggagatgtgcgatcagcaaaacgccttcactatgtgcccactgtgtgacaagtcctgtgattactggaacctgagtagtgcgtgtggcaccgcccaggcctcacatcttttcgacaatccggcaaccgtcttctttagcatttttatggcattgtgggccaccatgttcctggaaaactggaagagattgcagatgcggctcggctacttctgggacctgacgggaattgaagaggaggaaccccgagtccaggaacattctcggccagagtacgaaacgaaggtccgcgaaaagatgctcaaggagtccaatcagtcagcggtccagaaactggagaccaacactactgagtgtggagatgaggatgacgaggataagctcacctggaaagataggttcccaggatacctgatgaacttcgctagtatactctttatgatcgcattgactttctcaattgtgtttggagttatcgtgtatcggatcactacggccgctgccctctcactaaataaggcaaccagaagcaacgtacgggtcaccgtaacagcaaccgccgtgatcattaacctggttgtaatccttattcttgatgagatttacggcgctgttgccaaatggctcaccaaaatagaagttcccaaaacggaacagaccttcgaggagcgtctgattcttaaggcttttctgctgaagttcgtaaacgcttactccccaatcttttatgtggctttctttaagggtagatttgtgggcagacccggctcttatgtgtatgtgtttgatggttacagaatggaggaatgtgctcctggagggtgcctcatggagttatgcatacaattgtcaatcatcatgctggggaagcaactgattcagaacaatatcttcgagataggagtacctaaattgaaaaaattgtttcggaagctcaaagatgaaaccgaagctggtgaaacagactcagcgcacagcaaacatcctgagcagtgggacctggattacagtctcgagccgtataccggactgacccctgaatatatggagatgatcatccaattcgggtttgtgacactgttcgtggcgagtttcccgttagcacccgtgtttgcgctgctcaataacgtgatcgaagttagactggacgccaagaagtttgttactgagctgcgtcgccctgacgcagtgagaactaaggatatagggatttggttcgacatcttgtcaggaattggaaaattttcagttattagtaacgcctttgtcattgccatcacgtctgattttattccacggctggtgtaccaatactcttacagccacaatggaacccttcacggatttgtgaatcatactctgtcattctttaacgtgtcccaattgaaagagggcacacaaccagaaaattcacaatttgaccaggaagtgcagttctgcagatttaaagactatagagagccgccctgggcccctaacccctatgaattttctaagcaatactggttcattctgtctgctcgcctcgccttcgtgataatcttccagaacttagttatgttcctctccgtgctcgtagattggatgattcccgacattccaaccgacattagtgaccagatcaagaaggagaaatccctcctcgtcgacttcttcctgaaagaagaacacgaaaagctgaaactgatggacgaacctgcgctgcggagtcccggtggaggagacagatcacggagccgtgctgcctcaagcgccccatctggccagtcccaacttgggagcatgatgagtagcgggtctcaacataccaatgtatag

SEQ ID NO: 98746 - DNA, 2997 bp, Artificial Sequence
  derived and/or modified sequence
atgcctgaggacatccccctgctgcccggcagcccccggcggctgagcccccaggccggcagcagaggaggccagggccccaagcacggccagcagtgcctgaagatgcctggcccccgggcccctggcctgcagggcggcagcaacagagaccccggccagccctgtggcggggagagcaccaggagcagcagcgtcatcaacaactacctggatgccaatgaacctgtgtccctggaggcccggctgagcaggatgcacttccatgacagccagaggaaggtggactatgtgctggcctaccactacaggaagaggggcgtgcacctggcccagggcttccctggccacagcctggccatcgtgtccaatggagaaacaggcaaggagccccatgctgggggccctggggacatcgagctgggccccctggatgccctggaggaggagaggaaggagcagcgggaggagtttgagcacaacctgatggaggccggcctggagctggagaaggacctggagaacaagagccagggcagcatctttgtgcgcatccacgccccctggcaggtgctggcccgggaggccgagttcctgaagatcaaggtgcccaccaagaagatgtatgagatcaaggccggcggcagcatcgccaagaagttctctgctgccctgcagaagctgagcagccacctgcagccccgggtgcctgagcacagcaacaacaagatgaagaacctgagctaccccttcagccgggagaagatgtacctgtacaacatccaggagaaggacaccttctttgacaatgccaccaggagccgcatcgtgcatgagatcctgaagaggacagcctgcagccgggccaacaacaccatgggcatcaacagcctgattgccaacaacatctatgaggccgcctaccccctgcatgatggagaatatgacagcccagaagatgacatgaatgacaggaagctgctgtaccaggagtgggcccgctatggagtcttctacaagttccagcccatcgacctgatcaggaagtactttggagagaagattggcctgtactttgcctggctgggcctgtacaccagcttcctgatccccagctctgtgattggagtcatcgtgttcctgtatggctgtgccaccatcgaggaggacatccccagccgggagatgtgtgaccagcagaatgccttcaccatgtgccccctgtgtgacaagagctgtgactactggaacctgagcagcgcctgtggcacagcccaggccagccacctgtttgacaacccagccaccgtcttcttcagcatcttcatggccctgtgggccaccatgttcctggagaactggaagaggctgcagatgaggctgggctacttctgggacctgaccggcatcgaggaggaggaggagcgggcccaggagcacagcaggccagaatatgagaccaaggtgcgggagaagatgctgaaggagagcaaccagagcgctgtgcagaagctggagaccaacaccacagaatgtggagatgaagatgatgaggacaagctgacctggaaggaccgcttccctggctacctgatgaactttgccagcatcctcttcatgattgccctgaccttcagcatcgtgtttggagtcatcgtgtaccgcatcaccacagctgctgccctgagcctgaacaaggccaccaggagcaatgtgcgggtgacagtgacagccacagctgtgatcatcaacctggtggtgatcctgatcctggatgagatctatggagctgtggccaagtggctgaccaagattgaggtgcccaagacagagcagacctttgaggagcggctcatcctgaaggccttcctgctgaagtttgtgaatgcctacagccccatcttctacgtggccttcttcaagggccgctttgtgggccggcccggcagctatgtgtatgtgtttgatggctacaggatggaggagtgtgcccctgggggctgcctgatggagctgtgcatccagctgagcatcatcatgctgggcaagcagctgatccagaacaacatctttgaaattggagtgcccaagctgaagaagctgttcaggaagctgaaggatgaaacagaagctggggagacagacagcgcccacagcaagcaccctgagcagtgggacctggactacagcctggagccctacacaggcctgaccccagagtacatggagatgatcatccagtttggatttgtgaccctgtttgtggccagcttccccctggcccctgtgtttgccctgctgaacaacgtgattgaggtgcggctggatgccaagaagtttgtgacagagctgcggcggccagatgctgtgaggaccaaggacatcggcatctggtttgacatcctgtctggaattggcaagttcagcgtcatcagcaatgcctttgtgattgccatcaccagtgacttcatcccccggctggtgtaccagtacagctacagccacaacggcaccctgcacggctttgtgaaccacaccctgtccttcttcaacgtgtcccagctgaaggagggcacccagcctgagaacagccagtttgaccaggaggtgcagttctgccgcttcaaggactaccgggagcccccctgggcccccaacccctatgagttcagcaagcagtactggttcatcctgagcgcccggctggccttcgtcatcatcttccagaacctggtgatgttcctgtctgtgctggtggactggatgatcccagacatccccacagacatcagtgaccagatcaagaaggagaagagcctgctggtggacttcttcctgaaggaggagcacgagaagctgaagctgatggatgagcccgccctgcggagccctgggggcggggacaggagccgcagccgggccgccagcagcgcccccagcggccagagccagctgggctccatgatgagcagcggcagccagcacaccaacgtgtag

SEQ ID NO: 98747 - DNA, 3000 bp, Artificial Sequence
  derived and/or modified sequence
atgcctgaggacatccccctgctgcccggcagcccccggcggctgagcccccaggccggcagcagaggaggccagggccccaagcacggccagcagtgcctgaagatgcctggcccccgggcccctggcctgcagggcggcagcaacagagaccccggccagccctgtggcggggagagcaccaggagcagcagcgtcatcaacaactacctggatgccaatgaacctgtgtccctggaggcccggctgagcaggatgcacttccatgacagccagaggaaggtggactatgtgctggcctaccactacaggaagaggggcgtgcacctggcccagggcttccctggccacagcctggccatcgtgtccaatggagaaacaggcaaggagccccatgctgggggccctggggacatcgagctgggccccctggatgccctggaggaggagaggaaggagcagcgggaggagtttgagcacaacctgatggaggccggcctggagctggagaaggacctggagaacaagagccagggcagcatctttgtgcgcatccacgccccctggcaggtgctggcccgggaggccgagttcctgaagatcaaggtgcccaccaagaaggagatgtatgagatcaaggccggcggcagcatcgccaagaagttctctgctgccctgcagaagctgagcagccacctgcagccccgggtgcctgagcacagcaacaacaagatgaagaacctgagctaccccttcagccgggagaagatgtacctgtacaacatccaggagaaggacaccttctttgacaatgccaccaggagcagaattgtgcatgagatcctgaagaggacagcctgcagccgggccaacaacaccatgggcatcaacagcctcatcgccaacaacatctatgaagctgcctaccccctgcatgatggagaatatgacagcccagaagatgacatgaatgacaggaagctgctgtaccaggagtgggcccgctatggagtcttctacaagttccagcccatcgacctgatcaggaagtactttggagagaagattggcctgtactttgcctggctgggcctgtacaccagcttcctgatccccagcagcgtcatcggcgtgattgtgttcctgtatggctgtgccaccatcgaggaggacatccccagccgggagatgtgtgaccagcagaatgccttcaccatgtgccccctgtgtgacaagagctgtgactactggaacctgagcagcgcctgtggcacagcccaggccagccacctgtttgacaacccagccaccgtcttcttcagcatcttcatggccctgtgggccaccatgttcctggagaactggaagaggctgcagatgaggctgggctacttctgggacctgactggaattgaggaggaggaggagcgggcccaggagcacagcaggccagaatatgagaccaaggtgcgggagaagatgctgaaggagagcaaccagagcgctgtgcagaagctggagaccaacaccacagaatgtggagatgaagatgatgaggacaagctgacctggaaggaccgcttccctggctacctgatgaactttgccagcatcctcttcatgattgccctgaccttcagcatcgtgtttggagtgattgtgtaccgcatcaccacagctgctgccctgagcctgaacaaggccaccaggagcaatgtgcgggtgacagtgacagccacagctgtgatcatcaacctggtggtgatcctgatcctggatgagatctacggggctgtggccaagtggctgaccaagattgaggtgcccaagacagagcagacctttgaggagcggctcatcctgaaggccttcctgctgaagtttgtgaatgcctacagccccatcttctacgtggccttcttcaagggccgctttgtgggccggcccggcagctatgtgtatgtgtttgatggctacaggatggaggagtgtgcccctgggggctgcctgatggagctgtgcatccagctgagcatcatcatgctgggcaagcagctgatccagaacaacatctttgaaattggagtgcccaagctgaagaagctgttcaggaagctgaaggatgaaacagaggccggggagacagattctgcccacagcaagcaccctgagcagtgggacctggactacagcctggagccctacacaggcctgaccccagagtacatggagatgatcatccagtttggatttgtgaccctgtttgtggccagcttccccctggcccctgtgtttgccctgctgaacaacgtcatcgaggtgcggctggatgccaagaagtttgtgacagagctgcggcggccagatgctgtgaggaccaaggacatcggcatctggtttgacatcctgagcggcatcggcaagttcagcgtcatcagcaatgccttcgtcatcgccatcaccagtgacttcatcccccggctggtgtaccagtacagctacagccacaacggcaccctgcacggctttgtgaaccacaccctgtccttcttcaacgtgtcccagctgaaggagggcacccagcctgagaacagccagtttgaccaggaggtgcagttctgccgcttcaaggactaccgggagcccccctgggcccccaacccctatgagttcagcaagcagtactggttcatcctgagcgcccggctggcctttgtgatcatcttccagaacctggtgatgttcctgtctgtgctggtggactggatgatcccagacatccccacagacatcagtgaccagatcaagaaggagaagagcctgctggtggacttcttcctgaaggaggagcacgagaagctgaagctgatggatgagcccgccctgcggagccctgggggcggggacaggagccgcagcagagctgccagcagcgcccccagcggccagagccagctgggctccatgatgagcagcggcagccagcacaccaacgtgtag

SEQ ID NO: 98748 - DNA, 3000 bp, Artificial Sequence
  derived and/or modified sequence
atgcctgaggacatccccctgctgcccggcagcccccggcggctgagcccccaggccggcagcagaggaggccagggccccaagcacggccagcagtgcctgaagatgcctggcccccgggcccctggcctgcagggcggcagcaacagagaccccggccagccctgtggcggggagagcaccaggagcagcagcgtcatcaacaactacctggatgccaatgaacctgtgtccctggaggcccggctgagcaggatgcacttccatgacagccagaggaaggtggactatgtgctggcctaccactacaggaagaggggcgtgcacctggcccagggcttccctggccacagcctggccatcgtgtccaatggagaaacaggcaaggagccccatgctgggggccctggggacatcgagctgggccccctggatgccctggaggaggagaggaaggagcagcgggaggagtttgagcacaacctgatggaggccggcctggagctggagaaggacctggagaacaagagccagggcagcatctttgtgcgcatccacgccccctggcaggtgctggcccgggaggccgagttcctgaagatcaaggtgcccaccaagaaggagatgtatgagatcaaggccggcggcagcatcgccaagaagttctctgctgccctgcagaagctgagcagccacctgcagccccgggtgcctgagcacagcaacaacaagatgaagaacctgagctaccccttcagccgggagaagatgtacctgtacaacatccaggagaaggacaccttctttgacaatgccaccaggagcagaattgtgcatgagatcctgaagaggacagcctgcagccgggccaacaacaccatgggcatcaacagcctcatcgccaacaacatctatgaagctgcctaccccctgcatgatggagaatatgacagcccagaagatgacatgaatgacaggaagctgctgtaccaggagtgggcccgctatggagtcttctacaagttccagcccatcgacctgatcaggaagtactttggagagaagattggcctgtactttgcctggctgggcctgtacaccagcttcctgatccccagcagcgtcatcggcgtgattgtgttcctgtatggctgtgccaccatcgaggaggacatccccagccgggagatgtgtgaccagcagaatgccttcaccatgtgccccctgtgtgacaagagctgtgactactggaacctgagcagcgcctgtggcacagcccaggccagccacctgtttgacaacccagccaccgtcttcttcagcatcttcatggccctgtgggccaccatgttcctggagaactggaagaggctgcagatgaggctgggctacttctgggacctgactggaattgaggaggaggagccccgggtgcaggagcacagcaggccagaatatgagaccaaggtgcgggagaagatgctgaaggagagcaaccagagcgctgtgcagaagctggagaccaacaccacagaatgtggagatgaagatgatgaggacaagctgacctggaaggaccgcttccctggctacctgatgaactttgccagcatcctcttcatgattgccctgaccttcagcatcgtgtttggagtgattgtgtaccgcatcaccacagctgctgccctgagcctgaacaaggccaccaggagcaatgtgcgggtgacagtgacagccacagctgtgatcatcaacctggtggtgatcctgatcctggatgagatctacggggctgtggccaagtggctgaccaagattgaggtgcccaagacagagcagacctttgaggagcggctcatcctgaaggccttcctgctgaagtttgtgaatgcctacagccccatcttctacgtggccttcttcaagggccgctttgtgggccggcccggcagctatgtgtatgtgtttgatggctacaggatggaggagtgtgcccctgggggctgcctgatggagctgtgcatccagctgagcatcatcatgctgggcaagcagctgatccagaacaacatctttgaaattggagtgcccaagctgaagaagctgttcaggaagctgaaggatgaaacagaggccggggagacagattctgcccacagcaagcaccctgagcagtgggacctggactacagcctggagccctacacaggcctgaccccagagtacatggagatgatcatccagtttggatttgtgaccctgtttgtggccagcttccccctggcccctgtgtttgccctgctgaacaacgtcatcgaggtgcggctggatgccaagaagtttgtgacagagctgcggcggccagatgctgtgaggaccaaggacatcggcatctggtttgacatcctgagcggcatcggcaagttcagcgtcatcagcaatgccttcgtcatcgccatcaccagtgacttcatcccccggctggtgtaccagtacagctacagccacaacggcaccctgcacggctttgtgaaccacaccctgtccttcttcaacgtgtcccagctgaaggagggcacccagcctgagaacagccagtttgaccaggaggtgcagttctgccgcttcaaggactaccgggagcccccctgggcccccaacccctatgagttcagcaagcagtactggttcatcctgagcgcccggctggcctttgtgatcatcttccagaacctggtgatgttcctgtctgtgctggtggactggatgatcccagacatccccacagacatcagtgaccagatcaagaaggagaagagcctgctggtggacttcttcctgaaggaggagcacgagaagctgaagctgatggatgagcccgccctgcggagccctgggggcggggacaggagccgcagcagagctgccagcagcgcccccagcggccagagccagctgggctccatgatgagcagcggcagccagcacaccaacgtgtag

SEQ ID NO: 98749 - DNA, 2997 bp, Artificial Sequence
  derived and/or modified sequence
atgcccgaggacatccccctgctgcccggcagcccccggcggctgtccccacaagcaggtagcaggggcgggcagggaccaaaacacggacagcaatgcctaaagatgcctggtcctagagcaccggggctccagggtgggtcaaatcgtgacccagggcagccctgcgggggcgagtccacacgttccagttctgtgatcaataactacctcgatgcgaatgagccagtttccctcgaagcccggctttccagaatgcactttcatgactcacagcggaaagtagactacgtcctcgcttatcactatagaaagaggggggtgcatctggcccaaggattccctggccacagtctcgccattgtgtccaacggtgagacaggcaaagaacctcacgccggaggacctggggacatcgaactcggccccctggacgctctcgaggaagaacggaaggagcaaagggaagagttcgagcacaacctgatggaggctgggctggagctcgagaaggatctagaaaacaagtctcagggctctattttcgttagaattcatgccccatggcaagtcctcgcgagggaagccgagttcctgaagatcaaagtgccaaccaaaaagatgtatgagataaaagcaggcggtagcatagcgaagaagttttccgccgctctccagaaactctcatctcatctccagcccagagttccggagcattctaacaacaagatgaaaaacctcagctaccccttttctagagaaaaaatgtatctctataatatccaagaaaaggataccttttttgacaacgctactcgctccagaattgtgcatgagattttgaagcggacagcatgcagccgggccaataacacgatgggtattaattctctgatcgcgaataacatttatgaggcagcctaccctcttcacgatggcgaatacgactcacccgaagacgacatgaatgaccggaaactgctttaccaggagtgggcaaggtatggggtgttttacaagttccagcctatagatctgattaggaagtactttggcgagaagattggcctttatttcgcttggctcggcctgtacacatccttcctgatcccgagttcggtgatcggtgtaattgtatttctgtatggctgtgctactattgaagaagatatccccagtcgcgaaatgtgcgaccagcagaacgccttcaccatgtgtccgctctgcgataaaagttgtgactattggaatctctctagcgcctgtggtacggctcaagcgtcacacctttttgacaatcccgccacggtctttttcagcatttttatggccttgtgggcaactatgttcttagagaattggaagagactccagatgaggctgggatatttttgggacctgactggaattgaggaggaggaggaaagggcccaggaacactcccgacctgagtacgagaccaaggtacgcgaaaaaatgcttaaagagtctaaccagagtgcagtccagaaattggaaaccaataccaccgagtgcggcgacgaagacgatgaagacaaactgacttggaaggatcgattccccggctacctgatgaatttcgcttccatactgtttatgatcgccctcacctttagcatcgtgtttggagttattgtttaccggatcacaacagccgccgcgctctccctaaataaggcaacaaggagcaacgttcgcgtgacagtaaccgcgaccgccgtgattataaacttggtggtgatactgatactcgacgagatatacggggccgtggccaaatggctgacaaaaattgaggtccctaagaccgagcagacattcgaagagcgacttatcctcaaggccttcctgctgaagtttgttaatgcttattctccaatcttctatgtggcgtttttcaaagggagattcgtgggccggcccggctcttacgtgtatgtcttcgatggctataggatggaagagtgcgccccagggggctgtttgatggaactgtgcattcagctatctattattatgctcggaaagcagctgatccagaataacatctttgaaatcggcgtgccaaagcttaaaaagcttttccgaaagcttaaggacgagaccgaagccggcgagacagactcagcccactccaaacaccctgagcagtgggatctggactattcgttagagccgtacacagggttgactccagagtatatggagatgatcatacagtttggattcgtgacactgttcgtggctagctttcccctcgcaccagtcttcgccctgctaaacaacgttatcgaggtgagactggatgctaagaagttcgttacagagctgcgtaggcctgacgctgtgcggactaaggatatcggcatctggttcgacattctcagcggtatcggaaagtttagcgtgatttcaaatgcctttgtcatagccataacctcagactttataccgcggttggtttatcagtacagctacagccataacggaacgctgcatggctttgtgaatcacactctgtcgttcttcaatgtcagtcagttgaaagaagggacacagcctgagaactcacaatttgaccaggaagtgcagttctgccgctttaaagactaccgtgaaccaccttgggctcccaacccctatgagttttcaaagcagtactggttcattttaagcgcacgacttgcctttgtgatcatattccagaacctggtcatgttcctgtccgtactggtggactggatgatccccgacatccccaccgatatcagtgaccaaattaaaaaagaaaagagtttattagtggatttttttttaaaggaagaacacgaaaaactgaaattgatggacgaacctgccctgcgttcccccggggggggggaccgcagtaggtcacgcgctgcgtcaagtgctccatctggccagagtcaattaggctcaatgatgagctctggtagccagcatactaacgtgtag

SEQ ID NO: 98750 - DNA, 3000 bp, Artificial Sequence
  derived and/or modified sequence
atgcccgaggacatccccctgctgcccggcagcccccggcggctgtctccgcaggcagggagcagaggaggtcaaggacctaagcatggtcagcaatgcctgaagatgccaggacccagggcaccaggcctgcagggcggtagcaatagagaccctggtcagccatgcggtggcgagtcaaccaggtccagctcagtgattaataattacctcgatgccaatgagccagtcagcttggaggccaggttgtcaagaatgcactttcacgattctcagcggaaggttgactacgtgctcgcatatcactaccgcaaacgtggagttcatttagcccagggatttcctgggcactctcttgctattgtttccaacggtgagactggcaaggaaccacacgccggtggccccggcgatatagaattaggccccctggatgccctggaagaggagcgtaaggagcaacgggaagaattcgaacataacctaatggaagccgggctggagctagagaaagatctcgaaaataaaagccagggcagcatctttgtcagaatccacgccccatggcaggtactggcgcgagaagcagagttcttgaaaattaaagtcccaacaaaaaaggaaatgtacgagatcaaagcaggcggatcaatcgctaagaagttttcagctgctctgcagaagttgtcaagccatctgcagccacgcgttcccgagcacagcaataacaagatgaagaacctgtcatacccatttagccgagagaaaatgtacttgtacaacatccaggagaaggatacgttctttgacaacgccacgcgatcgcggatcgtgcacgaaattctgaagcgcactgcctgcagcagagctaataacacgatgggtatcaatagcctaatcgcaaataacatatacgaagccgcttatcctctccatgacggggaatacgactcacccgaagatgatatgaacgacagaaagctactgtaccaagagtgggccaggtacggagtgttctacaaattccaacctatagatctcatacggaagtatttcggcgaaaaaatcggtctctactttgcatggctgggcttgtacacatcttttctcatcccctctagcgttatcggagtaatcgtctttttgtatggctgtgctacaatcgaagaagacatccctagcagagagatgtgcgatcagcagaatgcgttcaccatgtgcccactgtgtgataaaagctgtgactattggaacctaagctccgcgtgtggcacggctcaagcgtcacacctctttgataacccagctacagttttcttttctattttcatggcgctttgggctacaatgttcctagaaaactggaagcgcttgcagatgcggcttggctacttctgggatctcactggcatagaggaagaggaagaacgcgcgcaggagcacagcagacccgaatacgaaaccaaggtcagggagaagatgctcaaggagagcaaccaatcagccgtgcagaaactggaaaccaatactacagagtgtggcgatgaggacgacgaagataaactgacttggaaggatcgcttccctggctacttaatgaacttcgcctctatcttattcatgattgcgctgactttttccatagtcttcggcgtgattgtgtatcggattaccaccgctgcggcactgagcctgaacaaagcaacgcgctccaacgtgcgagtcaccgtgactgcaactgctgtcatcataaacctcgttgtgattctcatcttggacgagatctacggggcagtcgctaaatggttgaccaaaatcgaagtcccgaagaccgagcagactttcgaggagaggctgatcctgaaggcttttctgttaaagttcgtgaacgcttatagcccaatcttctatgtggctttcttcaagggccggttcgtcggccggccaggtagctacgtttatgtgttcgatggctatagaatggaagaatgcgcccctggtggctgcctcatggagttatgcatccagctttccataataatgctgggaaagcagctcatccagaacaacatctttgagatcggggttcccaaacttaaaaagctctttagaaaactgaaggatgaaaccgaggccggggagaccgatagcgcccactcaaagcatccagaacaatgggacctcgactattccttggagccctacacaggtctgacaccggagtacatggaaatgatcatacagtttggcttcgtgactctgtttgttgcatccttccccctggccccagtattcgctctcttaaacaacgtcatcgaggtgcgcctggacgccaagaaatttgtgaccgagctgcgccgtccagacgccgtgcgcactaaggatatagggatatggttcgatatcttgagtggcataggcaagttctctgtcatttctaacgcgtttgtaattgccatcacatccgactttataccaaggctggtctaccagtattcctactcccacaatgggacactgcatggttttgtaaaccacaccctgagcttttttaacgtctcacaacttaaagaggggacacagcctgagaatagtcagtttgaccaggaggttcagttctgccgctttaaggattacagggagcctccatgggctcccaatccctatgaattttcaaaacagtattggtttattctgagcgccaggctcgccttcgttattatctttcagaatttggtaatgtttttgagcgttctagtagattggatgattcctgacatacccactgatatcagtgatcagatcaagaaggaaaagagcttgctggtcgacttttttctgaaagaggagcacgaaaaacttaagttaatggatgagccagccctgagatcaccggggggcggggatcggtccagaagtagggcagcctcaagtgctccctctggccagagccagttaggctccatgatgtcctctggatcacaacatactaatgtatag

SEQ ID NO: 98751 - DNA, 3000 bp, Artificial Sequence
  derived and/or modified sequence
atgcccgaggacatccccctgctgcccggcagcccccggcggctgtccccacaggcaggaagcagaggcgggcagggacctaaacacggccagcagtgtttgaagatgcccggaccgcgcgcacccgggcttcaagggggcagcaacagggacccgggacagccctgtggcggggaatcaactcgatcatcctccgtaataaataattatctcgatgctaacgaacccgttagccttgaggctcgcctgagccgtatgcattttcacgattcccagagaaaggttgactatgttctcgcttatcattatcgaaaacgcggcgtccacctcgcccagggtttcccaggccatagcctcgctattgtgtcaaacggcgaaactgggaaggagccacacgctggcggcccaggcgacatagagctggggcccttagacgcgctggaagaggagcggaaggaacagagagaggagtttgagcacaatctgatggaggcaggacttgagttggaaaaggatcttgaaaacaaatcccaggggagcatattcgttagaatccatgccccatggcaggtgctagctagagaagcagaatttctcaagattaaagttcccacgaagaaagagatgtatgaaataaaagccgggggatcaatcgctaagaagtttagcgccgcactccagaagctctcctcgcacctccagccccgagtgcctgagcactccaacaataagatgaagaatctgtcttacccattttcgagggaaaagatgtacctttataacattcaagagaaagatacttttttcgacaacgctacccggagtagaatcgtgcatgaaatcctgaagagaaccgcctgctcaagggccaataacacaatgggtataaattccctaatcgccaataatatttacgaggcagcatatccactgcacgacggagaatatgatagtccagaagatgacatgaatgatcggaaattgttgtatcaagagtgggctcgctatggggtgttctacaagttccagcctatcgatttgattcgaaagtactttggtgaaaagattgggctttatttcgcatggctcgggctgtatacctccttcctgattcccagcagcgtcatcggcgtaatcgtgtttttgtatggctgtgctactattgaagaggacatcccaagccgcgaaatgtgtgatcagcaaaatgcctttaccatgtgccccctgtgtgacaaaagctgcgattactggaacctcagttccgcctgtggaacagctcaggcgtcccatctgttcgataatcccgcaaccgtgtttttttctattttcatggctctgtgggcgacaatgtttttggaaaattggaaacgtctccagatgcgacttgggtacttctgggatctgaccggcatcgaagaagaagagcctcgagtgcaggagcatagtcgtcccgagtatgaaaccaaggtcagagagaagatgctgaaggagagcaatcagtctgctgtgcaaaagctggagacaaacacaacagaatgcggcgatgaagacgacgaggataagctaacttggaaagatagattccctggctacctcatgaacttcgcaagcatactgtttatgatcgccttgactttcagcatagtgttcggggtaattgtctacagaattacaactgctgccgccttgagtctgaacaaggccaccagatccaatgttcgggtcactgtcacagccacagccgtgataataaacctggtcgtcattctcatccttgacgaaatctacggagcagtggcaaagtggctgacaaaaatcgaggtacctaaaaccgagcagacattcgaggaaaggctgatcctgaaggctttcttactaaagttcgtcaatgcttactcacctattttttacgtggcattctttaagggtagattcgtcggtcgcccaggaagctatgtttatgtattcgatgggtacaggatggaagaatgtgctccaggcggatgcctgatggagctttgtatccaactctccattattatgctcgggaaacagctgatacaaaataatatttttgaaatcggcgtgcccaaacttaagaaactgttcagaaaactgaaggacgagactgaggccggcgagaccgactcagcccactccaaacatccggagcagtgggatttagactactctcttgagccttacaccgggcttacccccgagtacatggagatgattatccagtttggctttgtgacactgttcgtagcctcctttccattggcccccgtgtttgccctgctgaacaatgtgatagaagtgcggctcgacgctaaaaaatttgttactgagttaagacggcctgatgctgtaagaaccaaagatattgggatctggtttgacatcctgtccggcataggaaaattctccgtgatttctaacgcattcgtgatagccataaccagcgattttatcccacgtctggtttaccagtacagctattctcacaatggcactcttcatggcttcgtcaaccatacactctcattcttcaatgtgtcccagctgaaagagggtacacagcctgaaaacagtcagtttgaccaagaggtgcagttctgccgcttcaaagactaccgtgagcctccatgggcccccaacccgtacgaattctcaaagcagtactggtttatcctgagtgcacgcctggcttttgtcattatttttcagaatttggtaatgtttctctcagtgctcgtggactggatgatccccgacatcccgacggatatcagcgaccaaatcaagaaggaaaaatccctgttagtggatttctttctcaaagaggagcacgagaagttgaaattaatggatgaacccgcactccggagtcccggcggaggggataggagtcgcagccgagctgcatcctcagctccgagtggccagtctcagctaggctctatgatgtccagtgggagtcagcacaccaatgtttag

SEQ ID NO: 98752 - DNA, 2997 bp, Artificial Sequence
  derived and/or modified sequence
atgcctgaagatatccccctactgcccggttccccacgaagactcagtccgcaggcaggctcaaggggcggacaggggccaaagcacggacagcagtgtttaaaaatgcctggacccagagcaccaggcttgcagggcggaagcaatagagaccctggacaaccttgtggcggtgaaagcactagaagcagttccgtgatcaataactatttagatgccaatgagcccgtgagcctagaggccaggttatcaaggatgcatttccacgattctcagcgcaaagtggactatgtcctggcctaccactaccgaaaacgaggggtacacctcgcccaaggctttccgggtcactcactggctatcgtgtccaacggggaaactggaaaagaacctcatgctggcggaccgggagacatcgagctcggccctctggacgcgctagaagaagaaaggaaggaacagcgagaggaattcgagcacaacctgatggaagctggtctggaattagagaaggacctggaaaataaaagccagggttcaatttttgtgcgaattcacgccccttggcaggtcctggcccgtgaagctgagttcttgaaaataaaggtgccaacaaagaagatgtacgagattaaggctggaggtagtatcgccaagaagttcagtgcagccctccagaagctctcatctcacctgcaaccccgagtacccgaacatagtaataacaaaatgaagaacttgtcctatcccttcagcagagagaaaatgtacctttacaacatacaggagaaggacaccttctttgacaacgctactaggtcgaggattgtccacgaaattctaaagcgaactgcttgctcgagggcgaataatactatggggataaattctcttatcgcgaataatatatatgaagctgcctacccactccacgacggcgaatatgattcacccgaagacgacatgaacgatcgtaagctcctctaccaggagtgggcacgctacggcgtgttctataagtttcagccgattgacctgattcgcaaatattttggggagaaaattgggttatatttcgcctggctgggcctttacacttctttccttatcccctcctctgtaatcggcgtgatcgttttcttatatggctgtgctaccatcgaggaagatatcccatcacgggaaatgtgcgatcaacagaatgccttcacaatgtgtcctctctgcgataaatcctgcgattactggaacctgagctctgcctgcggtactgcccaggcctcccacctgtttgacaatcctgccactgtattcttcagtatattcatggctttgtgggccaccatgttcctggagaattggaaaaggctgcagatgaggctcggttacttttgggatttaaccggcatcgaagaagaagaggagcgcgcacaggagcacagcaggcccgaatatgaaacaaaagttagagaaaagatgctcaaggaatccaatcaaagtgcagtccagaaattagaaacaaacactacggagtgtggagacgaagacgacgaggacaagctcacctggaaggacaggttcccaggctatctgatgaactttgcatcgatcttgttcatgatcgctcttacgtttagtatcgtattcggtgttattgtctacaggattaccaccgccgcagcactgtctctgaataaagcaacccgtagcaacgtgcgggtcaccgtgactgcaaccgcagtgatcatcaacctggtggttatcctaattctcgacgaaatctacggcgctgtggccaaatggcttaccaagattgaagttcctaaaacagaacagacctttgaggagcgtctgattctgaaggcgttcttacttaagtttgtcaatgcttattcccccattttctacgtcgctttctttaaaggtcgtttcgtgggaaggcctggtagttacgtgtatgtctttgatggatacaggatggaggagtgcgcccctggaggatgcctaatggaactgtgtattcagcttagcattataatgctaggaaaacagctcattcagaacaatattttcgaaatcggcgtccctaagctcaaaaagctctttcggaagctgaaagatgagaccgaggccggagaaacggactcggcgcacagcaagcaccccgaacagtgggacctggactattctctggagccatacactggactgaccccggagtacatggagatgatcattcaattcggtttcgtgaccctctttgtcgcatctttccctctggcaccagtgttcgcacttcttaacaatgtcattgaagtgaggttggacgcaaagaagtttgtaacagaactgcggaggccggacgctgtgcgtaccaaggacatcggcatctggtttgatattctttccggcatcggcaaattttcagtgatttcaaacgcgtttgtgatagctattacaagtgattttattcccagactggtgtatcaatattcctattctcacaacggcaccctgcacggctttgtcaatcataccctctcctttttcaatgtctctcagctcaaggaagggacccaaccagagaattctcagtttgatcaagaggtgcaattctgtaggttcaaagactaccgcgaacctccatgggctcccaatccctacgagttctcaaaacaatattggtttatcctgagcgcacggctggccttcgttatcatctttcagaacctcgtaatgtttcttagcgtgctcgtcgattggatgatcccagacatccctaccgacattagcgatcaaattaagaaagagaaaagtcttctggtggatttttttctgaaagaggaacacgaaaagctgaagctcatggacgagccagctctgaggtcaccaggaggaggggacagaagtcgatccagggcggcatcatctgccccatctggccagagccagctcgggtctatgatgagttcgggatcccaacacactaatgtctag

SEQ ID NO: 98753 - DNA, 3000 bp, Artificial Sequence
  derived and/or modified sequence
atgcctgaggacattccactgctgccgggtagccctagacggctcagccctcaggcaggctcaagaggtggtcagggccctaagcatgggcagcaatgccttaaaatgcccggtcccagggctcccggactccagggcggttccaacagggatcccggtcagccatgcggcggagaaagcacaagatcatcaagcgtcataaacaactacttggacgcgaacgaacccgtgtctctggaagcacgactgagcagaatgcatttccacgatagccaaagaaaggtggattacgtgctggcctaccattaccgaaagcgaggtgttcatctcgcccaaggattcccaggccactctttggctattgtgtctaatggggagaccggtaaagaaccacacgccggtggtccaggcgatatagaactgggccctttggacgctctagaggaggagagaaaagagcaacgtgaggaattcgaacacaacttgatggaagcaggcctggaactagagaaagatctggagaacaagagccagggaagcatcttcgtaaggatccacgccccatggcaggtgctggctcgagaggcggagttcctcaaaatcaaagtccctactaaaaaagaaatgtatgaaataaaggctggaggcagcattgctaagaagtttagcgcagccctgcaaaaactgagctcccatttgcagccacgggtgccagaacattccaataataagatgaagaatctgagctatcccttctctagggagaagatgtacttgtacaacatccaggaaaaagatacattcttcgacaatgcaactaggtccaggatcgtgcatgagatcctcaagaggaccgcatgctcgagggctaacaatactatgggaattaactctctgattgctaacaatatttacgaagccgcatacccactgcacgatggcgagtacgactccccggaggacgacatgaatgataggaagctgttgtatcaagagtgggccagatatggggttttctataagttccaacccatcgatcttattcgcaagtacttcggggagaaaatcggattatacttcgcttggctcgggctctacacctctttccttattccctcttctgtcatcggtgtcatcgtttttctgtatggctgtgccactatagaagaggacatcccatcacgagagatgtgcgatcagcagaacgcattcactatgtgcccactctgcgacaaatcttgcgactactggaacctgtctagcgcctgcggaaccgcccaggctagccacctgtttgacaaccctgccacggtgtttttctccattttcatggctctgtgggcaacaatgtttctcgagaattggaaaagactccagatgagactgggctatttttgggatctgacaggaatcgaggaggaagaggaacgagcccaggagcacagccgtcccgaatacgagaccaaagtccgcgaaaaaatgctgaaggaaagcaatcagtccgccgtgcagaagttggagactaataccacggagtgcggagacgaagatgatgaggataaattgacatggaaggatagattcccaggatatctgatgaactttgcctcaatcctattcatgatcgcgttgacattctcaatagtgttcggcgtcatcgtttaccggattaccaccgccgctgcgttgagtttaaataaggcgacccgatctaacgtcagagtgacggtgacagcaaccgctgtaatcatcaacctagtagtgatcctgattctcgacgagatctatggcgcagtagcgaagtggttgaccaagattgaggtccctaagacagagcagaccttcgaggagcgtttgatcctgaaagcttttttgctgaagttcgtcaatgcttattcgcctatcttctacgtcgcgttctttaaggggaggtttgttggtaggcccggtagctatgtgtatgtgtttgatggataccggatggaggagtgtgctcccggtggctgtttgatggagctgtgtatacaactttccataataatgctcggcaaacaactgattcagaataatatcttcgagatcggcgtaccaaagctaaaaaagctgtttcgcaaattgaaagacgagacagaagccggtgagaccgattctgctcattccaagcacccggaacagtgggacctggactattctctcgaaccttacacagggctgacgccggagtacatggaaatgattatccagttcggcttcgtaaccctgtttgtggcatcattccccttggcacctgtcttcgcactgctcaacaatgtcatagaagtgcggttggacgccaagaaatttgtaactgaactgagaaggcccgatgctgtccgaactaaggacatcggtatctggttcgacattctttccggcataggcaaattcagtgtaatttccaacgcttttgtgatcgccatcacatcagactttattccacgcctggtctaccagtatagttacagccacaacggaactttacacggctttgtgaatcacaccctctcattctttaacgtttcccagctcaaggagggcacgcagcccgagaatagccaatttgatcaggaggtgcagttttgtagattcaaagattaccgggaacctccctgggcgcctaacccttatgagttttccaaacagtactggttcatcctctctgcccgactagcattcgttataatctttcaaaatttggtaatgttcctaagcgtattggtggattggatgatccctgacatcccaacagacataagcgaccaaattaagaaggaaaaaagcctgctcgtagatttctttctcaaagaagaacacgagaaacttaagttgatggatgagcccgctctgaggtccccagggggaggagaccggtcccgaagtagagcggcatcctccgctccatcaggacagagccagttaggcagcatgatgagttccggatcccagcacacaaatgtgtag

SEQ ID NO: 98754 - DNA, 3000 bp, Artificial Sequence
  derived and/or modified sequence
atgcccgaggatataccactcctgcctggcagccccaggaggctgtctcctcaggctggcagtagaggcggtcagggaccaaaacatgggcagcagtgtctgaaaatgccaggcccaagggcccctggcctgcaaggcggatcaaatagggacccgggacagccttgtgggggagaatccacccggtctagttcggtaatcaataactacttggacgcgaatgaaccagtttcgcttgaagctagactgtcccgcatgcatttccatgattcacagcgcaaagttgattacgtgctggcatatcactatcgaaagcgaggggtccacctggcccagggattccccggtcacagcttggccattgtaagtaatggcgaaaccggaaaggaaccgcacgccggaggtcccggagatattgagctaggccctctggacgccttagaagaagagagaaaagagcaacgagaggagtttgagcacaacctaatggaagctgggctggagctggagaaggacctggagaacaagagtcagggatcaatcttcgtgcgcattcacgctccctggcaagtccttgccagggaggcagaatttctcaagatcaaggttcctactaagaaagagatgtatgagatcaaggctgggggatctatcgccaaaaagtttagtgcagccttgcagaagttatcatctcacctgcagcctcgcgttccggagcactccaacaataagatgaaaaatctcagctacccgttttcacgagagaagatgtacttatacaatattcaggaaaaagatacttttttcgacaacgccacaaggtcacgtatcgtgcacgaaattttaaaacggacagcttgtagccgcgctaataatacaatggggattaatagccttatcgccaacaatatttacgaggccgcatatccactgcatgatggagagtacgattctccagaagacgatatgaatgaccgtaagcttctgtatcaggaatgggccagatatggcgtgttttataaatttcagccaattgatctgattcgcaagtattttggcgagaaaattggtctttatttcgcctggcttggcctgtacacttccttccttatccccagctcagtgatcggagtcatagtgttcttatacgggtgcgccaccatcgaagaggacatcccctcacgggagatgtgcgaccagcagaatgcctttaccatgtgccccctttgtgataaatcctgcgactattggaatttgagtagtgcctgcgggaccgcccaagccagccatctctttgacaatcccgcaacagtgttttttagcatcttcatggcactgtgggctactatgttcttggagaactggaagagattgcaaatgcgcttgggatatttttgggatttgaccgggatcgaagaggaggaaccgagggtgcaggagcactctagacctgagtatgagaccaaggttagggaaaaaatgctgaaagaaagcaaccaatcagccgtccagaagctggagactaatacaaccgaatgcggcgatgaagatgatgaagacaagctcacctggaaggatagatttccaggttatctgatgaactttgcctctatcctctttatgattgcccttacattctcaattgtctttggcgtgattgtataccgaatcacaacagcagccgcactctctctgaataaagcaacgagatctaatgtgcgggtgactgtgaccgcaaccgccgttattatcaacttagtggtgatacttatcctcgacgaaatttatggagctgtggctaaatggctgacaaaaatagaagtccccaagacagagcaaacttttgaagagcgactcattctcaaagcctttttgctgaagttcgttaacgcctattcccctattttctacgtagctttcttcaagggtcgatttgtagggagacctggatcctatgtctatgtgttcgacggctatagaatggaggagtgtgcccctggcggttgccttatggagttatgtatccagctgtcaatcattatgcttggcaaacagctgattcagaataacatattcgaaataggtgtgcctaaactcaaaaaactgtttcgtaagttgaaggacgagactgaagccggtgagactgatagtgcacattcaaaacatccagaacagtgggatttggattattcactcgagccgtacacaggccttacgccagaatacatggagatgataatccagttcggattcgtcacattgtttgtggcttcattcccactcgcacccgtgttcgccctcctcaataacgttattgaggtaagactggatgccaagaagttcgtcacggaactgagaaggccagacgctgtgcgaaccaaggacatcggcatttggttcgatatcctgtcaggaatcggtaaattctcagtgataagtaacgcattcgtgatcgctataacgagcgactttattccgcgtctggtctaccagtattcctacagccataatggcacgttgcatggattcgttaaccataccctgagcttcttcaacgtttcgcaactaaaagagggcacccagcccgagaattcccaatttgatcaagaagttcagttctgccggttcaaagactatcgagagcctccttgggccccaaacccgtatgagttcagtaaacagtactggttcatcctgagtgccaggttggctttcgtgattattttccaaaatttagtgatgttcctctcggtgctcgtggattggatgatccccgatataccaacagacatcagcgatcaaatcaaaaaagagaagagcttgctcgtggacttttttctcaaagaagaacacgagaagcttaaattgatggatgaaccagcactgcggtcgccgggagggggagatcggtcccgcagcagggcagcttcctccgctccctctgggcagagccagctcggatctatgatgtcaagcggctcccaacacaccaatgtctag

SEQ ID NO: 98755 - DNA, 3717 bp, Artificial Sequence
  derived and/or modified sequence
ccaggctccttctctataaagtgggatctatcatgaccagcctaccttatcaatataggagagaaaatcttcatgcctgaagatatacccctgctccctggctccccacgccggctgagccctcaggcagggtccagagggggccagggccccaaacatggacagcagtgtctcaagatgccaggtccccgggccccaggtctgcagggcggttccaacagagatcctggccagccctgcggtggagagagcacccgcagcagctctgtcatcaacaactatctggatgccaatgagcctgtgtccttggaggcccgtcttagccgcatgcacttccatgacagtcagaggaaggtcgactatgtacttgcctaccactaccggaaacgcggggtgcacctggcccaaggcttccctggccactcgctggctatcgtctccaatggggagacaggcaaggagcctcatgctgggggcccaggtgacattgagctgggaccgctcgatgccctggaggaggagaggaaggagcagcgggaggaatttgagcacaatctgatggaggctggactggagcttgagaaggacttggagaataaaagccagggatccatctttgtccggatacacgccccgtggcaggtgctggccagagaggcagaattcttgaagatcaaagttcctaccaagaaaatgtacgagatcaaagcaggaggcagcattgcaaagaagttcagcgcggctctgcagaagctgagctcgcacctgcagccccgagttccagaacacagcaacaacaagatgaaaaacctctcctacccattctccagggagaagatgtacctgtacaacatccaggaaaaggacaccttctttgataatgccacccgcagccgcattgtgcacgagatcctgaagcgcacagcctgctcccgagccaacaacacgatgggtattaactctctgatcgcaaacaatatctatgaggctgcctaccctcttcatgacggtgaatacgatagtccagaggacgatatgaatgacaggaagctgctatatcaagaatgggcgcgctatggagtgttctataagttccaacctattgacctcatcagaaagtattttggagaaaaaattggactgtattttgcctggctgggattatatacatcattcctcatcccatcttctgtaattggagtgattgtgtttctttatggatgtgcaacaattgaagaagatattcccagcagagagatgtgtgaccagcagaatgccttcaccatgtgtcccctgtgtgacaagtcctgtgattactggaacctcagctcagcctgtgggaccgcgcaggccagccacctgtttgacaaccctgccaccgtcttcttctctatcttcatggctctgtgggctaccatgttcctggaaaactggaagaggctacagatgcgactgggctacttttgggacctgactggcatagaagaggaagaagaacgtgcccaggaacattccaggcctgagtatgaaaccaaagttcgagagaaaatgctaaaggagagcaaccagtctgctgtccagaaattggaaacaaacacgacggagtgtggcgatgaggatgatgaagataaactgacctggaaggatcgtttcccaggttacctgatgaactttgcctccatcttattcatgattgccctgacattctcaatcgtctttggggtgatagtgtatcgaataacaactgcagccgctctgtctctcaataaggctacacgctccaatgtccgggtgacagtgacagcaacagcagtcatcatcaacctcgtggtcatcctcatcctggacgagatctacggcgctgtggccaagtggctcaccaaaattgaggttccgaaaacagaacagacttttgaagagcgcctgatcctcaaagctttcttgctcaagtttgtcaatgcctactcccccatcttctatgtggcctttttcaaagggaggtttgtgggcaggcctggaagctacgtctatgtattcgatggttaccgcatggaagagtgtgctccagggggctgtctcatggagctctgcattcagctcagcatcatcatgttggggaagcagttgatccagaacaacatctttgagattggagtcccgaagctaaagaaactatttcgaaagctgaaagatgagaccgaagctggagaaactgactctgcccattcgaaacatccagagcagtgggacctagactacagcttggaaccatacacaggactgactccggagtacatggaaatgatcatccagtttggttttgtcaccctcttcgtggcctcctttcccctggcacctgtgtttgccctcctcaacaacgtcattgaagtgcggctcgatgcaaagaagtttgttacagagctgagacggccggatgctgtaagaaccaaagatatcggaatctggtttgacattctctctggaattggcaagttctctgttatcagcaacgcttttgtcattgcgatcacctccgactttatcccccgcctggtgtaccagtactcctacagtcacaatgggactctgcacggctttgtcaaccacaccctctcctttttcaacgtcagccagctgaaggaggggacgcagccagaaaactcacagtttgaccaggaggttcagttctgcaggtttaaggattaccgagagccgccatgggccccgaacccttatgagttttcgaaacagtactggtttattctgtccgcccgtctggcttttgtcataatcttccagaacctcgtgatgttcctgagcgtcctcgtggactggatgattccagacatccccacggacatcagcgaccagatcaagaaagagaagagcttattagtggatttcttcctgaaagaggagcatgagaagctcaagctgatggatgagccggctctgaggagcccaggaggtggggatcgaagcaggagccgggcagccagctcagcaccttcaggccaaagccagctgggcagcatgatgtcgtcaggctctcagcacaccaatgtgtgagcagttcagcctgcagcagaggagggcacggcagcagagacacgcacatgcacgtaagcatgttcctacacccacatggcgtgctgtctgtctgcaggggcctggcttgatggggtcttgaagagggggcagtgtgtaaaaagaaagagcctgacagaatgagtgtaggaaggaagagaaatgatgctacatctcagaaacttcaagcttaagtttcttttaggtccccttttaagctgcatccttttgagggattggaaccccactggggtctctccaccccagagtctcaggcaccgcgagcattcccatgtaccctggggcaccctcttgtacttcaccatcatttctgactttgaccagctgtaagagaaatgcagtcaggagcacagcatcccctacttactatcactacaagaaaactgagtcacttgcagtggggctgccacagtctcagcagatgcaaattaagttacaaggctgaatggtgcagccgctggacctgatagtaaggtgcaaaggtccaaacctgggcttgtctccacttcacgtcacaaaaacgtttggagctaaatgcagataaccatcattttatgaaagttcagatttaaaataataaaataaatggacacattctttataaagatg

SEQ ID NO: 98756 - DNA, 3717 bp, Artificial Sequence
  derived and/or modified sequence
ccaggctccttctctataaagtgggatctatcatgaccagcctaccttatcaatataggagagaaaatcttcatgcctgaagatatacccctgctccctggctccccacgccggctgagccctcaggcagggtccagagggggccagggccccaaacatggacagcagtgtctcaagatgccaggtccccgggccccaggtctgcagggcggttccaacagagatcctggccagccctgcggtggagagagcacccgcagcagctctgtcatcaacaactatctggatgccaatgagcctgtgtccttggaggcccgtcttagccgcatgcacttccatgacagtcagaggaaggtcgactatgtacttgcctaccactaccggaaacgcggggtgcacctggcccaaggcttccctggccactcgctggctatcgtctccaatggggagacaggcaaggagcctcatgctgggggcccaggtgacattgagctgggaccgctcgatgccctggaggaggagaggaaggagcagcgggaggaatttgagcacaatctgatggaggctggactggagcttgagaaggacttggagaataaaagccagggatccatctttgtccggatacacgccccgtggcaggtgctggccagagaggcagaattcttgaagatcaaagttcctaccaagaaagagatgtacgagatcaaagcaggaggcagcattgcaaagaagttcagcgcggctctgcagaagctgagctcgcacctgcagccccgagttccagaacacagcaacaacaagatgaaaaacctctcctacccattctccagggagaagatgtacctgtacaacatccaggaaaaggacaccttctttgataatgccacccgcagccgcattgtgcacgagatcctgaagcgcacagcctgctcccgagccaacaacacgatgggtattaactctctgatcgcaaacaatatctatgaggctgcctaccctcttcatgacggtgaatacgatagtccagaggacgatatgaatgacaggaagctgctatatcaagaatgggcgcgctatggagtgttctataagttccaacctattgacctcatcagaaagtattttggagaaaaaattggactgtattttgcctggctgggattatatacatcattcctcatcccatcttctgtaattggagtgattgtgtttctttatggatgtgcaacaattgaagaagatattcccagcagagagatgtgtgaccagcagaatgccttcaccatgtgtcccctgtgtgacaagtcctgtgattactggaacctcagctcagcctgtgggaccgcgcaggccagccacctgtttgacaaccctgccaccgtcttcttctctatcttcatggctctgtgggctaccatgttcctggaaaactggaagaggctacagatgcgactgggctacttttgggacctgactggcatagaagaggaagaagaacgtgcccaggaacattccaggcctgagtatgaaaccaaagttcgagagaaaatgctaaaggagagcaaccagtctgctgtccagaaattggaaacaaacacgacggagtgtggcgatgaggatgatgaagataaactgacctggaaggatcgtttcccaggttacctgatgaactttgcctccatcttattcatgattgccctgacattctcaatcgtctttggggtgatagtgtatcgaataacaactgcagccgctctgtctctcaataaggctacacgctccaatgtccgggtgacagtgacagcaacagcagtcatcatcaacctcgtggtcatcctcatcctggacgagatctacggcgctgtggccaagtggctcaccaaaattgaggttccgaaaacagaacagacttttgaagagcgcctgatcctcaaagctttcttgctcaagtttgtcaatgcctactcccccatcttctatgtggcctttttcaaagggaggtttgtgggcaggcctggaagctacgtctatgtattcgatggttaccgcatggaagagtgtgctccagggggctgtctcatggagctctgcattcagctcagcatcatcatgttggggaagcagttgatccagaacaacatctttgagattggagtcccgaagctaaagaaactatttcgaaagctgaaagatgagaccgaagctggagaaactgactctgcccattcgaaacatccagagcagtgggacctagactacagcttggaaccatacacaggactgactccggagtacatggaaatgatcatccagtttggttttgtcaccctcttcgtggcctcctttcccctggcacctgtgtttgccctcctcaacaacgtcattgaagtgcggctcgatgcaaagaagtttgttacagagctgagacggccggatgctgtaagaaccaaagatatcggaatctggtttgacattctctctggaattggcaagttctctgttatcagcaacgcttttgtcattgcgatcacctccgactttatcccccgcctggtgtaccagtactcctacagtcacaatgggactctgcacggctttgtcaaccacaccctctcctttttcaacgtcagccagctgaaggaggggacgcagccagaaaactcacagtttgaccaggaggttcagttctgcaggtttaaggattaccgagagccgccatgggccccgaacccttatgagttttcgaaacagtactggtttattctgtccgcccgtctggcttttgtcataatcttccagaacctcgtgatgttcctgagcgtcctcgtggactggatgattccagacatccccacggacatcagcgaccagatcaagaaagagaagagcttattagtggatttcttcctgaaagaggagcatgagaagctcaagctgatggatgagccggctctgaggagcccaggaggtggggatcgaagcaggagccgggcagccagctcagcaccttcaggccaaagccagctgggcagcatgatgtcgtcaggctctcagcacaccaatgtgtgagcagttcagcctgcagcagaggagggcacggcagcagagacacgcacatgcacgtaagcatgttcctacacccacatggcgtgctgtctgtctgcaggggcctggcttgatggggtcttgaagagggggcagtgtgtaaaaagaaagagcctgacagaatgagtgtaggaaggaagagaaatgatgctacatctcagaaacttcaagcttaagtttcttttaggtccccttttaagctgcatccttttgagggattggaaccccactggggtctctccaccccagagtctcaggcaccgcgagcattcccatgtaccctggggcaccctcttgtacttcaccatcatttctgactttgaccagctgtaagagaaatgcagtcaggagcacagcatcccctacttactatcactacaagaaaactgagtcacttgcagtggggctgccacagtctcagcagatgcaaattaagttacaaggctgaatggtgcagccgctggacctgatagtaaggtgcaaaggtccaaacctgggcttgtctccacttcacgtcacaaaaacgtttggagctaaatgcagataaccatcattttatgaaagttcagatttaaaataataaaataaatggacacattctttataaag

SEQ ID NO: 98757 - DNA, 3717 bp, Artificial Sequence
  derived and/or modified sequence
ccaggctccttctctataaagtgggatctatcatgaccagcctaccttatcaatataggagagaaaatcttcatgcctgaagatatacccctgctccctggctccccacgccggctgagccctcaggcagggtccagagggggccagggccccaaacatggacagcagtgtctcaagatgccaggtccccgggccccaggtctgcagggcggttccaacagagatcctggccagccctgcggtggagagagcacccgcagcagctctgtcatcaacaactatctggatgccaatgagcctgtgtccttggaggcccgtcttagccgcatgcacttccatgacagtcagaggaaggtcgactatgtacttgcctaccactaccggaaacgcggggtgcacctggcccaaggcttccctggccactcgctggctatcgtctccaatggggagacaggcaaggagcctcatgctgggggcccaggtgacattgagctgggaccgctcgatgccctggaggaggagaggaaggagcagcgggaggaatttgagcacaatctgatggaggctggactggagcttgagaaggacttggagaataaaagccagggatccatctttgtccggatacacgccccgtggcaggtgctggccagagaggcagaattcttgaagatcaaagttcctaccaagaaagagatgtacgagatcaaagcaggaggcagcattgcaaagaagttcagcgcggctctgcagaagctgagctcgcacctgcagccccgagttccagaacacagcaacaacaagatgaaaaacctctcctacccattctccagggagaagatgtacctgtacaacatccaggaaaaggacaccttctttgataatgccacccgcagccgcattgtgcacgagatcctgaagcgcacagcctgctcccgagccaacaacacgatgggtattaactctctgatcgcaaacaatatctatgaggctgcctaccctcttcatgacggtgaatacgatagtccagaggacgatatgaatgacaggaagctgctatatcaagaatgggcgcgctatggagtgttctataagttccaacctattgacctcatcagaaagtattttggagaaaaaattggactgtattttgcctggctgggattatatacatcattcctcatcccatcttctgtaattggagtgattgtgtttctttatggatgtgcaacaattgaagaagatattcccagcagagagatgtgtgaccagcagaatgccttcaccatgtgtcccctgtgtgacaagtcctgtgattactggaacctcagctcagcctgtgggaccgcgcaggccagccacctgtttgacaaccctgccaccgtcttcttctctatcttcatggctctgtgggctaccatgttcctggaaaactggaagaggctacagatgcgactgggctacttttgggacctgactggcatagaagaggaagaaccaagagttcaagaacattccaggcctgagtatgaaaccaaagttcgagagaaaatgctaaaggagagcaaccagtctgctgtccagaaattggaaacaaacacgacggagtgtggcgatgaggatgatgaagataaactgacctggaaggatcgtttcccaggttacctgatgaactttgcctccatcttattcatgattgccctgacattctcaatcgtctttggggtgatagtgtatcgaataacaactgcagccgctctgtctctcaataaggctacacgctccaatgtccgggtgacagtgacagcaacagcagtcatcatcaacctcgtggtcatcctcatcctggacgagatctacggcgctgtggccaagtggctcaccaaaattgaggttccgaaaacagaacagacttttgaagagcgcctgatcctcaaagctttcttgctcaagtttgtcaatgcctactcccccatcttctatgtggcctttttcaaagggaggtttgtgggcaggcctggaagctacgtctatgtattcgatggttaccgcatggaagagtgtgctccagggggctgtctcatggagctctgcattcagctcagcatcatcatgttggggaagcagttgatccagaacaacatctttgagattggagtcccgaagctaaagaaactatttcgaaagctgaaagatgagaccgaagctggagaaactgactctgcccattcgaaacatccagagcagtgggacctagactacagcttggaaccatacacaggactgactccggagtacatggaaatgatcatccagtttggttttgtcaccctcttcgtggcctcctttcccctggcacctgtgtttgccctcctcaacaacgtcattgaagtgcggctcgatgcaaagaagtttgttacagagctgagacggccggatgctgtaagaaccaaagatatcggaatctggtttgacattctctctggaattggcaagttctctgttatcagcaacgcttttgtcattgcgatcacctccgactttatcccccgcctggtgtaccagtactcctacagtcacaatgggactctgcacggctttgtcaaccacaccctctcctttttcaacgtcagccagctgaaggaggggacgcagccagaaaactcacagtttgaccaggaggttcagttctgcaggtttaaggattaccgagagccgccatgggccccgaacccttatgagttttcgaaacagtactggtttattctgtccgcccgtctggcttttgtcataatcttccagaacctcgtgatgttcctgagcgtcctcgtggactggatgattccagacatccccacggacatcagcgaccagatcaagaaagagaagagcttattagtggatttcttcctgaaagaggagcatgagaagctcaagctgatggatgagccggctctgaggagcccaggaggtggggatcgaagcaggagccgggcagccagctcagcaccttcaggccaaagccagctgggcagcatgatgtcgtcaggctctcagcacaccaatgtgtgagcagttcagcctgcagcagaggagggcacggcagcagagacacgcacatgcacgtaagcatgttcctacacccacatggcgtgctgtctgtctgcaggggcctggcttgatggggtcttgaagagggggcagtgtgtaaaaagaaagagcctgacagaatgagtgtaggaaggaagagaaatgatgctacatctcagaaacttcaagcttaagtttcttttaggtccccttttaagctgcatccttttgagggattggaaccccactggggtctctccaccccagagtctcaggcaccgcgagcattcccatgtaccctggggcaccctcttgtacttcaccatcatttctgactttgaccagctgtaagagaaatgcagtcaggagcacagcatcccctacttactatcactacaagaaaactgagtcacttgcagtggggctgccacagtctcagcagatgcaaattaagttacaaggctgaatggtgcagccgctggacctgatagtaaggtgcaaaggtccaaacctgggcttgtctccacttcacgtcacaaaaacgtttggagctaaatgcagataaccatcattttatgaaagttcagatttaaaataataaaataaatggacacattctttataaag

SEQ ID NO: 98758 - DNA, 2997 bp, Artificial Sequence
  derived and/or modified sequence
atgcccgaggacatccccctgctgcccggcagccccagaagactgagcccccaggccggcagcagaggcggccagggccccaagcacggccagcagtgcctgaagatgcccggccccagagcccccggcctgcagggcggcagcaacagagaccccggccagccctgcggcggcgagagcaccagaagcagcagcgtgatcaacaactacctggacgccaacgagcccgtgagcctggaggccagactgagcagaatgcacttccacgacagccagagaaaggtggactacgtgctggcctaccactacagaaagagaggcgtgcacctggcccagggcttccccggccacagcctggccatcgtgagcaacggcgagaccggcaaggagccccacgccggcggccccggcgacatcgagctgggccccctggacgccctggaggaggagagaaaggagcagagagaggagttcgagcacaacctgatggaggccggcctggagctggagaaggacctggagaacaagagccagggcagcatcttcgtgagaatccacgccccctggcaggtgctggccagagaggccgagttcctgaagatcaaggtgcccaccaagaagatgtacgagatcaaggccggcggcagcatcgccaagaagttcagcgccgccctgcagaagctgagcagccacctgcagcccagagtgcccgagcacagcaacaacaagatgaagaacctgagctaccccttcagcagagagaagatgtacctgtacaacatccaggagaaggacaccttcttcgacaacgccaccagaagcagaatcgtgcacgagatcctgaagagaaccgcctgcagcagagccaacaacaccatgggcatcaacagcctgatcgccaacaacatctacgaggccgcctaccccctgcacgacggcgagtacgacagccccgaggacgacatgaacgacagaaagctgctgtaccaggagtgggccagatacggcgtgttctacaagttccagcccatcgacctgatcagaaagtacttcggcgagaagatcggcctgtacttcgcctggctgggcctgtacaccagcttcctgatccccagcagcgtgatcggcgtgatcgtgttcctgtacggctgcgccaccatcgaggaggacatccccagcagagagatgtgcgaccagcagaacgccttcaccatgtgccccctgtgcgacaagagctgcgactactggaacctgagcagcgcctgcggcaccgcccaggccagccacctgttcgacaaccccgccaccgtgttcttcagcatcttcatggccctgtgggccaccatgttcctggagaactggaagagactgcagatgagactgggctacttctgggacctgaccggcatcgaggaggaggaggagagagcccaggagcacagcagacccgagtacgagaccaaggtgagagagaagatgctgaaggagagcaaccagagcgccgtgcagaagctggagaccaacaccaccgagtgcggcgacgaggacgacgaggacaagctgacctggaaggacagattccccggctacctgatgaacttcgccagcatcctgttcatgatcgccctgaccttcagcatcgtgttcggcgtgatcgtgtacagaatcaccaccgccgccgccctgagcctgaacaaggccaccagaagcaacgtgagagtgaccgtgaccgccaccgccgtgatcatcaacctggtggtgatcctgatcctggacgagatctacggcgccgtggccaagtggctgaccaagatcgaggtgcccaagaccgagcagaccttcgaggagagactgatcctgaaggccttcctgctgaagttcgtgaacgcctacagccccatcttctacgtggccttcttcaagggcagattcgtgggcagacccggcagctacgtgtacgtgttcgacggctacagaatggaggagtgcgcccccggcggctgcctgatggagctgtgcatccagctgagcatcatcatgctgggcaagcagctgatccagaacaacatcttcgagatcggcgtgcccaagctgaagaagctgttcagaaagctgaaggacgagaccgaggccggcgagaccgacagcgcccacagcaagcaccccgagcagtgggacctggactacagcctggagccctacaccggcctgacccccgagtacatggagatgatcatccagttcggcttcgtgaccctgttcgtggccagcttccccctggcccccgtgttcgccctgctgaacaacgtgatcgaggtgagactggacgccaagaagttcgtgaccgagctgagaagacccgacgccgtgagaaccaaggacatcggcatctggttcgacatcctgagcggcatcggcaagttcagcgtgatcagcaacgccttcgtgatcgccatcaccagcgacttcatccccagactggtgtaccagtacagctacagccacaacggcaccctgcacggcttcgtgaaccacaccctgagcttcttcaacgtgagccagctgaaggagggcacccagcccgagaacagccagttcgaccaggaggtgcagttctgcagattcaaggactacagagagcccccctgggcccccaacccctacgagttcagcaagcagtactggttcatcctgagcgccagactggccttcgtgatcatcttccagaacctggtgatgttcctgagcgtgctggtggactggatgatccccgacatccccaccgacatcagcgaccagatcaagaaggagaagagcctgctggtggacttcttcctgaaggaggagcacgagaagctgaagctgatggacgagcccgccctgagaagccccggcggcggcgacagaagcagaagcagagccgccagcagcgcccccagcggccagagccagctgggcagcatgatgagcagcggcagccagcacaccaacgtgtag

SEQ ID NO: 98759 - DNA, 3000 bp, Artificial Sequence
  derived and/or modified sequence
atgcccgaggacatccccctgctgcccggcagccccagaagactgagcccccaggccggcagcagaggcggccagggccccaagcacggccagcagtgcctgaagatgcccggccccagagcccccggcctgcagggcggcagcaacagagaccccggccagccctgcggcggcgagagcaccagaagcagcagcgtgatcaacaactacctggacgccaacgagcccgtgagcctggaggccagactgagcagaatgcacttccacgacagccagagaaaggtggactacgtgctggcctaccactacagaaagagaggcgtgcacctggcccagggcttccccggccacagcctggccatcgtgagcaacggcgagaccggcaaggagccccacgccggcggccccggcgacatcgagctgggccccctggacgccctggaggaggagagaaaggagcagagagaggagttcgagcacaacctgatggaggccggcctggagctggagaaggacctggagaacaagagccagggcagcatcttcgtgagaatccacgccccctggcaggtgctggccagagaggccgagttcctgaagatcaaggtgcccaccaagaaggagatgtacgagatcaaggccggcggcagcatcgccaagaagttcagcgccgccctgcagaagctgagcagccacctgcagcccagagtgcccgagcacagcaacaacaagatgaagaacctgagctaccccttcagcagagagaagatgtacctgtacaacatccaggagaaggacaccttcttcgacaacgccaccagaagcagaatcgtgcacgagatcctgaagagaaccgcctgcagcagagccaacaacaccatgggcatcaacagcctgatcgccaacaacatctacgaggccgcctaccccctgcacgacggcgagtacgacagccccgaggacgacatgaacgacagaaagctgctgtaccaggagtgggccagatacggcgtgttctacaagttccagcccatcgacctgatcagaaagtacttcggcgagaagatcggcctgtacttcgcctggctgggcctgtacaccagcttcctgatccccagcagcgtgatcggcgtgatcgtgttcctgtacggctgcgccaccatcgaggaggacatccccagcagagagatgtgcgaccagcagaacgccttcaccatgtgccccctgtgcgacaagagctgcgactactggaacctgagcagcgcctgcggcaccgcccaggccagccacctgttcgacaaccccgccaccgtgttcttcagcatcttcatggccctgtgggccaccatgttcctggagaactggaagagactgcagatgagactgggctacttctgggacctgaccggcatcgaggaggaggaggagagagcccaggagcacagcagacccgagtacgagaccaaggtgagagagaagatgctgaaggagagcaaccagagcgccgtgcagaagctggagaccaacaccaccgagtgcggcgacgaggacgacgaggacaagctgacctggaaggacagattccccggctacctgatgaacttcgccagcatcctgttcatgatcgccctgaccttcagcatcgtgttcggcgtgatcgtgtacagaatcaccaccgccgccgccctgagcctgaacaaggccaccagaagcaacgtgagagtgaccgtgaccgccaccgccgtgatcatcaacctggtggtgatcctgatcctggacgagatctacggcgccgtggccaagtggctgaccaagatcgaggtgcccaagaccgagcagaccttcgaggagagactgatcctgaaggccttcctgctgaagttcgtgaacgcctacagccccatcttctacgtggccttcttcaagggcagattcgtgggcagacccggcagctacgtgtacgtgttcgacggctacagaatggaggagtgcgcccccggcggctgcctgatggagctgtgcatccagctgagcatcatcatgctgggcaagcagctgatccagaacaacatcttcgagatcggcgtgcccaagctgaagaagctgttcagaaagctgaaggacgagaccgaggccggcgagaccgacagcgcccacagcaagcaccccgagcagtgggacctggactacagcctggagccctacaccggcctgacccccgagtacatggagatgatcatccagttcggcttcgtgaccctgttcgtggccagcttccccctggcccccgtgttcgccctgctgaacaacgtgatcgaggtgagactggacgccaagaagttcgtgaccgagctgagaagacccgacgccgtgagaaccaaggacatcggcatctggttcgacatcctgagcggcatcggcaagttcagcgtgatcagcaacgccttcgtgatcgccatcaccagcgacttcatccccagactggtgtaccagtacagctacagccacaacggcaccctgcacggcttcgtgaaccacaccctgagcttcttcaacgtgagccagctgaaggagggcacccagcccgagaacagccagttcgaccaggaggtgcagttctgcagattcaaggactacagagagcccccctgggcccccaacccctacgagttcagcaagcagtactggttcatcctgagcgccagactggccttcgtgatcatcttccagaacctggtgatgttcctgagcgtgctggtggactggatgatccccgacatccccaccgacatcagcgaccagatcaagaaggagaagagcctgctggtggacttcttcctgaaggaggagcacgagaagctgaagctgatggacgagcccgccctgagaagccccggcggcggcgacagaagcagaagcagagccgccagcagcgcccccagcggccagagccagctgggcagcatgatgagcagcggcagccagcacaccaacgtgtag

SEQ ID NO: 98760 - DNA, 3000 bp, Artificial Sequence
  derived and/or modified sequence
atgcccgaggacatccccctgctgcccggcagccccagaagactgagcccccaggccggcagcagaggcggccagggccccaagcacggccagcagtgcctgaagatgcccggccccagagcccccggcctgcagggcggcagcaacagagaccccggccagccctgcggcggcgagagcaccagaagcagcagcgtgatcaacaactacctggacgccaacgagcccgtgagcctggaggccagactgagcagaatgcacttccacgacagccagagaaaggtggactacgtgctggcctaccactacagaaagagaggcgtgcacctggcccagggcttccccggccacagcctggccatcgtgagcaacggcgagaccggcaaggagccccacgccggcggccccggcgacatcgagctgggccccctggacgccctggaggaggagagaaaggagcagagagaggagttcgagcacaacctgatggaggccggcctggagctggagaaggacctggagaacaagagccagggcagcatcttcgtgagaatccacgccccctggcaggtgctggccagagaggccgagttcctgaagatcaaggtgcccaccaagaaggagatgtacgagatcaaggccggcggcagcatcgccaagaagttcagcgccgccctgcagaagctgagcagccacctgcagcccagagtgcccgagcacagcaacaacaagatgaagaacctgagctaccccttcagcagagagaagatgtacctgtacaacatccaggagaaggacaccttcttcgacaacgccaccagaagcagaatcgtgcacgagatcctgaagagaaccgcctgcagcagagccaacaacaccatgggcatcaacagcctgatcgccaacaacatctacgaggccgcctaccccctgcacgacggcgagtacgacagccccgaggacgacatgaacgacagaaagctgctgtaccaggagtgggccagatacggcgtgttctacaagttccagcccatcgacctgatcagaaagtacttcggcgagaagatcggcctgtacttcgcctggctgggcctgtacaccagcttcctgatccccagcagcgtgatcggcgtgatcgtgttcctgtacggctgcgccaccatcgaggaggacatccccagcagagagatgtgcgaccagcagaacgccttcaccatgtgccccctgtgcgacaagagctgcgactactggaacctgagcagcgcctgcggcaccgcccaggccagccacctgttcgacaaccccgccaccgtgttcttcagcatcttcatggccctgtgggccaccatgttcctggagaactggaagagactgcagatgagactgggctacttctgggacctgaccggcatcgaggaggaggagcccagagtgcaggagcacagcagacccgagtacgagaccaaggtgagagagaagatgctgaaggagagcaaccagagcgccgtgcagaagctggagaccaacaccaccgagtgcggcgacgaggacgacgaggacaagctgacctggaaggacagattccccggctacctgatgaacttcgccagcatcctgttcatgatcgccctgaccttcagcatcgtgttcggcgtgatcgtgtacagaatcaccaccgccgccgccctgagcctgaacaaggccaccagaagcaacgtgagagtgaccgtgaccgccaccgccgtgatcatcaacctggtggtgatcctgatcctggacgagatctacggcgccgtggccaagtggctgaccaagatcgaggtgcccaagaccgagcagaccttcgaggagagactgatcctgaaggccttcctgctgaagttcgtgaacgcctacagccccatcttctacgtggccttcttcaagggcagattcgtgggcagacccggcagctacgtgtacgtgttcgacggctacagaatggaggagtgcgcccccggcggctgcctgatggagctgtgcatccagctgagcatcatcatgctgggcaagcagctgatccagaacaacatcttcgagatcggcgtgcccaagctgaagaagctgttcagaaagctgaaggacgagaccgaggccggcgagaccgacagcgcccacagcaagcaccccgagcagtgggacctggactacagcctggagccctacaccggcctgacccccgagtacatggagatgatcatccagttcggcttcgtgaccctgttcgtggccagcttccccctggcccccgtgttcgccctgctgaacaacgtgatcgaggtgagactggacgccaagaagttcgtgaccgagctgagaagacccgacgccgtgagaaccaaggacatcggcatctggttcgacatcctgagcggcatcggcaagttcagcgtgatcagcaacgccttcgtgatcgccatcaccagcgacttcatccccagactggtgtaccagtacagctacagccacaacggcaccctgcacggcttcgtgaaccacaccctgagcttcttcaacgtgagccagctgaaggagggcacccagcccgagaacagccagttcgaccaggaggtgcagttctgcagattcaaggactacagagagcccccctgggcccccaacccctacgagttcagcaagcagtactggttcatcctgagcgccagactggccttcgtgatcatcttccagaacctggtgatgttcctgagcgtgctggtggactggatgatccccgacatccccaccgacatcagcgaccagatcaagaaggagaagagcctgctggtggacttcttcctgaaggaggagcacgagaagctgaagctgatggacgagcccgccctgagaagccccggcggcggcgacagaagcagaagcagagccgccagcagcgcccccagcggccagagccagctgggcagcatgatgagcagcggcagccagcacaccaacgtgtag

SEQ ID NO: 98761 - DNA, 2183 bp, Artificial Sequence
  derived and/or modified sequence
gaggcgaccgtggccatgcagagtgctctgtgagtcaccgttaatttcagatggggtaaggtgaagagacgttccttgggagcccagaggagtacaggatctgatcccaagccctttaccaacaggccgcatgacacagcacttgtgagtgaggctgaacaagagaaatgagatttgaggatgtttcctgaggtcctactgtgtgccagctgcggccatgttagctaccaggaatatgaagatgaataaggagatcacaagtgaaaacagaaatgccaagataaacttggcccaagttcccttgggaattctcaggatcctacctggtgcagcagatcacaccagggagatgttactggatctttgatgagtggagcatccacagaggaaggaagtatgaaaatgagtgcgaatgtcaactcctgctaaaagaaatgcttgaacggcttaacaaggaagctgatgaagccttgctgcataacctacgccttcagctggaagcccaatttctgcaagatgatatcagtgcggcaaaggacaggcacaagaagaatcttctggaagttcagacctatatcagcatcctgcagcagatcatccacaccactcctccagcatccattgtgacgagtgggatgagggaggagaagctcctgacggagcgggaggtggccgccctgcggagtcagctggaggagggccgggaggtgctctcccacctgcaggcgcagagagtggagctgcaggcacagacaacaactctggaacaagctattaaaagtgcccatgagtgttatgacgatgagattcagctttataacgagcagattgagacactgcgcaaggagattgaggagacagagcgggtcctggagaagtcttcttacgactgccggcagctggcggtcgcccagcaaaccctgaagaatgagctggaccggtatcatcgtatcatcgagattgaaggcaacaggctgacctctgccttcattgaaactcccattcccctgttcacccagagccatggagtctctctcagcactggatccggtgggaaagatcttaccagagctctgcaggatataacagcagcaaaaccaagacaaaaagccctccccaagaatgttccaaggagaaaagagattataacaaaagacaaaaccaacggagctctggaagatgcaccattaaaaggtttggaagacacaaagctggtacaggtggtacttaaagaggaaagtgaatctaagtttgaatcagaaagtaaagaagtaagtcccctgacacaagaaggggctccagaggatgtgccagatggagggcagataagcaaaggctttgggaaactatacaggaaggtcaaggagaaagtgagaagccccaaagagcctgagacccccactgagctctacaccaaagagcggcacgtgctggtcacaggggatgccaattacgtggaccctagattctatgtctcctccatcacagctaaaggtggggtggctgtttctgttgcggaagactctgtgctttatgacggccaggtggagccctctcctgagtcacccaagccccctttagagaatgggcaggtgggtctgcaggagaaagaagatggacaaccaattgaccagcagcctatagacaaggagattgagccagatggtgcagagctggaaggccctgaagagaaacgtgagggtgaggagcgggacgaagagtccaggagaccctgtgccatggtcacacccggtgcagaggaaccatctatacctgagcctccaaagcctgcggctgatcaggatggagctgaggtgcttgggactaggagcagaagcctgccagaaaaaggccctcccaaggctttggcctataagacagtggaagtggtggaatctatcgagaagatttccacggagagcattcagacatatgaagaaaccgctgtgatcgtggagaccatgattggaaagacaaagtcagacaagaagaaatcaggagagaagagctcttaaaatgcccaggcttgatgggataaaatgtatttggggccactgtaggggtaatgctttgatattttagagcaaatgataaaagggtgagggttcctgtttggattagaccatagttgacccatctggcattgccaacgaagccttcattaaaatgttttctttgcttgc

SEQ ID NO: 98762 - DNA, 2075 bp, Artificial Sequence
  derived and/or modified sequence
cctttctttctcagcccagacctggccctctggagagggttttggagtcctgggtaggcagggtacctcaggcagcaggcagcacaccttggatgtgagctgaatggattttcaaatttcacagaaggagcctccatgctggagaaagtatagacagggtctcactatgttgcccagaatggggtgcagtggctattcacaggaatgatcattgctcactgcagccttgaactcccggtctccagtgatcctcccgcctcagcctctcaagtagctgggattacaggtatgaaaatgagtgcgaatgtcaactcctgctaaaagaaatgcttgaacggcttaacaaggaagctgatgaagccttgctgcataacctacgccttcagctggaagcccaatttctgcaagatgatatcagtgcggcaaaggacaggcacaagaagaatcttctggaagttcagacctatatcagcatcctgcagcagatcatccacaccactcctccagcatccattgtgacgagtgggatgagggaggagaagctcctgacggagcgggaggtggccgccctgcggagtcagctggaggagggccgggaggtgctctcccacctgcaggcgcagagagtggagctgcaggcacagacaacaactctggaacaagctattaaaagtgcccatgagtgttatgacgatgagattcagctttataacgagcagattgagacactgcgcaaggagattgaggagacagagcgggtcctggagaagtcttcttacgactgccggcagctggcggtcgcccagcaaaccctgaagaatgagctggaccggtatcatcgtatcatcgagattgaaggcaacaggctgacctctgccttcattgaaactcccattcccctgttcacccagagccatggagtctctctcagcactggatccggtgggaaagatcttaccagagctctgcaggatataacagcagcaaaaccaagacaaaaagccctccccaagaatgttccaaggagaaaagagattataacaaaagacaaaaccaacggagctctggaagatgcaccattaaaaggtttggaagacacaaagctggtacaggtggtacttaaagaggaaagtgaatctaagtttgaatcagaaagtaaagaagtaagtcccctgacacaagaaggggctccagaggatgtgccagatggagggcagataagcaaaggctttgggaaactatacaggaaggtcaaggagaaagtgagaagccccaaagagcctgagacccccactgagctctacaccaaagagcggcacgtgctggtcacaggggatgccaattacgtggaccctagattctatgtctcctccatcacagctaaaggtggggtggctgtttctgttgcggaagactctgtgctttatgacggccaggtggagccctctcctgagtcacccaagccccctttagagaatgggcaggtgggtctgcaggagaaagaagatggacaaccaattgaccagcagcctatagacaaggagattgagccagatggtgcagagctggaaggccctgaagagaaacgtgagggtgaggagcgggacgaagagtccaggagaccctgtgccatggtcacacccggtgcagaggaaccatctatacctgagcctccaaagcctgcggctgatcaggatggagctgaggtgcttgggactaggagcagaagcctgccagaaaaaggccctcccaaggctttggcctataagacagtggaagtggtggaatctatcgagaagatttccacggagagcattcagacatatgaagaaaccgctgtgatcgtggagaccatgattggaaagacaaagtcagacaagaagaaatcaggagagaagagctcttaaaatgcccaggcttgatgggataaaatgtatttggggccactgtaggggtaatgctttgatattttagagcaaatgataaaagggtgagggttcctgtttggattagaccatagttgacccatctggcattgccaacgaagccttcattaaaatgttttctttgcttgc

SEQ ID NO: 98763 - protein, 526 aa, Artificial Sequence
  derived and/or modified sequence
MLERLNKEADEALLHNLRLQLEAQFLQDDISAAKDRHKKNLLEVQTYISILQQIIHTTPPASIVTSGMREEKLLTEREVAALRSQLEEGREVLSHLQAQRVELQAQTTTLEQAIKSAHECYDDEIQLYNEQIETLRKEIEETERVLEKSSYDCRQLAVAQQTLKNELDRYHRIIEIEGNRLTSAFIETPIPLFTQSHGVSLSTGSGGKDLTRALQDITAAKPRQKALPKNVPRRKEIITKDKTNGALEDAPLKGLEDTKLVQVVLKEESESKFESESKEVSPLTQEGAPEDVPDGGQISKGFGKLYRKVKEKVRSPKEPETPTELYTKERHVLVTGDANYVDPRFYVSSITAKGGVAVSVAEDSVLYDGQVEPSPESPKPPLENGQVGLQEKEDGQPIDQQPIDKEIEPDGAELEGPEEKREGEERDEESRRPCAMVTPGAEEPSIPEPPKPAADQDGAEVLGTRSRSLPEKGPPKALAYKTVEVVESIEKISTESIQTYEETAVIVETMIGKTKSDKKKSGEKSS

SEQ ID NO: 98764 - DNA, 1581 bp, Artificial Sequence
  derived and/or modified sequence
atgctcgagcgactgaacaaagaggccgacgaggctctgctgcacaacctgcgcctgcagttggaggcccagtttttacaggatgacatctcggccgctaaagatcgccataagaaaaacctgcttgaggtgcaaacgtacatttctattcttcagcagattatccacaccactccacccgccagcatcgtcacaagtggcatgcgggaggaaaagctgttgactgaacgggaagtggcagccctgaggtcccagcttgaggagggcagggaggttctgtctcacttgcaggcacagagagtggagctccaggctcagactacaacccttgagcaggcaattaagagcgcacacgaatgttatgatgatgagatccaactttacaacgaacagatcgaaaccttgcgtaaagaaatcgaggaaaccgaaagagtgctggaaaagagcagctacgattgtagacagttagctgtcgctcaacagacgcttaagaacgagctcgatcggtatcataggatcatcgagatcgagggtaaccggctgacgtctgccttcatagagactcccattccactgtttacccagagccacggcgtatctctgtcaactggcagcggtggcaaggatctaacacgcgcattgcaagacatcacggcggctaagccaaggcaaaaggcactgcctaaaaatgtgcctcggaggaaagaaatcatcacgaaggacaagacaaatggcgccctggaagacgcacccttaaagggtctcgaggacaccaagctagttcaggtagtgctgaaggaggagtctgagtcaaagtttgagagcgagtcaaaagaggtcagccccttgacgcaggagggggcgccagaggacgtgccagatggggggcagatatcaaagggattcggaaaactgtatcggaaggtgaaagagaaagtacgttctcctaaggaacctgagaccccaactgagctgtataccaaagagagacatgtacttgttaccggggacgctaactacgtcgaccccagattctatgtgtctagcatcacggccaaaggaggggtggcagtctcagtggccgaggattcggtactctatgatggccaagtggagccttcaccagaatctcctaagccccccctggagaacggccaggtaggcctgcaggaaaaggaagacggacaaccaattgatcaacagcccattgacaaagaaatagagcccgatggagctgaactcgaaggacccgaggagaaacgagagggggaggagagggacgaagagagcaggaggccttgcgccatggttacccctggggccgaggaacccagcattcctgaacctcccaagcccgcggccgatcaagatggggctgaggtgttgggcactagatcacgctcccttcctgaaaaaggcccccccaaagctctcgcatacaagacagttgaagtggtggagtccatcgagaaaatcagcaccgaatcaatccagacttacgaagaaaccgcagtcatcgtcgagaccatgattggaaaaactaaaagtgacaagaaaaaatctggtgaaaagagcagctag

SEQ ID NO: 98765 - DNA, 1581 bp, Artificial Sequence
  derived and/or modified sequence
atgcttgagcggctgaataaagaagccgatgaagcactgctccacaatctgcggttgcaactagaagcccagtttctgcaggatgatatcagtgctgccaaagatcgccacaagaagaatctgttggaagtgcagacatacatcagtatcctgcaacagattattcacacgacacctcctgcaagcattgttacatccggcatgcgggaagaaaaactgctcactgaaagggaagttgcagcactgagatcacagctagaggaagggagagaagtgctgtcccatctccaggcccagagagtggaattgcaggcgcagaccaccacccttgagcaagcaatcaaatcagcgcatgagtgttatgatgacgagatccagctttataacgagcagatcgagaccctgcggaaggagatcgaagagaccgaacgagttctcgagaaatcgagctacgattgtagacagctggcagtcgcgcaacagacactcaaaaacgagctggatcggtatcatcgtatcattgaaattgaaggaaatagactgaccagtgcgttcattgagactcctattcccctcttcacgcagagtcacggcgttagcctgagcaccggctccggaggcaaggatttgacccgggcgctgcaggacattaccgccgctaagcctaggcagaaagccctgccaaaaaacgtgccacggaggaaggaaataataaccaaggataagacaaacggtgcactcgaggacgcgcctctcaaagggttagaggacaccaagcttgtccaggtggtgttgaaagaggaatctgagagcaaattcgagtcagagtccaaggaggtgtcccccctgacccaggagggggctccagaggacgtacccgacggcggccaaatttcaaagggcttcggaaagctgtaccggaaagtcaaggaaaaggtgcgttcacctaaggagcccgaaacacctacagagctgtatacaaaagagcgacacgtgctcgttacaggtgatgccaattacgtggaccctcgtttctatgtaagctctattaccgcaaaaggaggcgttgcagtgtcagttgcagaagattcagtcctctatgacggtcaggtcgagccttccccagagtcccctaaaccacccttggagaatggacaggtcggtctccaggagaaggaagatgggcagccaattgaccagcagccgatcgacaaggagatcgagcccgatggtgcagaactggaaggtcctgaagagaagcgtgaaggtgaagaacgcgatgaggagtcccgacgaccatgtgccatggtgactcccggcgccgaggaaccgtccatccccgagccgcccaagcctgctgcagaccaagatggtgccgaagtgttaggaaccagatcccggtcactccctgaaaaaggtccacccaaggctttagcctacaagaccgttgaggtggtggagagtatcgaaaagatctccacggagtccattcagacctacgaggagacagccgtaatcgttgagacaatgatcggtaagacgaaaagtgacaagaaaaagtccggcgagaaatcatcttag

SEQ ID NO: 98766 - DNA, 1581 bp, Artificial Sequence
  derived and/or modified sequence
atgctggagcggctgaacaaggaggctgatgaggccctgctgcacaacctgcggctgcagctggaggcccagttcctgcaggatgacatctctgctgccaaggacagacacaagaagaacctgctggaggtgcagacctacatcagcatcctgcagcagatcatccacaccaccccaccagccagcatcgtgaccagcggcatgagggaggagaagctgctgacagagcgggaggtggccgccctgcggagccagctggaggagggccgggaggtgctgagccacctgcaggcccagagggtggagctgcaggcccagaccaccaccctggagcaggccatcaagagcgcccatgaatgttatgatgatgagatccagctgtacaatgagcagatcgagaccctgaggaaggagattgaggagacagagcgggtgctggagaagagcagctatgactgccggcagctggccgtggcccagcagaccctgaagaatgagctggaccgctaccaccgcatcatcgagattgagggcaaccggctgaccagcgccttcatcgagacccccatccccctcttcacccagagccatggagtgtccctgagcactggaagtggcggcaaggacctgacccgggccctgcaggacatcacagctgccaagccccggcagaaggccctgcccaagaatgtgcccaggaggaaggagatcatcaccaaggacaagaccaacggggccctggaggatgcccccctgaagggcctggaggacaccaagctggtgcaggtggtgctgaaggaggagagcgagagcaagtttgaaagtgagagcaaggaggtgagccccctgacccaggagggcgccccagaagatgtgcctgatggcggccagatcagcaagggctttgggaagctgtacaggaaggtgaaggagaaggtgcgcagccccaaggagcctgagacccccacagagctgtacaccaaggagagacatgtgctggtgactggagatgccaactacgtggacccccgcttctacgtgagcagcatcacagccaagggcggcgtggccgtgtctgtggccgaggacagcgtgctgtatgatggccaggtggagcccagccctgagagccccaagccacccctggagaatggccaggtgggcctgcaggagaaggaggatggccagcccatcgaccagcagcccatcgacaaggagattgaaccagatggagctgagctggagggccctgaggagaagcgggagggggaggagagagatgaggagagcagaagaccctgtgccatggtgaccccaggagctgaggagcccagcatccctgagccccccaagccagctgctgaccaggatggagctgaggtgctgggcaccaggagccgcagcctgcctgagaagggcccccccaaggccctggcctacaagacagtggaggtggtggagagcattgagaagatcagcacagagagcatccagacctatgaggagacagctgtgattgtggagaccatgattggcaagaccaagagtgacaagaagaagtctggagagaagagcagctag

SEQ ID NO: 98767 - DNA, 1581 bp, Artificial Sequence
  derived and/or modified sequence
atgctggagcggctgaacaaggaggccgacgaggccctgctgcacaatttgcggctccagctggaagctcagttcttgcaggatgatatatccgctgccaaggaccgccacaaaaagaacctgcttgaggtccagacctacatctcaatactccagcagattatccatactactccgcctgcttctattgtgactagtgggatgcgggaagaaaagctgctgaccgagagggaagtggctgctctgaggagtcaactcgaagaaggcagagaagttctgagtcatttgcaggcgcaacgggtcgagctacaagcccagaccaccacactggaacaagccattaagtctgcccacgagtgttatgatgacgaaattcaactttacaacgagcaaatcgagacattgcggaaagagatagaagaaaccgaacgggtcctagaaaagagctcctacgattgtagacagttggctgtggcccagcagacattaaagaacgaacttgaccgatatcaccggatcatcgaaattgagggcaaccgacttaccagcgcattcatcgagacacccatcccgctgttcacccaatcgcatggggtgtctctatcgacaggaagcggaggcaaggacttgacccgggctttgcaagacatcacggccgcaaagccacgacaaaaagccctgcctaagaatgtgcccaggcgaaaagagattatcaccaaagacaaaactaatggcgcgctggaagacgctcctctgaagggcctggaggacactaaactcgtgcaggttgtgcttaaagaggagagcgagtctaagttcgaatccgaaagcaaggaagtcagccctttaacgcaggagggtgcacccgaagatgttcccgatggcggccagatatccaaaggattcggcaagctatataggaaagtcaaggagaaagtcagatcccctaaagaaccggagaccccaactgaattgtacaccaaagaacggcatgtcctggtcactggagacgcgaactatgtggatccacggttttacgtatcaagcattacggccaagggtggggtggcggtatccgtggcagaagactcagtcttatatgatgggcaggttgaaccaagccctgaatcccccaagcccccgctggagaacggccaggtcggactccaggaaaaggaggacggacagcccattgatcagcagcccatcgacaaggagatcgaacctgacggtgccgagctcgagggacccgaagagaaaagggagggggaggaaagggacgaggaatcccgccgaccgtgcgccatggtaaccccaggggccgaggagcccagcatacctgagcctccaaagccggccgctgaccaagatggagcggaggtgctcggaactaggagcaggtctctgccggagaaggggcctccgaaagcgctagcttacaaaacggtagaagtcgtcgaaagcatcgaaaagatttccaccgagagcattcagacctacgaagagacagcggtgatcgtggagactatgattggcaaaacaaagagtgataagaaaaagtccggggaaaaatcttcgtag

SEQ ID NO: 98768 - DNA, 1581 bp, Artificial Sequence
  derived and/or modified sequence
atgctggagcggctgaacaaggaggccgacgaggccctgctgcacaatcttagattacagctggaagcgcagtttttgcaggacgatattagtgctgccaaggatagacacaagaagaatctgctggaggttcagacttatatcagtattctgcagcaaattatccataccacgcctcccgctagcatcgtcacctccggcatgagagaagaaaaactgttaacagagcgagaggttgccgcactgagatcacaactagaagaagggcgcgaggtcctgagccatctgcaagcacaacgggtcgagcttcaggctcaaactactacgttagaacaggccattaaatctgcgcacgagtgctacgacgacgagattcagctgtacaatgaacagatcgagacactgcggaaggagatagaggagaccgagcgcgtactcgaaaaatcaagttacgactgcaggcagctggcagtagctcaacagaccttaaagaacgagctggaccggtaccacagaattattgagattgagggaaatcgcctcacttccgcttttattgagactccaatccctctgtttactcagagccacggagtctctctttccactggcagtggggggaaggatttaaccagagcactccaagatataacagccgcgaagcccagacagaaggcactccccaaaaatgtaccccgccgtaaggagatcatcaccaaagacaagacaaacggcgctcttgaagatgcgcctctgaaaggtctggaggacactaagcttgtgcaagtcgttctgaaagaggagtccgagtccaagtttgagagcgaaagcaaggaggtttccccgctaacccaggaaggagcccccgaggacgttccagacggcggacagatttctaaagggtttggaaagttgtatcggaaggtcaaagagaaggttagaagccccaaggagcccgaaaccccgacagagctctatactaaagagcgacacgtactggtcacaggggacgccaactatgtcgacccacgcttctacgtgtccagcataaccgccaaaggaggagtcgcagtcagcgtggcagaggacagtgtactgtatgatggtcaggtggagccttcaccagaatctccaaagcctcctctcgaaaatggccaggtgggactccaggaaaaagaggatggccaaccaattgatcagcagcccatcgacaaagaaattgaacccgacggcgcagagttggaaggaccagaggagaagcgggagggcgaggaaagggatgaggagagccgcaggccatgtgcgatggtgactccaggcgctgaagagcctagtatacccgagcccccaaaacccgccgctgatcaagatggggccgaggtcttgggcacgcgaagtcgctcgttacctgaaaaagggcctccaaaggccctggcatacaagacagttgaagtcgtggagtctattgaaaaaatatctacggagagcattcaaacatacgaagagacagcagtgattgtagagactatgatcggcaaaactaagtctgacaaaaagaaaagcggcgaaaagtcaagctag

SEQ ID NO: 98769 - DNA, 1581 bp, Artificial Sequence
  derived and/or modified sequence
atgctcgagcgcctaaataaggaggctgacgaagctctactgcacaacctgaggctgcagctagaggcccagttccttcaggatgatatctctgcagccaaagacaggcacaaaaagaacctgttagaggttcagacgtacatttcaatactacagcagatcatccatacaacccctccggcttctatcgtgactagtggcatgcgagaggagaagctgttgactgagcgggaagtcgctgccctgagatcacaattagaggagggcagggaggtcttgtcccatttgcaggctcagcgtgtggaactgcaggcacagacgactactctggagcaggcgattaaatccgcccacgagtgctatgatgatgagatccagctgtacaacgaacaaatcgagacgttgaggaaggagatcgaagagacagagcgggtgctggagaaaagctcttacgactgccgtcagctcgccgttgctcagcagaccctgaaaaacgagctagacagatatcatagaatcattgagattgaagggaaccggttgactagtgccttcattgaaactccaatccccctatttacacagtctcacggcgtatctctatctactggatcagggggaaaagacctgaccagagctctgcaggatatcactgctgcaaagcccaggcagaaggcccttcccaagaatgttcctaggagaaaggaaatcatcaccaaagacaaaactaatggcgctctggaagacgcccctctgaaggggcttgaggataccaaattagtgcaggtcgttctaaaggaagaaagcgagagcaaatttgaaagtgagtcaaaggaggtgtccccactcacccaggagggtgcccctgaggatgtgcctgacgggggtcagataagcaaggggttcggaaaactgtaccgcaaggtaaaagagaaggtgcgctcccccaaggagcctgagacccctacagaactatatacaaaggaaagacatgtattggtcacaggcgacgctaattatgtcgaccctcgtttctatgtttcttctatcactgccaagggcggtgtcgccgtctccgtcgccgaggacagtgttctttatgacggacaggtggagccttcccccgaaagtcccaagccaccactggagaatggacaagttggtctccaagagaaggaggacggccagcccattgaccaacagcctattgacaaggaaatcgagccagacggggcagagctggagggccctgaggaaaaaagggagggtgaagagcgtgatgaagaaagtcggaggccgtgtgctatggtgaccccaggagccgaggaacctagcatcccagagcctcccaaacccgcagccgaccaggacggggctgaagtgctggggacaagatcccgaagccttcccgaaaagggccctcctaaagcgctggcttacaagacagtagaagtcgtggaatccatagagaagatttccaccgagtcaattcagacttacgaggaaacagccgtaatagtcgagactatgattggcaagactaagtcagataaaaagaagagtggtgagaagtcctcctag

SEQ ID NO: 98770 - DNA, 1581 bp, Artificial Sequence
  derived and/or modified sequence
atgctagaaagactgaataaagaagccgatgaagccttgttgcacaatttgcggttacagctggaagcgcagttcctgcaagatgacatttctgcagccaaagaccgccacaagaagaatctgctggaggttcagacttatatctctatattacaacagatcatccacaccaccccccctgccagtatcgtgacctccggaatgcgagaggagaagctcttgacggagcgtgaagtggctgccctccggtcccagcttgaagagggacgagaagtgctgtcacacctgcaagcacagcgggttgagctgcaagcgcagacaacgacactcgagcaggccataaaatccgcacacgagtgttatgacgacgagatccagctgtacaatgaacaaattgagacactcagaaaagaaattgaggagaccgaaagagtccttgagaaaagctcgtacgactgcaggcaattggctgtggcacagcaaaccttaaaaaatgagcttgatcgataccacagaatcatagaaatcgagggaaatcgtctgaccagcgcattcatagaaaccccgatccccctgttcacccagtcccatggagtgagtctgtctacaggtagtggcggaaaggacctcacccgagcgctgcaggacatcacggctgctaagccacgccaaaaggcactgcccaagaatgtgcccagacgcaaagagatcatcaccaaggacaagacaaatggcgctctcgaagacgcccctctcaagggtctcgaagataccaaattagttcaagtcgtgcttaaagaagagagcgagagtaaatttgaatccgagtccaaagaagtgagccccttgacacaagagggagcgccagaggatgtccctgatggcggacaaataagtaagggattcggcaagctctaccggaaggtgaaggaaaaagtgcggagccccaaggaacctgagacacctactgaactatacacaaaagagcggcacgtgctggtgactggggatgctaactatgtcgaccccagattctatgtgtccagcatcactgccaagggaggggtagccgtatctgtggcagaagacagcgtcctctatgatggacaggtggagcccagccctgagagcccaaagccccctctggagaacgggcaagtcggactccaagagaaggaagatgggcagccaattgaccagcagcctatcgataaggagattgagcccgatggagcggagctcgaaggacctgaggaaaagagggaaggagaagagcgggatgaggagtcccgacgaccatgtgcaatggtgacgcccggagccgaagaaccctccatacccgaaccgccaaagcccgctgcagaccaagacggggcagaagtgctaggaacgcgtagccggtccttaccagaaaagggacccccaaaagctctggcctacaaaacagtggaggtcgtagagagcatcgaaaagatctccacagagtccattcagacctacgaagagaccgccgtaatcgtcgagacaatgataggaaagactaagtctgacaaaaagaagagtggtgagaagagtagctag

SEQ ID NO: 98771 - DNA, 1581 bp, Artificial Sequence
  derived and/or modified sequence
atgctggagagactgaacaaggaggccgacgaggccctgctgcacaacctgagactgcagctggaggcccagttcctgcaggacgacatcagcgccgccaaggacagacacaagaagaacctgctggaggtgcagacctacatcagcatcctgcagcagatcatccacaccaccccccccgccagcatcgtgaccagcggcatgagagaggagaagctgctgaccgagagagaggtggccgccctgagaagccagctggaggagggcagagaggtgctgagccacctgcaggcccagagagtggagctgcaggcccagaccaccaccctggagcaggccatcaagagcgcccacgagtgctacgacgacgagatccagctgtacaacgagcagatcgagaccctgagaaaggagatcgaggagaccgagagagtgctggagaagagcagctacgactgcagacagctggccgtggcccagcagaccctgaagaacgagctggacagataccacagaatcatcgagatcgagggcaacagactgaccagcgccttcatcgagacccccatccccctgttcacccagagccacggcgtgagcctgagcaccggcagcggcggcaaggacctgaccagagccctgcaggacatcaccgccgccaagcccagacagaaggccctgcccaagaacgtgcccagaagaaaggagatcatcaccaaggacaagaccaacggcgccctggaggacgcccccctgaagggcctggaggacaccaagctggtgcaggtggtgctgaaggaggagagcgagagcaagttcgagagcgagagcaaggaggtgagccccctgacccaggagggcgcccccgaggacgtgcccgacggcggccagatcagcaagggcttcggcaagctgtacagaaaggtgaaggagaaggtgagaagccccaaggagcccgagacccccaccgagctgtacaccaaggagagacacgtgctggtgaccggcgacgccaactacgtggaccccagattctacgtgagcagcatcaccgccaagggcggcgtggccgtgagcgtggccgaggacagcgtgctgtacgacggccaggtggagcccagccccgagagccccaagccccccctggagaacggccaggtgggcctgcaggagaaggaggacggccagcccatcgaccagcagcccatcgacaaggagatcgagcccgacggcgccgagctggagggccccgaggagaagagagagggcgaggagagagacgaggagagcagaagaccctgcgccatggtgacccccggcgccgaggagcccagcatccccgagccccccaagcccgccgccgaccaggacggcgccgaggtgctgggcaccagaagcagaagcctgcccgagaagggcccccccaaggccctggcctacaagaccgtggaggtggtggagagcatcgagaagatcagcaccgagagcatccagacctacgaggagaccgccgtgatcgtggagaccatgatcggcaagaccaagagcgacaagaagaagagcggcgagaagagcagctag

SEQ ID NO: 98772 - protein, 676 aa, Artificial Sequence
  derived and/or modified sequence
MSRRTRCEDLDELHYQDTDSDVPEQRDSKCKVKWTHEENRTDQQCQYRWLRVLNPDLVKGPWTKEEDQKVIELVKKYGTKQWTLIAKHLKGRLGKQCRERWHNHLNPEVKKSCWTEEEDRIICEAHKVLGNRWAEIAKMLPGRTDNAVKNHWNSTIKRKVDTGGFLSESKDCKPPVYLLLELEDKDGLQSAQPTEGQGSLLTNWPSVPPTIKEEENSEEELAAATTSKEQEPIGTDLDAVRTPEPLEEFPKREDQEGSPPETSLPYKWVVEAANLLIPAVGSSLSEALDLIESDPDAWCDLSKFDLPEEPSAEDSINNSLVQLQASHQQQVLPPRQPSALVPSVTEYRLDGHTISDLSRSSRGELIPISPSTEVGGSGIGTPPSVLKRQRKRRVALSPVTENSTSLSFLDSCNSLTPKSTPVKTLPFSPSQFLNFWNKQDTLELESPSLTSTPVCSQKVVVTTPLHRDKTPLHQKHAAFVTPDQKYSMDNTPHTPTPFKNALEKYGPLKPLPQTPHLEEDLKEVLRSEAGIELIIEDDIRPEKQKRKPGLRRSPIKKVRKSLALDIVDEDVKLMMSTLPKSLSLPTTAPSNSSSLTLSGIKEDNSLLNQGFLQAKPEKAAVAQKPRSHFTTPAPMSSAWKTVACGGTRDQLFMQEKARQLLGRLKPSHTSRTLILS

SEQ ID NO: 98773 - DNA, 2031 bp, Artificial Sequence
  derived and/or modified sequence
atgagcagaagaaccagatgcgaggacctggacgagctgcactaccaggacaccgacagcgacgtgcccgagcagagagacagcaagtgcaaggtgaagtggacccacgaggagaacagaaccgaccagcagtgccagtacagatggctgagagtgctgaaccccgacctggtgaagggcccctggaccaaggaggaggaccagaaggtgatcgagctggtgaagaagtacggcaccaagcagtggaccctgatcgccaagcacctgaagggcagactgggcaagcagtgcagagagagatggcacaaccacctgaaccccgaggtgaagaagagctgctggaccgaggaggaggacagaatcatctgcgaggcccacaaggtgctgggcaacagatgggccgagatcgccaagatgctgcccggcagaaccgacaacgccgtgaagaaccactggaacagcaccatcaagagaaaggtggacaccggcggcttcctgagcgagagcaaggactgcaagccccccgtgtacctgctgctggagctggaggacaaggacggcctgcagagcgcccagcccaccgagggccagggcagcctgctgaccaactggcccagcgtgccccccaccatcaaggaggaggagaacagcgaggaggagctggccgccgccaccaccagcaaggagcaggagcccatcggcaccgacctggacgccgtgagaacccccgagcccctggaggagttccccaagagagaggaccaggagggcagcccccccgagaccagcctgccctacaagtgggtggtggaggccgccaacctgctgatccccgccgtgggcagcagcctgagcgaggccctggacctgatcgagagcgaccccgacgcctggtgcgacctgagcaagttcgacctgcccgaggagcccagcgccgaggacagcatcaacaacagcctggtgcagctgcaggccagccaccagcagcaggtgctgccccccagacagcccagcgccctggtgcccagcgtgaccgagtacagactggacggccacaccatcagcgacctgagcagaagcagcagaggcgagctgatccccatcagccccagcaccgaggtgggcggcagcggcatcggcaccccccccagcgtgctgaagagacagagaaagagaagagtggccctgagccccgtgaccgagaacagcaccagcctgagcttcctggacagctgcaacagcctgacccccaagagcacccccgtgaagaccctgcccttcagccccagccagttcctgaacttctggaacaagcaggacaccctggagctggagagccccagcctgaccagcacccccgtgtgcagccagaaggtggtggtgaccacccccctgcacagagacaagacccccctgcaccagaagcacgccgccttcgtgacccccgaccagaagtacagcatggacaacaccccccacacccccacccccttcaagaacgccctggagaagtacggccccctgaagcccctgccccagaccccccacctggaggaggacctgaaggaggtgctgagaagcgaggccggcatcgagctgatcatcgaggacgacatcagacccgagaagcagaagagaaagcccggcctgagaagaagccccatcaagaaggtgagaaagagcctggccctggacatcgtggacgaggacgtgaagctgatgatgagcaccctgcccaagagcctgagcctgcccaccaccgcccccagcaacagcagcagcctgaccctgagcggcatcaaggaggacaacagcctgctgaaccagggcttcctgcaggccaagcccgagaaggccgccgtggcccagaagcccagaagccacttcaccacccccgcccccatgagcagcgcctggaagaccgtggcctgcggcggcaccagagaccagctgttcatgcaggagaaggccagacagctgctgggcagactgaagcccagccacaccagcagaaccctgatcctgagctag

SEQ ID NO: 98774 - DNA, 2031 bp, Artificial Sequence
  derived and/or modified sequence
atgtccagaagaactcgatgcgaggacctggatgagttacattaccaggatacggatagcgacgtccccgagcagagggattcgaaatgcaaggtcaagtggacccatgaagagaatcggactgatcagcagtgccagtaccgctggctgcgagtgctcaatcctgacctggtgaaggggccgtggactaaagaagaggatcaaaaggtgattgagctggtcaagaaatacggaactaagcaatggacgctcatcgctaagcacttgaagggtagactcggcaaacagtgccgggaaagatggcataatcatctgaacccagaagtaaaaaagtcatgttggaccgaagaagaagacagaatcatctgtgaggcccataaggtgctgggcaacaggtgggccgagatagccaagatgctgccaggcagaaccgacaacgccgtgaaaaaccactggaactctacgataaaaaggaaagtcgacaccggagggtttctgagcgaatctaaggattgcaagccacccgtatacctcctgttagagcttgaagataaggacgggctccagtcagcccagcccacagaggggcaaggctctctgctaacaaattggccaagtgtaccacccaccataaaggaggaggagaacagcgaagaagagctggccgcagcgacaacatctaaggagcaagagcctattggcaccgatcttgacgctgtcaggacccccgagccattggaagagtttcctaaaagagaagaccaggaaggcagtccacctgagaccagtctgccttacaaatgggtcgtggaagctgccaatctgcttattcccgcagttggtagctccttgtccgaggctctcgacctgatcgaatccgaccctgatgcatggtgtgatctgtctaaattcgatttgcctgaagagcccagcgccgaggattctattaacaacagtctggtgcagctgcaggctagtcaccagcagcaggtcttacccccccgacaacccagtgccctggtgccctcagtcacagaataccgccttgacggacacaccatttccgacctcagtagaagttcaaggggcgaattgatccccatcagtcccagcacagaagtgggcgggagcgggattggcacacctccaagcgttttaaagcgccagagaaagcgacgggtagcactaagccctgtgacagagaactcaacctctctttcttttctcgactcctgtaattcactaactcccaagtccactcccgtaaagactcttccgttctcaccctcccagttccttaacttttggaacaagcaagataccctggaactggagtcgccatctttaactagtacgccagtctgttctcaaaaagtggtggtcactacacctctgcatagggataagacacctctccatcaaaagcatgccgcttttgtgacccctgaccagaaatacagcatggataatactcctcatactccaaccccgttcaaaaacgccttggaaaaatatggacctctcaagcctcttccccagacgcctcacctagaagaagacctaaaggaggtgttacgatccgaggccggaatcgaattgattattgaagacgacattcgcccagagaaacaaaagcgaaagccaggcctcagacgctcgcccatcaagaaggtgcgtaaaagtttagcccttgacatcgttgacgaagacgtcaagctgatgatgagcacactacccaagtccctaagcctacctaccaccgctccctctaactccagctccctgaccctgtccgggattaaggaggacaactctttgcttaaccagggttttctccaggctaaaccagagaaagccgccgtggcgcaaaagcctaggtcacacttcactaccccagcgcccatgtccagcgcgtggaagacagttgcgtgtggtggtacccgggatcagctgttcatgcaggagaaggccaggcagctgctaggccgcctgaagccgtcacacacctctcgtacgcttatcctgtcctag

SEQ ID NO: 98775 - DNA, 2031 bp, Artificial Sequence
  derived and/or modified sequence
atgagcaggaggacccgctgtgaggacctggatgagctgcactaccaggacacagacagtgatgtgcctgagcagagggacagcaagtgcaaggtgaagtggacccatgaggagaacagaacagaccagcagtgccagtaccgctggctgcgggtgctgaacccagacctggtgaagggcccctggaccaaggaggaggaccagaaggtgattgagctggtgaagaagtatggcaccaagcagtggaccctgattgccaagcacctgaagggccgcctgggcaagcagtgccgggagcgctggcacaaccacctgaaccctgaggtgaagaagagctgctggacagaggaggaggaccgcatcatctgtgaggcccacaaggtgctgggcaaccgctgggccgagatcgccaagatgctgcccggccgcacagacaatgctgtgaagaaccactggaacagcaccatcaagaggaaggtggacaccggcggcttcctgtctgagagcaaggactgcaagccccctgtgtacctgctgctggagctggaggacaaggatggcctgcagagcgcccagcccacagagggccagggcagcctgctgaccaactggcccagcgtgccccccaccatcaaggaggaggagaacagcgaggaggagctggccgccgccaccaccagcaaggagcaggagcccatcggcacagacctggatgctgtgaggaccccagagcccctggaggagttccccaagcgggaggaccaggagggcagccccccagagaccagcctgccctacaagtgggtggtggaggccgccaacctgctgatcccagctgtgggcagcagcctgtctgaggccctggacctgattgaaagtgaccctgatgcctggtgtgacctgagcaagtttgacctgcctgaggagcccagcgcagaagattccatcaacaacagcctggtgcagctgcaggccagccaccagcagcaggtgctgcccccccggcagcccagcgccctggtgcccagcgtgacagagtaccgcctggatggccacaccatcagtgacctgagccgcagcagcagaggagagctgatccccatcagccccagcacagaggtgggcggcagcggcatcggcaccccacccagcgtgctgaagaggcagaggaagagaagagtggccctgagccctgtgacagagaacagcaccagcctgtccttcctggacagctgcaacagcctgacccccaagagcacccctgtgaagaccctgcccttcagccccagccagttcctgaacttctggaacaagcaggacaccctggagctggagagccccagcctgaccagcacccctgtgtgcagccagaaggtggtggtgaccacccccctgcaccgggacaagacccccctgcaccagaagcatgctgcctttgtgaccccagaccagaagtacagcatggacaacaccccccacacccccacccccttcaagaatgccctggagaagtatggccccctgaagcccctgccccagaccccccacctggaggaggacctgaaggaggtgctgcggtctgaggccggcatcgagctgatcattgaagatgacatccggcctgagaagcagaagaggaagccaggcctgcggcgcagccccatcaagaaggtgaggaagagcctggccctggacatcgtggatgaagatgtgaagctgatgatgagcaccctgcccaagagcctgagcctgcccaccacagcccccagcaacagcagcagcctgaccctgagcggcatcaaggaggacaacagcctgctgaaccagggcttcctgcaggccaagccagagaaggctgctgtggcccagaagcccaggagccacttcaccaccccagcccccatgagcagcgcctggaagacagtggcctgtggcggcacccgggaccagctgttcatgcaggagaaggcccggcagctgctgggccgcctgaagcccagccacaccagcaggaccctcatcctgtcctag

SEQ ID NO: 98776 - DNA, 2031 bp, Artificial Sequence
  derived and/or modified sequence
atgagccggcggacccggtgcgaggacctggacgagctgcactaccaggatacagactctgatgtccccgaacagcgcgactcaaaatgcaaggtgaagtggactcatgaagagaaccgtacagaccagcagtgccagtacaggtggttgcgggtgcttaatccagatctggtgaagggaccatggacaaaagaggaggatcagaaggtgatagaactagtcaagaagtatggcaccaagcagtggaccttgattgcaaagcacctcaaaggccgcctgggcaagcagtgtagagaaaggtggcataaccacctgaatcccgaagtcaagaagtcatgctggaccgaagaggaagacagaatcatttgcgaagcacataaagttctcggaaaccgctgggccgagattgccaaaatgctgccaggcaggacagataatgctgtcaagaaccattggaactcaaccattaaaagaaaagtagatacaggcggatttctgtctgaaagcaaggactgtaagccccctgtttacttgttgctggagctagaggacaaagacgggttacagtccgcccagcctacagaggggcaaggctccctgttaaccaactggccttccgtgcctcctacaattaaggaggaggagaatagtgaggaggagctggcagcagccacgactagcaaagagcaggagccgataggaacagatctggacgccgtcagaacgccagagcccctcgaagaattccctaagcgggaagaccaggagggctcccctcctgaaacaagtctgccatacaagtgggttgtggaggccgctaacctcctcatccccgcagttggatcctctctttccgaggcccttgatttaatcgaatcagaccctgacgcctggtgcgatctgagtaagttcgacctgcctgaggagcccagcgccgaggattccattaacaactcgctggtgcaattgcaggcgtctcaccaacagcaggtattgccaccccgacaaccaagtgcattggtgccttcggtcactgaatatcggctggatggacacacaattagtgatctgagtcgctctagtagaggtgagctgatcccaatttctccaagtacagaggttgggggatccggaatcggtaccccaccatcagtgctcaagagacagcggaagcgccgggtggcactatcaccagtgacagaaaactcgacaagcttgagcttcctcgattcatgtaactccctgacaccaaagagtactcctgtgaaaaccctgccctttagcccatctcaattcctcaacttctggaacaaacaggatactctcgagcttgaatcaccttccctcaccagtacaccagtctgtagtcagaaggtggtggtgaccaccccactgcacagagacaaaacaccactccatcagaagcacgctgcttttgttactccggatcagaaatacagcatggacaacacaccccatacaccaactccgttcaagaacgctttggaaaagtacggacctctgaaaccgctgccgcagactcctcacctggaagaggacctaaaggaagtgcttcgctctgaggccggcatagagttaattatcgaggacgatatcagacctgagaaacaaaagcgaaagcccggcctgagacgcagtcctataaagaaggtgagaaagtccctcgctttggatattgtggacgaagacgtaaaactgatgatgtctacactgcccaaatccctgagcttgcccaccacggccccatccaactccagttctctcaccctcagtggaattaaagaggataactctcttctcaaccagggttttctgcaagccaagcccgagaaagcggcagtcgcccaaaaacctcgctcacactttacgactccggctcccatgagttcagcctggaagacagtcgcatgtggaggaacaagggatcagctgttcatgcaagagaaggctcgacagctgttgggtaggctcaagccctcacacacctcccgaactctgattctctcttag

SEQ ID NO: 98777 - DNA, 2031 bp, Artificial Sequence
  derived and/or modified sequence
atgtcaaggcgtactcggtgcgaggacttggacgagctgcattaccaagacacagattctgatgtgcccgagcagagggattccaagtgcaaggtgaagtggacccacgaagaaaatcgtactgatcagcaatgccagtacagatggttgcgcgttctgaaccccgacctggtaaagggcccttggaccaaagaggaggaccagaaggtcattgagctggtaaaaaagtatgggaccaagcaatggaccctgatcgctaagcacctgaaaggcaggctgggcaagcagtgccgcgagagatggcacaaccacctgaaccccgaggtcaagaaaagctgctggacagaggaagaggaccgaattatctgcgaagctcacaaggttctgggcaaccgctgggccgaaattgccaaaatgctccccggacgcacagacaatgctgtcaaaaatcactggaatagtactattaaacgcaaggtggatactggcggtttcctatcagaatctaaggattgcaagccacccgtatatctcctacttgaacttgaagacaaagacggcctgcagtccgcacagcctacagaggggcagggaagccttctgactaactggcccagtgtgcctcctaccatcaaggaggaagaaaactctgaggaagaactggctgctgccactacttctaaagagcaggagccaattgggacagacctggacgccgtgagaacaccagagcccctggaggagttccccaagagggaagaccaagaaggaagtccccctgaaacaagcctaccatacaaatgggttgtagaagcagccaatctgctgatcccggcagtgggctcatccctaagtgaggctctggatctgattgaatcggacccggacgcctggtgcgatctgagcaagttcgatttgccagaggaacctagtgccgaggactcaatcaacaattctttagtccagctccaggcctctcaccagcagcaggtcctcccccctcggcagccctctgcgttggtgccttcagtaacagaatatcgcctcgacggccacactattagtgatctctctcgcagttccagaggcgagctcatcccgatctctcccagtacagaggtggggggatccggcatcggaacacctccatctgtgctcaagcgccagcgaaagaggagggtagctttaagcccagtaactgaaaactcaacctctctgagtttcctggattcctgcaattctctgactccaaaaagtacacccgtcaaaacgctcccattcagccccagtcaatttctgaatttttggaacaaacaagatactctggaactggaaagcccctctctgacctccacacccgtatgtagccagaaagtggtcgtgaccacaccccttcaccgcgacaagacaccgctgcaccaaaaacacgctgccttcgtgacccctgatcagaaatacagtatggataatactcctcatacaccaaccccctttaaaaacgcactggaaaaatatgggcctctgaaacccctgcctcagacccctcatctagaagaagacctgaaggaagttctgcgctccgaggcaggtatagaactcatcattgaggatgacatccggcctgaaaaacagaagcgaaagcccggactgaggcggtcgccaattaagaaggttcgaaaatcactcgccttggatatcgtggacgaagacgttaagctgatgatgtccaccctgcctaagagcctgtccctgccgaccacagctcctagtaactcgtcatcccttaccctgtccgggattaaagaggataactcgttgctcaaccaaggcttcctccaggcgaagccggaaaaggcagctgtggcacagaagccacgcagccattttaccacccccgctcctatgtcttcagcgtggaagaccgtcgcctgtggtggaacccgagaccagctgttcatgcaggagaaggctagacaactattgggtcgccttaagccaagccatactagcagaactctgattctatcctag

SEQ ID NO: 98778 - DNA, 2432 bp, Artificial Sequence
  derived and/or modified sequence
gactgcagttcctgcgagcgaggagcgcgggacctgctgacacgctgacgccttcgagcgcggcccggggcccggagcggccggagcagcccgggtcctgaccccggcccggctcccgctccgggctctgccggcgggcgggcgagcgcggcgcggtccgggccggggggatgtctcggcggacgcgctgcgaggatctggatgagctgcactaccaggacacagattcagatgtgccggagcagagggatagcaagtgcaaggtcaaatggacccatgaggagaaccgcactgaccagcaatgccagtacaggtggctgagagttttgaatccagaccttgtcaaggggccatggaccaaagaggaagaccaaaaagtcatcgagctggttaagaagtatggcacaaagcagtggacactgattgccaagcacctgaagggccggctggggaagcagtgccgtgaacgctggcacaaccacctcaaccctgaggtgaagaagtcttgctggaccgaggaggaggaccgcatcatctgcgaggcccacaaggtgctgggcaaccgctgggccgagatcgccaagatgttgccagggaggacagacaatgctgtgaagaatcactggaactctaccatcaaaaggaaggtggacacaggaggcttcttgagcgagtccaaagactgcaagcccccagtgtacttgctgctggagctcgaggacaaggacggcctccagagtgcccagcccacggaaggccagggaagtcttctgaccaactggccctccgtccctcctaccataaaggaggaggaaaacagtgaggaggaacttgcagcagccaccacatcgaaggaacaggagcccatcggtacagatctggacgcagtgcgaacaccagagcccttggaggaattcccgaagcgtgaggaccaggaaggctccccaccagaaacgagcctgccttacaagtgggtggtggaggcagctaacctcctcatccctgctgtgggttctagcctctctgaagccctggacttgatcgagtcggaccctgatgcttggtgtgacctgagtaaatttgacctccctgaggaaccatctgcagaggacagtatcaacaacagcctagtgcagctgcaagcgtcacatcagcagcaagtcctgccaccccgccagccttccgccctggtgcccagtgtgaccgagtaccgcctggatggccacaccatctcagacctgagccggagcagccggggcgagctgatccccatctcccccagcactgaagtcgggggctctggcattggcacaccgccctctgtgctcaagcggcagaggaagaggcgtgtggctctgtcccctgtcactgagaatagcaccagtctgtccttcctggattcctgtaacagcctcacgcccaagagcacacctgttaagaccctgcccttctcgccctcccagtttctgaacttctggaacaaacaggacacattggagctggagagcccctcgctgacatccaccccagtgtgcagccagaaggtggtggtcaccacaccactgcaccgggacaagacacccctgcaccagaaacatgctgcgtttgtaaccccagatcagaagtactccatggacaacactccccacacgccaaccccgttcaagaacgccctggagaagtacggacccctgaagcccctgccacagaccccgcacctggaggaggacttgaaggaggtgctgcgttctgaggctggcatcgaactcatcatcgaggacgacatcaggcccgagaagcagaagaggaagcctgggctgcggcggagccccatcaagaaagtccggaagtctctggctcttgacattgtggatgaggatgtgaagctgatgatgtccacactgcccaagtctctatccttgccgacaactgccccttcaaactcttccagcctcaccctgtcaggtatcaaagaagacaacagcttgctcaaccagggcttcttgcaggccaagcccgagaaggcagcagtggcccagaagccccgaagccacttcacgacacctgcccctatgtccagtgcctggaagacggtggcctgcggggggaccagggaccagcttttcatgcaggagaaagcccggcagctcctgggccgcctgaagcccagccacacatctcggaccctcatcttgtcctgaggtgttgagggtgtcacgagcccattctcatgtttacaggggttgtgggggcagagggggtctgtgaatctgagagtcattcaggtgacctcctgcagggagccttctgccaccagcccctccccagactctcaggtggaggcaacagggccatgtgctgccctgttgccgagcccagctgtgggcggctcctggtgctaacaacaaagttccacttccaggtctgcctgg

SEQ ID NO: 98779 - protein, 127 aa, Artificial Sequence
  derived and/or modified sequence
MPKNKGKGGKNRRRGKNENESEKRELVFKEDGQEYAQVIKMLGNGRLEALCFDGVKRLCHIRGKLRKKDNKADVILKYNADEARSLKAYGELPEHAKINETDTFGPGDDDEIQFDDIGDDDEDIDDI

SEQ ID NO: 98780 - DNA, 746 bp, Artificial Sequence
  derived and/or modified sequence
tcttagttcagtcggctcttagagtagtaaccgccagaaaggagtcggaagaggtctcacgaggctgtcatcaccgccatgcccaagaataaaggtaaaggaggtaaaaacaggcgcaggggtaaaaatgagaatgaatctgaaaaaagagagttggtgtttaaagaggatggacaagagtatgctcaggtaatcaaaatgttgggaaatggacgattggaagcattgtgttttgatggtgtaaagaggttatgccatatcagagggaaattgagaaaaaaggataacaaagctgatgtaattttaaagtacaatgcagatgaagctagaagcctgaaggcatatggcgagcttccagaacatgctaaaatcaatgaaacagacacatttggtcctggagatgatgatgaaatccagtttgacgatattggagatgatgatgaagacattgatgatatctaaattgaaccaagtgtttttacatgacaagttctctgaggatggttctacagttgggattttggccatcatcaaccaagaagagaaattcatttagtgtgtagtttctgaaagcaaactgatttattttcattgttttaaagtatttatttctttaaaagctgaggacactgaattaccttaagttaaatgttaatactttattgttttgatgtaatggaacttaaggataaaagaccataatatttgctgttaaaataaataaacgagtgcctttcctactgtga

SEQ ID NO: 98781 - DNA, 384 bp, Artificial Sequence
  derived and/or modified sequence
atgcctaagaacaaggggaagggtggcaagaacaggcgtaggggaaagaacgagaacgaaagcgagaagagggaattagtcttcaaagaggatggacaggaatatgcacaagttataaagatgcttggtaatgggagattagaagccttatgctttgatggcgtgaagagactgtgccatatccgcggtaagctacgaaagaaagataataaagctgacgtgattttgaaatataatgcggatgaggcaagaagcctcaaagcgtatggcgagctgcccgagcacgccaagatcaacgagactgatacattcggccctggcgacgatgacgagattcagtttgatgacatcggcgacgatgatgaggatatagacgacatctag

SEQ ID NO: 98782 - DNA, 384 bp, Artificial Sequence
  derived and/or modified sequence
atgcccaagaacaagggcaaaggaggcaagaacagaagaagaggcaagaatgaaaatgaaagtgagaagcgggagctggtgttcaaggaggatggccaggagtatgcccaggtgatcaagatgctgggcaatggccgcctggaggccctgtgctttgatggagtgaagaggctgtgccacatccggggcaagctgaggaagaaggacaacaaggcagatgtgatcctgaagtacaatgctgatgaggcccggagcctgaaggcctatggagagctgcctgagcacgccaagatcaatgaaacagacaccttcggccctggagatgatgatgagatccagtttgatgacattggagatgatgatgaggacattgatgacatctag

SEQ ID NO: 98783 - DNA, 384 bp, Artificial Sequence
  derived and/or modified sequence
atgcccaagaacaagggcaagggcggcaagaaccggcggcggggcaaaaacgaaaacgaatccgaaaagcgcgaattagtgtttaaggaagacggccaggagtatgcacaagtcatcaagatgctcggaaatggtaggctagaagctctctgttttgacggcgttaaacgtctttgccatatccgcgggaagttgagaaagaaagataataaagcggacgtcatactcaagtacaacgcagatgaagccaggtcgctgaaagcttatggggagttgcccgaacacgcaaaaataaacgaaactgacactttcgggcccggagatgatgatgagattcaatttgatgatattggcgacgatgacgaggatatcgacgacatatag

SEQ ID NO: 98784 - DNA, 384 bp, Artificial Sequence
  derived and/or modified sequence
atgcctaagaataagggcaagggcggaaagaatcgcagaagggggaagaatgagaatgaaagtgaaaaacgagaactagtcttcaaggaggacggtcaggaatacgctcaagtgattaagatgctgggtaatgggcgactcgaagccttgtgtttcgatggggtgaagcgactgtgtcacatccgcggaaaacttcgaaagaaagataacaaggctgacgttatcttaaagtataatgccgacgaggcccgttccctcaaggcatatggtgaattaccagaacacgccaagatcaatgagaccgatacgtttggacccggagatgacgacgagatacaatttgacgacatcggggatgacgatgaggatattgacgatatttag

SEQ ID NO: 98785 - DNA, 384 bp, Artificial Sequence
  derived and/or modified sequence
atgcccaagaacaagggcaagggcggcaagaacagaagaagaggcaagaacgagaacgagagcgagaagagagagctggtgttcaaggaggacggccaggagtacgcccaggtgatcaagatgctgggcaacggcagactggaggccctgtgcttcgacggcgtgaagagactgtgccacatcagaggcaagctgagaaagaaggacaacaaggccgacgtgatcctgaagtacaacgccgacgaggccagaagcctgaaggcctacggcgagctgcccgagcacgccaagatcaacgagaccgacaccttcggccccggcgacgacgacgagatccagttcgacgacatcggcgacgacgacgaggacatcgacgacatctag

SEQ ID NO: 98786 - DNA, 3117 bp, Artificial Sequence
  derived and/or modified sequence
atggagcacttacgtcacagcccaggccctgggggacagaggctcttgttgccaagcatgttgttagcactcctgctcctactggctccttcacctggacacgctacacgagtagtgtacaaggtgcccgaggaacagcccccaaataccctgatcggaagtctcgccgcagattacggatttcccgatgttggtcatctctataagttggaggtgggggcgccatatctacgagtagatggaaaaactggagacatatttacaactgaaacttccatagaccgcgaaggactgagggaatgccagaatcagctgccgggtgacccgtgtatcctcgaatttgaggtgtccataactgatcttgtccagaatgggtcccctcggctgctcgagggccagatcgaggtgcaggatattaatgataacacaccgaacttcgcaagtcccgttataacgttggccatccctgagaacaccaatattggctcgctttttccaatcccgttggcctccgaccgcgatgcaggccccaacggcgtagcatcctacgaattgcaggctggccctgaggcgcaagagctgtttgggctgcaggtggccgaggaccaagaggaaaagcagcctcagctgatcgtcatggggaatctggaccgggagcgatgggattcctatgatctgacgataaaagtgcaggatggcggtagtccacctcgcgccagtagcgctttgctacgtgtgaccgttctggatacaaacgacaacgctccaaaattcgaacgcccaagttatgaggcggagttgtcagagaactcccctatcggacattccgtgatacaggtgaaagcgaatgatagcgaccagggtgctaacgccgagattgagtacacattccaccaggccccagaagtcgtccgcaggttactgaggctggacaggaacaccggcctaatcactgtccagggcccggttgacagggaggacctgagcactctgagattttccgtcttggctaaagacagagggacaaaccctaaaagtgccagggcacaggtagtggtgacggtaaaggatatgaacgataatgctcccaccatcgagatacggggcattgggcttgtgacacaccaggatggtatggccaatattagcgaggatgtcgcagaggaaaccgccgttgccttggtgcaagtgtctgacagagacgaaggagagaatgccgcagtgacgtgtgtggtggccggcgacgtgccttttcagcttaggcaggctagcgaaactggctcggattctaagaagaagtactttctgcagactacaacgcccttggattacgaaaaggtcaaggattacaccatcgaaatagtggccgtagacagcggtaatcccccactgagctcaactaactctttaaaggtccaggtcgtcgacgtcaatgataatgcaccagttttcactcaatcagtgacggaagtggcgtttccagaaaataacaaacctggggaagtgatagctgagatcactgcgagcgacgccgacagcggatccaacgcagaactggtgtacagcctggaaccagagcctgcagccaagggtctgtttaccatatcccctgaaaccggagagattcaagtcaaaacttcgctagaccgggaacagagggaatcatatgagctgaaagtggtggctgctgatcgcgggtcaccttcattacagggcactgccacagtgcttgtgaatgtgctggactgcaatgataatgatccgaagtttatgctgagcgggtacaatttttccgtgatggagaacatgcccgctcttagtcctgttggtatggtaaccgttatcgacggtgacaagggggaaaatgcccaggttcagttgtctgtggagcaagataatggagattttgtcattcagaacggcaccggaaccatcctttccagtcttagttttgaccgggaacagcagtccacatatacgtttcagttgaaggccgtcgacggtggtgtgccgcctaggagcgcgtatgtgggcgtgaccatcaacgtcttggacgagaatgataacgccccttatatcacggccccttccaatacttcccacaagttgctgacccctcaaactaggctcggcgagaccgtcagtcaggtggccgctgaggattttgactctggggtgaatgccgagctgatatattccattgccggagggaatccatacggactcttccagatcggatcccacagtggcgctataacactggaaaaagagatagaacgccggcaccacgggctccataggctcgttgtgaaagtctcagaccgtggtaaaccaccaaggtatgggactgcactggtccatctatatgtcaacgaaacgctggctaatagaacattgctggagacactccttggccactcactggatacacctctcgatatcgatatagccggtgatccggaatacgaacggtctaagcagagagggaacatcctttttggcgtggtggctggagtggtggcggtagccctgttaatagctctcgccgtgctcgtccgctattgtaggcaaagagaggcaaaatccggatatcaggcaggaaagaaggagaccaaggacctgtacgcacccaaaccaagtggcaaagcgtccaaaggaaataagtccaaggggaagaaaagtaaatcacccaaacctgtcaaacctgttgaggatgaagacgaagccgggcttcaaaaaagtctgaagttcaacctgatgtcggatgctcctggcgacagtccccgcatccatctccctctcaactaccctcctgggtcaccggatttaggccgccactaccgcagcaactcccccttgccgagcatacagctgcaaccccaatccccttctgcgtcgaagaaacaccaggtcgtccaggacctgccccctgcaaatacttttgtgggtaccggagacactacatcaaccgggtccgaacagtactcggactacagctatcgaacgaatcccccaaaatatccatcaaaacaggtggggcagccctttcagctgagtacgccgcagcccctgccacatccctaccacggcgccatctggactgaggtgtgggaatag

SEQ ID NO: 98787 - DNA, 3117 bp, Artificial Sequence
  derived and/or modified sequence
atggagcacctgcggcacagccctggccctgggggccagaggctgctgctgcccagcatgctgctggccctgctgctgctgctggcccccagccctggccacgccaccagggtggtgtacaaggtgcctgaggagcagccccccaacaccctcatcggcagcctggccgctgactatggcttcccagatgtgggccacctgtacaagctggaggtgggcgccccctacctgcgggtggatggcaagacaggagacatcttcaccacagagaccagcattgaccgggagggcctgcgggagtgccagaaccagctgcccggggacccctgcatcctggagtttgaggtgtccatcacagacctggtgcagaatggcagcccccggctgctggagggccagatcgaggtgcaggacatcaatgacaacacccccaactttgccagccctgtgatcaccctggccatccctgagaacaccaacatcggcagcctcttccccatccccctggccagtgacagagatgctggccccaacggggtggccagctatgagctgcaggccggccctgaggcccaggagctgtttggcctgcaggtggccgaggaccaggaggagaagcagccccagctgattgtgatgggcaacctggaccgggagcgctgggacagctatgacctgaccatcaaggtgcaggacggcggcagccccccccgggccagcagcgccctgctgcgggtgacagtgctggacaccaatgacaatgcccccaagtttgagcggcccagctatgaagctgagctgtctgagaacagccccatcggccacagcgtcatccaggtgaaggccaatgacagcgaccagggcgccaatgctgagattgagtacaccttccaccaggcccctgaggtggtgcggcggctgctgcggctggacaggaacacaggcctcatcaccgtgcagggccctgtggaccgggaggacctgagcaccctgcgcttctctgtgctggccaaggaccggggcaccaaccccaagagcgcccgggcccaggtggtggtgacagtgaaggacatgaatgacaatgcccccaccatcgagatccggggcatcggcctggtgacccaccaggacggcatggccaacatcagtgaagatgtggccgaggagacagctgtggccctggtgcaggtgtctgacagagatgaaggagaaaatgctgctgtgacctgtgtggtggccggagatgtgcccttccagctgcggcaggccagcgagaccggcagtgacagcaagaagaagtacttcctgcagaccaccacccccctggactatgagaaggtgaaggactacaccatcgagatcgtggccgtggacagcggcaacccccccctgagcagcaccaacagcctgaaggtgcaggtggtggatgtgaatgacaatgcccctgtgttcacccagagcgtgacagaggtggccttccctgagaacaacaagccaggagaggtgattgctgagatcacagccagtgatgctgacagcggcagcaatgctgagctggtgtacagcctggagcctgagcctgctgccaagggcctcttcaccatcagccctgagactggagagatccaggtgaagaccagcctggaccgggagcagcgggagagctatgagctgaaggtggtggccgctgaccggggcagccccagcctgcagggcacagccaccgtgctggtgaatgtgctggactgcaatgacaatgaccccaagttcatgctgagcggctacaacttctctgtgatggagaacatgcctgccctgagccctgtgggcatggtgacagtgattgatggagacaagggagaaaatgcccaggtgcagctgtctgtggagcaggacaatggagactttgtgatccagaatggcaccggcaccatcctgagcagcctgagctttgaccgggagcagcagagcacctacaccttccagctgaaggctgtggatggaggagtgcccccaagaagtgcctacgtgggcgtgaccatcaacgtgctggatgaaaatgacaatgccccctacatcacagcccccagcaacaccagccacaagctgctgaccccccagacccggctgggggagaccgtgtcccaggtggccgctgaggactttgacagcggcgtgaatgctgagctgatctacagcattgctgggggcaacccctacggcctcttccagatcggcagccacagcggggccatcaccctggagaaggagattgaaagaagacaccacggcctgcaccggctggtggtgaaggtgtctgaccggggcaagccacccaggtatggaacagccctggtgcacctgtatgtgaatgagaccctggccaacagaaccctgctggagaccctgctgggccacagcctggacacccccctggacatcgacattgctggggaccctgaatatgaaagaagcaagcagaggggcaacatcctgtttggagtggtggccggcgtggtggccgtggccctgctgattgccctggccgtgctggtgcgctactgccggcagcgggaggccaagagcggctaccaggccggcaagaaggagaccaaggacctgtatgcccccaagcccagcggcaaggccagcaaaggaaacaagagcaagggcaagaagagcaagagccccaagcctgtgaagcctgtggaggatgaagatgaagctggcctgcagaagagcctgaagttcaacctgatgtctgatgcccctggggacagcccccgcatccacctgcccctgaactacccacctggcagcccagacctgggccgccactaccgcagcaacagccccctgcccagcatccagctgcagccccagagccccagcgccagcaagaagcaccaggtggtgcaggacctgcccccagccaacacctttgtgggcaccggggacaccaccagcacaggcagcgagcagtacagcgactacagctaccgcaccaacccccccaagtaccccagcaagcaggtgggccagcccttccagctgagcaccccccagcccctgccccacccctaccatggagccatctggacagaggtgtgggagtag

SEQ ID NO: 98788 - DNA, 3117 bp, Artificial Sequence
  derived and/or modified sequence
atggagcacctgcggcacagccccggccccggcggccagcggctgcttctaccctcaatgctgctcgccctgctcttgctgctggctccttctcctgggcacgctactagggtggtttataaggtgcctgaagagcagccacccaatacgttaatcggcagcttggccgctgactatggtttccctgacgtgggccatctgtacaagctggaggttggcgctccgtatctgcgggtagacggcaagaccggcgacatcttcacgactgagaccagcatcgatcgcgagggtctccgggagtgtcagaatcagctgcccggagatccttgcatcctagagtttgaggtctccattacagatctagtccagaatggatctccacgcctcctcgaaggacagatagaagtgcaagacatcaacgacaacactccaaatttcgcttcacccgttattacacttgctatacctgaaaataccaatattgggagtcttttccctatacctttggctagcgaccgcgatgccggccccaacggagtggcttcatacgagcttcaagccgggcccgaggctcaagaactgtttggactacaggtggcagaggatcaggaagagaagcagccacaactcattgtgatgggcaacctggatagagagagatgggacagctacgacttgaccattaaggtgcaggacggtggatccccccccagggcttcctcagccctgctgcgagttaccgtgctcgacaccaacgataatgcacccaagttcgagaggccatcttacgaggccgaactctctgaaaattcccccataggccactctgtaatccaagtgaaggcgaacgactccgaccagggcgcaaatgccgagatagaatatacatttcaccaggccccagaggtggtccgcaggctgttgcggctggatcgcaataccggactaatcactgtgcagggacccgtcgacagggaagatttgagtactctgaggttcagcgtgcttgccaaagatagggggaccaatcccaagtcagcccgcgcacaggtggttgtcacagtgaaggatatgaacgataatgctcctacaatagaaatcaggggcatcggcctggttacccaccaagatgggatggccaatatcagtgaagacgtggctgaagagactgctgttgccctggtgcaagtgtctgaccgggacgaaggagagaatgcagcagtgacatgcgtggtggcaggtgatgtacccttccaactgagacaggctagtgaaactggcagcgactccaaaaagaaatacttcctccagactacgacaccacttgattatgagaaagtaaaggattataccatagaaatagtcgcggtcgattccggtaaccctcctttgtcctccactaactctctgaaggtgcaagttgtagatgtcaacgataacgctcccgtgttcactcagtccgttaccgaggtggcgtttccagaaaacaacaagcccggcgaagtcatcgccgagattaccgcctctgacgctgattccggcagcaatgccgagttggtgtacagcctcgaacctgagccagcagccaagggcctctttactatatcacctgagaccggcgaaatccaggtgaagacctccctagatcgggaacagcgggaatcctacgagctgaaagtcgtggctgctgaccgcggttcccctagcttgcagggaaccgctaccgtcttagtgaatgtgttggattgtaacgacaatgaccctaagtttatgctgtctggatacaatttttctgtgatggagaacatgccagccctctcacccgtgggtatggtcacagttatcgacggcgacaaaggtgaaaatgctcaggtccagctctccgtggaacaagacaatggcgattttgtgatccagaacggaacaggaacaattcttagctcattgtcatttgaccgggaacagcagtccacctacacgtttcagctgaaggcagtggatggaggagtgccgccccggtctgcttatgtcggagtgacgatcaatgtgttagacgagaacgataacgccccatacataacagccccgagcaacacatcccataagctgctcacacctcagactcgtctcggcgaaacagtctcccaggtagcagccgaggattttgatagtggagttaacgccgagttgatttactcgattgcagggggaaacccatacgggttgttccagatcggctctcattccggggccatcactctggagaaagagattgaacggcgccaccacggtctccataggctcgtggtgaaggtcagcgatcgtggcaagcccccccgatatggtaccgctctcgtccacttgtacgtgaacgaaactctcgcaaaccgcacccttcttgagactctgttgggacacagtctggacacaccacttgacatcgatatcgcaggtgatcccgagtatgaaaggtcaaagcagcggggaaacattttatttggcgtcgtagcgggcgttgtcgcagtagccctcttgatcgcccttgctgtgttggtccgatattgccgccagcgggaggccaaaagtggttaccaggccggaaaaaaggagacaaaggatctttacgcacctaaaccttccggcaaggcatcaaaagggaacaaatctaagggtaagaagagtaagtctcctaaaccggtgaaaccggtggaagatgaggacgaggcaggtttgcagaagtctctcaaattcaaccttatgagcgacgcccccggcgatagcccccgaattcacctcccgctgaactatccacccggctcccctgaccttgggcgccattaccgatctaacagtcctctgccttcaatccagctccaaccccagtccccatcggcctctaagaaacatcaggtcgtgcaggacttgccccctgcgaataccttcgtggggaccggtgacactaccagtacaggctctgagcagtatagtgactattcctacagaaccaacccccctaagtacccgtccaagcaggttggccagccgtttcagttgtctactccacagcctttaccgcatccctaccatggagctatctggactgaggtctgggagtag

SEQ ID NO: 98789 - DNA, 3117 bp, Artificial Sequence
  derived and/or modified sequence
atggaacacttaaggcactccccgggtcccggaggtcagagactcctcctcccatccatgctcctggctctacttttactcctcgcaccatcccctggacatgccacacgggttgtgtacaaagtccccgaagagcaacctcccaataccctcatcggaagcctggcagctgactacggcttcccagatgtaggacatttgtataaactggaggtaggtgctccttacctacgggtggacggaaagacaggcgacatcttcacgacagaaaccagcatcgatcgggagggcctgcgggagtgccaaaatcagttaccaggggacccctgcatcctcgagttcgaggtgtctattaccgacctcgtccaaaacggatcccctcgtctgctggaaggtcagatagaggtccaagacatcaatgataatacacccaatttcgcctctcctgtgatcacactggccatccctgagaatactaacattgggagcctgttccccatccccctggcctctgatagagatgccggtccgaacggggtagcctcgtacgaactgcaggccggaccagaggctcaggagctctttggcctgcaggtggcagaggatcaggaggaaaaacagcctcaattaattgtcatggggaacctggaccgagaaaggtgggattcctatgatctcacaatcaaggtgcaggacggtggctcccctccaagagcttcatcggcccttctccgggtcactgtgctcgacaccaatgacaatgcgccaaaatttgagcgaccctcttacgaggccgagctgtctgaaaacagtcctattggacatagtgtcatccaagttaaggccaatgacagtgaccagggggctaatgctgaaattgaatatacattccatcaggcccctgaggtcgtacgaaggctcttgcggctggaccggaacaccgggttaatcacagttcagggcccagttgacagagaggacctgtccacactcaggttttctgtcctggccaaagaccggggaaccaatcctaagagcgctcgcgctcaggtggtcgtaactgttaaggacatgaacgacaacgcccctaccattgagatccgagggattggcctggtcacacaccaggacgggatggccaatatctccgaagacgtggcagaagagaccgcagtagcgctcgttcaagtcagcgacagagacgaaggggagaatgcagctgtcacgtgcgtggtcgccggagatgtccccttccagcttcgacaagctagtgaaactggctctgattccaaaaaaaagtattttctccagacaactacccccctggactacgagaaggtcaaggactatactatcgagatcgtggccgtcgactcaggcaaccctccactgagtagtacaaactctctaaaagtacaggtggtggatgtgaatgacaacgctcctgtatttacacagagtgtcactgaagtcgcctttcctgaaaataacaagcctggcgaagtgatcgcggaaataaccgcatctgatgcagatagtggcagcaacgccgagttggtgtattcccttgaacctgaacccgctgcgaaaggactttttactatctcccctgaaaccggagaaatccaagtgaagacatccctggatcgcgagcagcgagagagttatgagctcaaggtggtggccgcagatcgtgggtctcccagtctacagggtaccgccaccgtgttggttaatgttctggactgtaacgacaatgatcccaaattcatgctctctggttataacttttctgtgatggaaaatatgcccgctctcagtccagtcggaatggtaaccgtgatcgacggagacaagggggagaacgctcaggtgcagctgtctgtcgaacaggataatggtgactttgtgattcagaacggtaccggtacaatcctgtcctccctgagcttcgacagagagcagcagtctacatatactttccagttaaaggccgtcgatggaggggtgccacctagatctgcctatgtgggcgtgacgatcaacgtcctggacgagaatgataacgccccatacatcaccgctccttccaacacttctcacaagctcctgactcctcagactagactgggtgagaccgtgagtcaggttgctgccgaggattttgatagtggcgtcaacgccgaactcatttactctattgctggcggaaacccctacgggctgttccagattggaagccattccggggctatcacgctcgagaaggaaattgagcggagacaccacggcttgcaccgactggttgtgaaggtaagtgatcgcggaaagcctcctaggtatggcacagcactggtgcatctgtacgtgaatgaaaccctggccaaccgcaccctgctcgagacactcctcggacactctctggacactccgctcgatatagacatcgcaggagatcctgagtacgagcggagtaaacagcgaggaaacatactgtttggtgtggttgcaggggttgtggctgtggctctcttaatcgcacttgccgttttggtccggtattgcagacagagggaggccaagtccgggtaccaggcagggaagaaagagactaaggacctgtatgctcccaagcccagtggcaaagccagcaagggcaacaagagtaaaggtaaaaagagcaagtctcccaaacccgttaagccggtcgaagatgaagatgaggcaggactgcagaagtctctcaaatttaatctgatgagcgacgcccctggtgatagtccacggatccatctgcctttgaattatcctccagggagccccgatttgggcagacattacaggtctaactcaccacttcccagcatccagctgcagcctcagtccccttctgcttccaagaagcatcaggtggtgcaggacctcccaccggcaaatacttttgtgggcaccggcgatacaacatcaaccgggagcgagcaatacagcgactactcgtataggacaaacccacccaagtaccctagcaagcaagtggggcaaccgttccagttgtccaccccacagcccctgcctcacccttaccacggcgctatctggacagaggtgtgggagtag

SEQ ID NO: 98790 - DNA, 3307 bp, Artificial Sequence
  derived and/or modified sequence
ctgagtttctggaatcggggttctgtgctgggactgactgctcttgtggagaatcgtgtgtcagtgggagaggccctcctgattctggggcctcccaggatggagcacctgaggcacagcccaggccctggggggcaacggctactgctgccctccatgctgctagcactgctgctcctgctggctccatccccaggccacgccactcgggtagtgtacaaggtgccggaggaacagccacccaacaccctcattgggagcctcgcagccgactatggttttccagatgtggggcacctgtacaagctagaggtgggtgccccgtaccttcgcgtggatggcaagacaggtgacattttcaccaccgagacctccatcgaccgtgaggggctccgtgaatgccagaaccagctccctggtgatccctgcatcctggagtttgaggtatctatcacagacctcgtgcagaatggcagcccccggctgctagagggccagatagaagtacaagacatcaatgacaacacacccaacttcgcctcaccagtcatcactctggccatccctgagaacaccaacatcggctcactcttccccatcccgctggcttcagaccgtgatgctggtcccaacggtgtggcatcctatgagctgcaggctgggcctgaggcccaggagctatttgggctgcaggtggcagaggaccaggaggagaagcaaccacagctcattgtgatgggcaacctggaccgtgagcgctgggactcctatgacctcaccatcaaggtgcaggatggcggcagccccccacgcgccagcagtgccctgctgcgtgtcaccgtgcttgacaccaatgacaacgcccccaagtttgagcggccctcctatgaggccgaactatctgagaatagccccataggccactcggtcatccaggtgaaggccaatgactcagaccaaggtgccaatgcagaaatcgaatacacattccaccaggcgcccgaagttgtgaggcgtcttcttcgactggacaggaacactggacttatcactgttcagggcccggtggaccgtgaggacctaagcaccctgcgcttctcagtgcttgctaaggaccgaggcaccaaccccaagagtgcccgtgcccaggtggttgtgaccgtgaaggacatgaatgacaatgcccccaccattgagatccggggcatagggctagtgactcatcaagatgggatggctaacatctcagaggatgtggcagaggagacagctgtggccctggtgcaggtgtctgaccgagatgagggagagaatgcagctgtcacctgtgtggtggcaggtgatgtgcccttccagctgcgccaggccagtgagacaggcagtgacagcaagaagaagtatttcctgcagactaccaccccgctagactacgagaaggtcaaagactacaccattgagattgtggctgtggactctggcaaccccccactctccagcactaactccctcaaggtgcaggtggtggacgtcaatgacaacgcacctgtcttcactcagagtgtcactgaggtcgccttcccggaaaacaacaagcctggtgaagtgattgctgagatcactgccagtgatgctgactctggctctaatgctgagctggtttactctctggagcctgagccggctgctaagggcctcttcaccatctcacccgagactggagagatccaggtgaagacatctctggatcgggaacagcgggagagctatgagttgaaggtggtggcagctgaccggggcagtcctagcctccagggcacagccactgtccttgtcaatgtgctggactgcaatgacaatgaccccaaatttatgctgagtggctacaacttctcagtgatggagaacatgccagcactgagtccagtgggcatggtgactgtcattgatggagacaagggggagaatgcccaggtgcagctctcagtggagcaggacaacggtgactttgttatccagaatggcacaggcaccatcctatccagcctgagctttgatcgagagcaacaaagcacctacaccttccagctgaaggcagtggatggtggcgtcccacctcgctcagcttacgttggtgtcaccatcaatgtgctggacgagaatgacaacgcaccctatatcactgccccttctaacacctctcacaagctgctgaccccccagacacgtcttggtgagacggtcagccaggtggcagccgaggactttgactctggtgtcaatgctgagctgatctacagcattgcaggtggcaacccttatggactcttccagattgggtcacattcaggtgccatcaccctggagaaggagattgagcggcgccaccatgggctacaccgcctggtggtgaaggtcagtgaccgcggcaagcccccacgctatggcacagccttggtccatctttatgtcaatgagactctggccaaccgcacgctgctggagaccctcctgggccacagcctggacacgccgctggatattgacattgctggggatccagaatatgagcgctccaagcagcgtggcaacattctctttggtgtggtggctggtgtggtggccgtggccttgctcatcgccctggcggttcttgtgcgctactgcagacagcgggaggccaaaagtggttaccaggctggtaagaaggagaccaaggacctgtatgcccccaagcccagtggcaaggcctccaagggaaacaaaagcaaaggcaagaagagcaagtccccaaagcccgtgaagccagtggaggacgaggatgaggccgggctgcagaagtccctcaagttcaacctgatgagcgatgcccctggggacagtccccgcatccacctgcccctcaactacccaccaggcagccctgacctgggccgccactatcgctctaactccccactgccttccatccagctgcagccccagtcaccctcagcctccaagaagcaccaggtggtacaggacctgccacctgcaaacacattcgtgggcaccggggacaccacgtccacgggctctgagcagtactccgactacagctaccgcaccaacccccccaaataccccagcaagcaggtaggccagccctttcagctcagcacaccccagcccctaccccacccctaccacggagccatctggaccgaggtgtgggagtgatggagcaggtttactgtgcctgcccgtgttgggggccagcctgagccagcagtgggaggtggggccttagtgcctcaccgggcacacggat

SEQ ID NO: 98791 - DNA, 3117 bp, Artificial Sequence
  derived and/or modified sequence
atggagcacctgagacacagccccggccccggcggccagagactgctgctgcccagcatgctgctggccctgctgctgctgctggcccccagccccggccacgccaccagagtggtgtacaaggtgcccgaggagcagccccccaacaccctgatcggcagcctggccgccgactacggcttccccgacgtgggccacctgtacaagctggaggtgggcgccccctacctgagagtggacggcaagaccggcgacatcttcaccaccgagaccagcatcgacagagagggcctgagagagtgccagaaccagctgcccggcgacccctgcatcctggagttcgaggtgagcatcaccgacctggtgcagaacggcagccccagactgctggagggccagatcgaggtgcaggacatcaacgacaacacccccaacttcgccagccccgtgatcaccctggccatccccgagaacaccaacatcggcagcctgttccccatccccctggccagcgacagagacgccggccccaacggcgtggccagctacgagctgcaggccggccccgaggcccaggagctgttcggcctgcaggtggccgaggaccaggaggagaagcagccccagctgatcgtgatgggcaacctggacagagagagatgggacagctacgacctgaccatcaaggtgcaggacggcggcagcccccccagagccagcagcgccctgctgagagtgaccgtgctggacaccaacgacaacgcccccaagttcgagagacccagctacgaggccgagctgagcgagaacagccccatcggccacagcgtgatccaggtgaaggccaacgacagcgaccagggcgccaacgccgagatcgagtacaccttccaccaggcccccgaggtggtgagaagactgctgagactggacagaaacaccggcctgatcaccgtgcagggccccgtggacagagaggacctgagcaccctgagattcagcgtgctggccaaggacagaggcaccaaccccaagagcgccagagcccaggtggtggtgaccgtgaaggacatgaacgacaacgcccccaccatcgagatcagaggcatcggcctggtgacccaccaggacggcatggccaacatcagcgaggacgtggccgaggagaccgccgtggccctggtgcaggtgagcgacagagacgagggcgagaacgccgccgtgacctgcgtggtggccggcgacgtgcccttccagctgagacaggccagcgagaccggcagcgacagcaagaagaagtacttcctgcagaccaccacccccctggactacgagaaggtgaaggactacaccatcgagatcgtggccgtggacagcggcaacccccccctgagcagcaccaacagcctgaaggtgcaggtggtggacgtgaacgacaacgcccccgtgttcacccagagcgtgaccgaggtggccttccccgagaacaacaagcccggcgaggtgatcgccgagatcaccgccagcgacgccgacagcggcagcaacgccgagctggtgtacagcctggagcccgagcccgccgccaagggcctgttcaccatcagccccgagaccggcgagatccaggtgaagaccagcctggacagagagcagagagagagctacgagctgaaggtggtggccgccgacagaggcagccccagcctgcagggcaccgccaccgtgctggtgaacgtgctggactgcaacgacaacgaccccaagttcatgctgagcggctacaacttcagcgtgatggagaacatgcccgccctgagccccgtgggcatggtgaccgtgatcgacggcgacaagggcgagaacgcccaggtgcagctgagcgtggagcaggacaacggcgacttcgtgatccagaacggcaccggcaccatcctgagcagcctgagcttcgacagagagcagcagagcacctacaccttccagctgaaggccgtggacggcggcgtgccccccagaagcgcctacgtgggcgtgaccatcaacgtgctggacgagaacgacaacgccccctacatcaccgcccccagcaacaccagccacaagctgctgaccccccagaccagactgggcgagaccgtgagccaggtggccgccgaggacttcgacagcggcgtgaacgccgagctgatctacagcatcgccggcggcaacccctacggcctgttccagatcggcagccacagcggcgccatcaccctggagaaggagatcgagagaagacaccacggcctgcacagactggtggtgaaggtgagcgacagaggcaagccccccagatacggcaccgccctggtgcacctgtacgtgaacgagaccctggccaacagaaccctgctggagaccctgctgggccacagcctggacacccccctggacatcgacatcgccggcgaccccgagtacgagagaagcaagcagagaggcaacatcctgttcggcgtggtggccggcgtggtggccgtggccctgctgatcgccctggccgtgctggtgagatactgcagacagagagaggccaagagcggctaccaggccggcaagaaggagaccaaggacctgtacgcccccaagcccagcggcaaggccagcaagggcaacaagagcaagggcaagaagagcaagagccccaagcccgtgaagcccgtggaggacgaggacgaggccggcctgcagaagagcctgaagttcaacctgatgagcgacgcccccggcgacagccccagaatccacctgcccctgaactacccccccggcagccccgacctgggcagacactacagaagcaacagccccctgcccagcatccagctgcagccccagagccccagcgccagcaagaagcaccaggtggtgcaggacctgccccccgccaacaccttcgtgggcaccggcgacaccaccagcaccggcagcgagcagtacagcgactacagctacagaaccaacccccccaagtaccccagcaagcaggtgggccagcccttccagctgagcaccccccagcccctgccccacccctaccacggcgccatctggaccgaggtgtgggagtag

SEQ ID NO: 98792 - protein, 673 aa, Artificial Sequence
  derived and/or modified sequence
MGQPSLTWMLMVVVASWFITTAATDTSEARTKYNCPARWSWRTPQRGGDTEQGPDEDFTSQGRWCSECHSNATCTEDEAVTTCTCQEGFTGDGLTCVDLDECAIPGAHNCSANSSCVNTPGSFSCVCPEGFRLSPGLGCTDVDECAEPGLSHCHALATCVNVVGSYLCVCPAGYRGDGWHCECSPGSCGPGLDCVPEGDALVCADPCQAHRTLDEYWRSTEYGEGYACDTDLRGWYRFVGQGGARMAETCVPVLRCNTAAPMWLNGTHPSSDEGIVSRKACAHWSGHCCLWDASVQVKACAGGYYVYNLTAPPECHLAYCTDPSSVEGTCEECSIDEDCKSNNGRWHCQCKQDFNITDISLLEHRLECGANDMKVSLGKCQLKSLGFDKVFMYLSDSRCSGFNDRDNRDWVSVVTPARDGPCGTVLTRNETHATYSNTLYLADEIIIRDLNIKINFACSYPLDMKVSLKTALQPMVSALNIRVGGTGMFTVRMALFQTPSYTQPYQGSSVTLSTEAFLYVGTMLDGGDLSRFALLMTNCYATPSSNATDPLKYFIIQDRCPHTRDSTIQVVENGESSQGRFSVQMFRFAGNYDLVYLHCEVYLCDTMNEKCKPTCSGTRFRSGSVIDQSRVLNLGPITRKGVQATVSRAFSSLGLLKVWLPLLLSATLTLTFQ

SEQ ID NO: 98793 - DNA, 2022 bp, Artificial Sequence
  derived and/or modified sequence
atgggccagcccagcctgacctggatgctgatggtggtggtggccagctggttcatcaccaccgccgccaccgacaccagcgaggccagaaccaagtacaactgccccgccagatggagctggagaaccccccagagaggcggcgacaccgagcagggccccgacgaggacttcaccagccagggcagatggtgcagcgagtgccacagcaacgccacctgcaccgaggacgaggccgtgaccacctgcacctgccaggagggcttcaccggcgacggcctgacctgcgtggacctggacgagtgcgccatccccggcgcccacaactgcagcgccaacagcagctgcgtgaacacccccggcagcttcagctgcgtgtgccccgagggcttcagactgagccccggcctgggctgcaccgacgtggacgagtgcgccgagcccggcctgagccactgccacgccctggccacctgcgtgaacgtggtgggcagctacctgtgcgtgtgccccgccggctacagaggcgacggctggcactgcgagtgcagccccggcagctgcggccccggcctggactgcgtgcccgagggcgacgccctggtgtgcgccgacccctgccaggcccacagaaccctggacgagtactggagaagcaccgagtacggcgagggctacgcctgcgacaccgacctgagaggctggtacagattcgtgggccagggcggcgccagaatggccgagacctgcgtgcccgtgctgagatgcaacaccgccgcccccatgtggctgaacggcacccaccccagcagcgacgagggcatcgtgagcagaaaggcctgcgcccactggagcggccactgctgcctgtgggacgccagcgtgcaggtgaaggcctgcgccggcggctactacgtgtacaacctgaccgccccccccgagtgccacctggcctactgcaccgaccccagcagcgtggagggcacctgcgaggagtgcagcatcgacgaggactgcaagagcaacaacggcagatggcactgccagtgcaagcaggacttcaacatcaccgacatcagcctgctggagcacagactggagtgcggcgccaacgacatgaaggtgagcctgggcaagtgccagctgaagagcctgggcttcgacaaggtgttcatgtacctgagcgacagcagatgcagcggcttcaacgacagagacaacagagactgggtgagcgtggtgacccccgccagagacggcccctgcggcaccgtgctgaccagaaacgagacccacgccacctacagcaacaccctgtacctggccgacgagatcatcatcagagacctgaacatcaagatcaacttcgcctgcagctaccccctggacatgaaggtgagcctgaagaccgccctgcagcccatggtgagcgccctgaacatcagagtgggcggcaccggcatgttcaccgtgagaatggccctgttccagacccccagctacacccagccctaccagggcagcagcgtgaccctgagcaccgaggccttcctgtacgtgggcaccatgctggacggcggcgacctgagcagattcgccctgctgatgaccaactgctacgccacccccagcagcaacgccaccgaccccctgaagtacttcatcatccaggacagatgcccccacaccagagacagcaccatccaggtggtggagaacggcgagagcagccagggcagattcagcgtgcagatgttcagattcgccggcaactacgacctggtgtacctgcactgcgaggtgtacctgtgcgacaccatgaacgagaagtgcaagcccacctgcagcggcaccagattcagaagcggcagcgtgatcgaccagagcagagtgctgaacctgggccccatcaccagaaagggcgtgcaggccaccgtgagcagagccttcagcagcctgggcctgctgaaggtgtggctgcccctgctgctgagcgccaccctgaccctgaccttccagtag

SEQ ID NO: 98794 - DNA, 2022 bp, Artificial Sequence
  derived and/or modified sequence
atggggcagccttctctcacatggatgctcatggtggttgtggcttcctggtttatcaccaccgcagccacagacacgtcagaggcccgtaccaagtacaattgccccgccagatggtcttggcgcactccacagagggggggagatacggaacagggcccagatgaggatttcacttcgcagggccggtggtgctccgaatgtcactccaatgccacatgcacagaagatgaggctgtgacaacatgtacatgtcaggaaggcttcaccggcgatggcttgacttgcgtcgacctggacgaatgcgcgatccccggggctcacaactgcagcgcaaatagttcctgtgttaataccccagggagcttttcctgtgtgtgcccagaagggttccgactcagtccaggtctcggatgtactgatgtagacgagtgtgctgagcccggcctaagtcactgtcacgcacttgccacctgtgttaatgtagttggttcatacttgtgtgtgtgtccagcagggtaccggggagatgggtggcactgcgagtgttcacctggttcttgcggacctggtctagattgtgttccagaaggcgatgccttggtgtgcgcagatccttgtcaggcccacaggaccctcgacgagtactggcgctcaacagagtacggcgaaggctacgcctgcgatacagacctgaggggatggtatcgattcgtgggccaagggggtgcccgaatggcagaaacctgcgtcccagtgctcaggtgtaacaccgccgctccgatgtggctaaacggaacacatcccagctccgacgaaggcattgtcagcaggaaagcctgcgcccattggagtggccactgctgtctctgggacgcctctgtgcaggtgaaagcctgtgccggcggatactacgtctacaacttaaccgcgccacctgagtgccatcttgcctattgcacggatccctcatctgtagaaggcacctgtgaggagtgctcgattgatgaggactgtaagagcaacaacgggcgctggcactgtcagtgcaagcaggacttcaatattacagatatttcattgctggagcaccgacttgaatgtggggcgaatgacatgaaagtgtctcttggaaagtgccagctgaaatccctgggattcgacaaagtgttcatgtacctctccgattcccgatgctccggcttcaatgaccgggataaccgcgactgggtgagcgttgtgactcccgccagagacggaccctgcggaaccgttctgacacgtaatgagacccacgctacgtacagcaacactctatacctagcagacgaaattataattcgcgacttaaatatcaaaattaattttgcatgcagctatccgcttgacatgaaggtgtccctgaagactgctctgcaacccatggtctccgcactgaatatccgcgtcggagggacaggcatgtttactgtccggatggctttattccagactcccagctatactcagccgtatcagggatctagtgtaacgctgtctaccgaggccttcttgtatgttggaacaatgctggatggcggcgacttgtctcggttcgctctgctgatgacgaactgctatgccacacctagctctaacgctaccgacccgctgaaatactttatcatacaggaccgctgtccccacacaagggacagcactatccaggtcgttgaaaacggagagagtagtcaggggcgattttctgtccagatgttcaggtttgccggtaattacgacctggtgtacctgcactgtgaggtctacctgtgtgacaccatgaatgaaaagtgcaaacctacatgttcaggcacaaggtttagatccggttctgtcatagaccagtctcgcgtgctaaatctgggccccattacgcgcaagggagtgcaggccactgtgtcaagagccttttcctctcttgggctattgaaagtgtggctcccactgctcttgagtgccaccctcaccctaacattccagtag

SEQ ID NO: 98795 - DNA, 2022 bp, Artificial Sequence
  derived and/or modified sequence
atgggccaacccagcctaacctggatgctgatggtagtggtagcctcctggttcatcaccacagccgccacggacacgtcagaagccagaaccaaatataactgccctgcgagatggagctggaggaccccccagaggggcggggataccgaacaaggtcctgacgaagattttactagtcagggcaggtggtgttcagaatgccactcgaatgccacctgtaccgaagacgaagccgtgactacctgtacttgccaagaggggttcacaggggatgggctaacttgcgtggaccttgacgagtgcgcaatacccggcgcacacaactgtagtgctaatagctcctgcgtgaacacgcctggcagcttttcatgtgtctgccccgagggattccggttatctccaggtctcggatgtactgacgttgacgagtgtgccgaacctggcctgagccactgccacgctctggcgacatgtgtgaacgtggttggctcatacctgtgcgtttgccccgctggctaccgcggtgacggttggcactgtgaatgttccccaggaagttgtgggcccggcctggattgcgttcctgaaggcgacgcattggtgtgtgcagacccgtgtcaggcccatcgaactcttgatgagtactggcggtctactgaatacggggagggctacgcctgcgacacggatctccgcgggtggtatcggtttgtgggacaggggggagctaggatggcagagacgtgtgtccctgtcctgcggtgtaacaccgccgcgcctatgtggttgaacggtacacacccatctagcgatgaagggattgtttccaggaaagcctgcgcccattggtccgggcattgctgtctttgggatgcttctgtgcaggtaaaggcctgtgcgggaggatattacgtgtataatcttactgcaccacccgagtgtcatctcgcttattgcacagacccatcctccgtcgaaggaacatgtgaggaatgttccatcgatgaagactgcaagagcaacaacgggaggtggcactgtcagtgcaaacaggactttaacatcaccgacattagccttttagagcataggctggaatgcggagctaatgacatgaaggtgtcgctaggcaagtgtcagctcaagtcgctgggcttcgacaaggtatttatgtacctaagtgacagccgatgcagcggcttcaacgacagagacaatcgggactgggttagcgtggtgactcccgcacgcgatgggccatgcggcacagttctgacacggaatgaaacccatgctacttatagcaacaccctttacctggccgatgagatcataatacgggacctcaacataaaaatcaactttgcatgcagctatccactagatatgaaggtctcactcaagacagcccttcagccaatggtcagcgctctcaacataagggtgggcggcaccggtatgttcacagtgcgtatggccctgtttcaaaccccgtcgtatacccagccctaccagggaagctcagtgactctgtccactgaggcttttctgtatgtgggaacaatgcttgacgggggagatctcagccggttcgccttactcatgactaattgttacgcgactccctcctctaatgctaccgatcccctcaagtatttcatcatccaggatagatgtccgcacacacgggactccacaattcaggtggtagagaacggggaatcctcccagggccgcttttccgttcagatgttcaggttcgcaggcaattatgacctcgtgtacctgcactgtgaagtctatctgtgcgacaccatgaatgagaagtgcaagcccacgtgctcgggcaccagattcaggtcaggctctgttattgaccaaagtagggtcctgaacctcggtcccattactcgcaagggagtgcaagcaaccgtctctagggctttctcaagcttaggattgcttaaggtttggttaccactgctgctctccgcaacacttacgctgaccttccaatag

SEQ ID NO: 98796 - DNA, 2022 bp, Artificial Sequence
  derived and/or modified sequence
atgggccagcccagcctgacctggatgctgatggtggtggtggcctcctggttcatcaccacagctgccacagacaccagcgaggcccggaccaagtacaactgcccagcccgctggagctggaggaccccccagagaggaggagacacagagcagggcccagatgaggacttcaccagccagggccgctggtgcagcgagtgccacagcaatgccacctgcacagaagatgaagctgtgaccacctgcacctgccaggagggcttcaccggagatggcctgacctgtgtggacctggatgaatgtgccatccctggggcccacaactgcagcgccaacagcagctgtgtgaacaccccaggcagcttcagctgtgtgtgcccagagggcttccggctgagccctggcctgggctgcacagatgtggatgaatgtgccgagcccggcctgagccactgccacgccctggccacctgtgtgaatgtggtgggcagctacctgtgtgtgtgcccagctggctacagaggagatggctggcactgtgagtgcagccctggcagctgtggccctggcctggactgtgtgcctgaaggagatgccctggtgtgtgccgacccctgccaggcccacaggaccctggatgagtactggaggagcacagaatatggagagggctacgcctgtgacacagacctgcggggctggtacagatttgtgggccagggcggggccaggatggccgagacctgtgtgcctgtgctgcgctgcaacacagctgcccccatgtggctgaatggcacccaccccagcagtgatgagggcatcgtgtccaggaaggcctgtgcccactggagcggccactgctgcctgtgggatgcctctgtgcaggtgaaggcctgtgccggcggctactacgtgtacaacctgacagcccctcctgagtgccacctggcctactgcacagaccccagctctgtggagggcacctgtgaggagtgcagcattgatgaggactgcaagagcaacaacggccgctggcactgccagtgcaagcaggacttcaacatcacagacatcagcctgctggagcaccggctggagtgtggggccaatgacatgaaggtgtccctgggcaagtgccagctgaagagcctgggctttgacaaggtgttcatgtacctgagtgacagccgctgcagcggcttcaatgaccgggacaacagagactgggtgtctgtggtgaccccagccagagatggcccctgtggcaccgtgctgaccagaaatgagacccacgccacctacagcaacaccctgtacctggctgatgagatcatcatccgggacctgaacatcaagatcaactttgcctgcagctaccccctggacatgaaggtgtccctgaagacagccctgcagcccatggtgtctgccctgaacatccgggtgggcggcaccggcatgttcaccgtgaggatggccctcttccagacccccagctacacccagccctaccagggcagctctgtgaccctgagcacagaggccttcctgtatgtgggcaccatgctggatggaggagacctgagcagatttgccctgctgatgaccaactgctacgccacccccagcagcaatgccacagaccccctgaagtacttcatcatccaggaccgctgcccccacacccgggacagcaccatccaggtggtggagaatggagagagcagccagggccgcttctctgtgcagatgttccgctttgctggcaactatgacctggtgtacctgcactgtgaggtgtacctgtgtgacaccatgaatgagaagtgcaagcccacctgcagcggcacccgcttccgcagcggcagcgtcatcgaccagagccgggtgctgaacctgggccccatcaccaggaagggcgtgcaggccaccgtgtcccgggccttcagcagcctgggcctgctgaaggtgtggctgcccctgctgctgagcgccaccctgaccctgaccttccagtag

SEQ ID NO: 98797 - DNA, 2022 bp, Artificial Sequence
  derived and/or modified sequence
atgggccagcccagcctgacctggatgctgatggtggtggtggcctcctggttcataactactgcagctacggacacttccgaagcacgaacgaaatataactgtcctgcccgctggagttggaggaccccacagagagggggggacacagaacagggcccggatgaggatttcacttcccagggccgctggtgctctgagtgccattctaacgctacatgtactgaggacgaggccgtaaccacttgcacctgtcaggagggctttaccggtgatggtctgacctgcgttgacttggacgagtgtgcaatacccggggcgcacaactgttccgcgaactcctcttgcgtgaatacccccgggtcattctcttgcgtgtgcccagagggatttagattaagtccgggcctggggtgcacagatgtagatgagtgcgcagagccgggcttgtctcactgtcacgctctggccacatgtgtgaatgttgtaggatcttacctgtgtgtttgcccagcgggctatcgcggcgatgggtggcactgtgagtgttccccaggtagttgcggcccgggcctggattgtgtccccgagggcgatgccctagtatgtgccgatccctgccaggctcataggactctggacgaatattggagaagtaccgagtatggggaggggtacgcttgcgacaccgatctgagaggatggtatcggtttgtggggcaagggggggcacgcatggctgagacttgcgtgcccgtactcagatgcaataccgcagcccccatgtggttgaatggtactcacccgtcctccgatgaaggaattgtaagcaggaaggcatgtgctcattggagtggacattgttgtttgtgggacgctagcgtgcaagttaaagcctgtgctgggggttattatgtatacaacctgacagcacccccggagtgtcacttggcctattgcacagatcctagctccgtggaaggaacctgtgaggagtgttctatagacgaggattgtaagagtaacaatggcagatggcattgccagtgcaaacaggactttaacattacggacatcagccttctggaacaccgcttagagtgtggagctaatgacatgaaagtgtccctgggtaagtgccaactcaaaagtcttgggtttgacaaagtcttcatgtatcttagcgacagcaggtgctcgggattcaacgaccgcgacaatcgagattgggtgagtgtggtgactcctgcccgggatggtccttgtggtacggttctgacgaggaatgagacgcacgccacgtacagcaacactctatacctcgctgatgagattataattcgtgatcttaacattaaaataaattttgcctgcagttatcctctcgatatgaaggtgagtttgaagacagccctgcagcccatggtatccgccctcaacatccgcgtggggggcaccggtatgttcactgtgcggatggccctgtttcagactccaagttatactcagccataccaggggtcgtcggtgacactttccacagaggcattcctgtatgtaggtacaatgctcgacgggggagacctgtcccgctttgccctcttaatgacaaactgctacgcgacacctagttctaatgcgaccgaccctctaaagtactttatcatacaggatcgatgcccccacacccgggactctacaattcaggtggtggagaacggagagtcttcccaaggcaggtttagcgtacagatgttccgattcgccggcaactatgatttagtgtaccttcattgcgaggtctatctgtgtgataccatgaacgagaaatgtaagcccacgtgctccggcaccaggttcaggtctggcagtgtgattgaccaatctcgggtgctgaacctgggtcctattacacgtaagggtgttcaagccaccgtgtccagagcgttctcatcgttaggcctcctgaaggtttggttgccattgttgctgagcgcaacgttgaccctcacctttcagtag

SEQ ID NO: 98798 - DNA, 2022 bp, Artificial Sequence
  derived and/or modified sequence
atgggccagcccagcctgacctggatgctgatggtggtggtggccagctggtttattactacagccgcaacggacacatctgaggcaaggaccaaatacaactgtccggcccgttggagctggcgcaccccgcagcgcgggggcgataccgaacaggggcctgacgaggattttacatcacagggaaggtggtgtagcgaatgccactccaacgctacttgtaccgaggacgaggccgtaacgacgtgcacctgtcaggagggatttactggcgacggcttaacttgcgtcgacctggatgagtgcgccatacctggagcccataactgcagtgccaacagctcttgtgtaaatacgccggggtccttttcttgcgtgtgcccggaagggtttcgcctgagcccagggctagggtgcactgatgttgatgagtgcgccgaacctggattgtctcattgccatgcgctggccacctgcgtgaatgtggtgggctcatatctatgtgtgtgccccgcagggtatcgcggggacggctggcattgcgaatgcagtccaggatcatgtggacccggcctcgattgtgtgccggagggcgatgctttggtgtgcgctgatccctgtcaagcccatagaacattggatgagtattggcgatccacagaatacggggaaggctacgcatgtgatacagacttaaggggttggtaccgcttcgtgggtcagggaggcgcaaggatggctgagacttgcgtacccgttctgcggtgtaacaccgccgcccccatgtggctgaatggcacacatccttcctccgatgagggcattgtcagtaggaaagcttgtgcccactggagcggtcattgctgcctgtgggatgcctcagtccaggtgaaggcctgcgccggcggctattatgtgtacaacctcaccgctccacctgaatgtcatctcgcgtactgcaccgacccctctagtgtggagggaacatgtgaagaatgtagtatcgacgaggattgtaagtctaataatggccgctggcattgtcagtgtaagcaagatttcaacattacggacatctctctcctggagcatagactggagtgcggcgcaaacgacatgaaagttagtctgggaaagtgtcagcttaaatccctgggattcgataaagtattcatgtacttatccgactctaggtgcagcggtttcaatgaccgcgataacagagactgggtctctgttgttaccccagcgcgagatggcccctgcggaacagtgttgacaaggaatgaaacccatgctacttacagcaacaccctgtacctggccgacgagataatcatccgggatcttaacataaagatcaatttcgcttgtagttatccgttagatatgaaggtgtccctgaaaacagctttgcagccaatggtgtctgcactcaatattagagtcggaggcactggtatgttcaccgtgcgtatggctctgtttcagaccccttcttatacccagccttatcagggatcatccgtgactttatctaccgaagcattcctgtacgttggcaccatgctggatggaggggacctttcaaggttcgcactgctcatgacaaactgctacgcaaccccctcctccaacgctactgacccacttaagtacttcattattcaggacaggtgccctcacacgagagatagcactattcaagttgtcgaaaacggcgaatcttcccaggggaggttttcggtgcaaatgttccggttcgccgggaactacgatctagtatacctccattgcgaggtctatctgtgtgacacaatgaacgagaagtgcaaaccaacatgctctggtacccggttccgctccggtagcgtcatcgatcagtcccgagttctgaatctcggtcccattactagaaagggcgttcaggctacagtgtcaagggccttcagctccctggggctgctgaaagtttggttacccctactgctgtcagccacacttaccctcacatttcagtag

SEQ ID NO: 98799 - DNA, 2022 bp, Artificial Sequence
  derived and/or modified sequence
atggggcagccctcactcacttggatgctgatggtagtggtggcctcctggtttattacaacagccgcaactgatactagtgaagcaagaaccaagtacaattgtcctgctaggtggtcctggcgtacaccacagcgaggaggggacaccgaacagggcccagatgaagactttacgtcccagggcagatggtgtagcgaatgtcactcaaacgcgacatgcacagaagacgaagcagtcaccacctgcacttgccaggagggattcaccggcgacggccttacttgcgtggacctggacgagtgcgctattccaggtgcacacaattgttcggccaattcttcatgtgtgaatacccccggatccttcagttgtgtttgccccgagggcttccgcctgagccctggattgggttgcacagacgtagacgaatgtgctgaacccggactgtcgcactgccatgcactggccacctgcgttaacgtcgttggatcttacctgtgtgtatgccccgctggctatagaggcgacgggtggcattgtgaatgctcaccaggaagctgcggccctggtcttgactgcgtgcccgagggagatgctctggtgtgcgctgacccatgccaagctcacagaacactcgatgaatattggcggtctactgagtatggagaaggctacgcatgtgataccgatttgcggggatggtaccggtttgtcggtcagggcggagcgaggatggctgaaacctgcgttccagttctgagatgcaacacagcagcaccaatgtggttgaacggtactcaccctagctctgatgagggcattgtgagcagaaaagcttgcgcacactggagtggacactgctgtctgtgggatgcaagcgtgcaggtcaaagcatgtgcaggtgggtactacgtgtacaatctgactgctccaccagaatgtcatctggcatactgtactgaccctagttcggttgaagggacttgtgaggagtgcagtattgacgaggattgcaaaagcaacaacggtcgctggcattgccagtgcaaacaagacttcaatatcacagacatctccttactggagcatcgactggaatgtggagccaatgacatgaaggtttctttgggaaagtgccaactaaagtctctcggatttgataaagtcttcatgtatctctcggatagcagatgttcaggcttcaatgaccgagacaatagggactgggtcagcgtcgtcacccctgcgagggatgggccttgcgggacagtactcacgaggaatgagacgcacgcgacctattctaacacactgtacctggcagacgagattattatccgtgacctgaatatcaagattaactttgcatgcagctaccccctcgatatgaaggttagtctcaagactgccctgcagccaatggtaagtgccctcaacatccgcgtcggaggcactgggatgttcaccgtccgaatggcattattccagacaccaagctacacgcagccttaccagggcagctccgtaactctgagtacagaggcatttctgtacgtgggcacaatgttggatggcggagacctgagtaggtttgctctgctgatgacaaattgttacgcgaccccatcctctaacgcaacggacccactaaagtacttcatcattcaggataggtgtcctcatactcgcgatagcacgatccaggtggtagagaatggcgagtcctctcagggacgtttctctgtccaaatgttcaggttcgccggaaattatgatcttgtttacctccactgtgaggtctacctttgtgacacaatgaacgagaaatgtaaacccacctgcagcgggacacggtttagaagcgggagcgtaatcgaccaatctagagtgttaaacctaggccctataacgaggaaaggggttcaggcaaccgtgtcccgtgccttctctagtctcgggcttcttaaggtctggcttcctctgctattgagtgccacgttgacgctgactttccaatag

SEQ ID NO: 98800 - DNA, 2022 bp, Artificial Sequence
  derived and/or modified sequence
atggggcagccaagtctaacatggatgctcatggttgtggtcgcatcctggttcatcaccacggctgccacggataccagtgaggcacggacaaaatacaattgtcctgctagatggagttggcggaccccacagagggggggagacacagagcagggcccagatgaagatttcacctcccaaggtagatggtgctctgagtgtcattctaatgccacttgcaccgaggacgaggcagtcacaacttgcacttgtcaagaggggttcaccggggatgggcttacctgcgtcgatcttgatgagtgcgctatccctggagctcataactgctcagcaaactcaagctgtgtgaatacacccggaagtttttcgtgcgtgtgccccgagggcttcaggctatctccaggcttgggctgtactgatgtcgatgagtgcgctgagcccggactgtcccactgtcatgccttggctacctgcgtgaatgttgttggatcctacctttgcgtgtgtcccgcaggctacagaggcgacggctggcattgcgagtgctctcccggttcttgtggacctggactcgattgtgtgcctgagggagatgccctggtctgcgccgatccttgtcaggctcaccgcaccctggacgagtattggcggtccaccgagtatggcgaaggctatgcctgcgataccgatctgagaggatggtataggtttgtggggcagggcggagcgagaatggcagagacgtgtgtgcctgtcttgaggtgcaacacggctgcccctatgtggctgaacgggactcacccctctagcgatgagggtatcgtttcgcgaaaagcctgtgcccactggtctggccattgctgcctgtgggatgcttccgtgcaagttaaagcgtgcgccggaggctattacgtctacaatttaaccgcccctccggagtgccaccttgcctattgtacggatccctcctctgtcgagggcacgtgtgaggagtgcagcatcgacgaagactgtaagtccaataacgggcgatggcattgccagtgcaaacaggactttaatatcacggacatttcactcttagaacaccggttagaatgcggagccaacgatatgaaggtgtctttgggaaaatgccaactcaagtctcttggattcgacaaggtctttatgtacctaagcgattcccggtgtagtggatttaacgatcgtgataatcgcgattgggttagtgttgtgacaccagctcgagatgggccatgcggaacagtgcttaccaggaatgagactcatgccacttactccaatactctgtacctggcagatgaaatcattatccgggatctgaacattaagattaacttcgcctgttcttacccgctcgacatgaaggtctccctcaagaccgcattacagcccatggtttcagcgctgaatatccgcgtgggtggaactggcatgtttactgtgaggatggcgttgtttcaaacgccgagttacactcagccgtatcagggaagctcagtcaccttgtccaccgaggctttcttgtacgtcggaactatgttagacggcggtgacctgagtcgatttgcactgctgatgactaactgctacgctactccatcttcaaatgcaaccgatcccctgaagtactttattatccaggaccggtgtcctcacactagagacagcacaatccaggtggtggaaaacggtgagtcttcgcaagggagattctccgttcagatgtttcggtttgccggaaattatgatcttgtgtacctgcactgcgaggtctacctgtgtgacaccatgaacgagaagtgtaaacctacctgctctggaactagattccggtccgggagtgttatcgaccagagtagggtgttaaacctcgggcctatcacccggaagggcgtgcaagccaccgtgagcagggccttcagctctttggggcttctgaaggtctggttgcccctcctgttaagcgccacactgactctaacttttcaatag

SEQ ID NO: 98801 - DNA, 2409 bp, Artificial Sequence
  derived and/or modified sequence
aactctacctttctggcttcaggacaccagacatcagagacagagagaaaaattcaaagggccaacccgtctttcctttgggcaggtgctatctagacctgaagtagcgggaagagcagaaaggatggggcagccatctctgacttggatgctgatggtggtggtggcctcttggttcatcacaactgcagccactgacacctcagaagcaagaacaaagtacaactgcccagccaggtggagttggaggactccgcagagaggaggcgacactgagcagggtcctgatgaagatttcaccagccagggaagatggtgctctgaatgtcacagcaatgccacctgcacggaggatgaggccgttacgacgtgcacctgtcaggagggcttcaccggcgatggcctgacctgcgtggacctggatgagtgcgccattcctggagctcacaactgctccgccaacagcagctgcgtaaacacgccaggctccttctcctgcgtctgccccgaaggcttccgcctgtcgcccggtctcggctgcacagacgtggatgagtgcgctgagcctgggcttagccactgccacgccctggccacatgtgtcaatgtggtgggcagctacttgtgcgtatgccccgcgggctaccggggggatggatggcactgtgagtgctccccgggctcctgcgggccggggttggactgcgtgcccgagggcgacgcgctcgtgtgcgcggatccgtgccaggcgcaccgcaccctggacgagtactggcgcagcaccgagtacggggagggctacgcctgcgacacggacctgcgcggctggtaccgcttcgtgggccagggcggtgcgcgcatggccgagacctgcgtgccagtcctgcgctgcaacacggccgcccccatgtggctcaatggcacgcatccgtccagcgacgagggcatcgtgagccgcaaggcctgcgcgcactggagcggccactgctgcctgtgggatgcgtccgtccaggtgaaggcctgtgccggcggctactacgtctacaacctgacagcgccccccgagtgtcacctggcgtactgcacagaccccagctccgtggaggggacgtgtgaggagtgcagtatagacgaggactgcaaatcgaataatggcagatggcactgccagtgcaaacaggacttcaacatcactgatatctccctcctggagcacaggctggaatgtggggccaatgacatgaaggtgtcgctgggcaagtgccagctgaagagtctgggcttcgacaaggtcttcatgtacctgagtgacagccggtgctcgggcttcaatgacagagacaaccgggactgggtgtctgtagtgaccccagcccgggatggcccctgtgggacagtgttgacgaggaatgaaacccatgccacttacagcaacaccctctacctggcagatgagatcatcatccgtgacctcaacatcaaaatcaactttgcatgctcctaccccctggacatgaaagtcagcctgaagaccgccctacagccaatggtcagtgctctaaacatcagagtgggcgggaccggcatgttcaccgtgcggatggcgctcttccagaccccttcctacacgcagccctaccaaggctcctccgtgacactgtccactgaggcttttctctacgtgggcaccatgttggatgggggcgacctgtcccgatttgcactgctcatgaccaactgctatgccacacccagtagcaatgccacggaccccctgaagtacttcatcatccaggacagatgcccacacactagagactcaactatccaagtggtggagaatggggagtcctcccagggccgattttccgtccagatgttccggtttgctggaaactatgacctagtctacctgcactgtgaagtctatctctgtgacaccatgaatgaaaagtgcaagcctacctgctctgggaccagattccgaagtgggagtgtcatagatcaatcccgtgtcctgaacttgggtcccatcacacggaaaggtgtccaggccacagtctcaagggcttttagcagcttggggctcctgaaagtctggctgcctctgcttctctcggccaccttgaccctgacttttcagtgactgacagcggaaagccctgtgctccatggctgccatctcacctcctgctgggcagggggcatgatgcgggccagtgctccagccacagaaaagaaagttcatgctttgttcagcctgccttcttttctcccttttaatcctggctgtcgagaaacagcctgtgtctttaaatgctgctttttctcaaaatgggacttgtgacggtgtacctgaggcccccatctccttaaagagtgtggcaaaataatgatttttaaatctca

SEQ ID NO: 98802 - DNA, 2350 bp, Artificial Sequence
  derived and/or modified sequence
agactaactctacctttctggcttcaggtgctatctagacctgaagtagcgggaagagcagaaaggatggggcagccatctctgacttggatgctgatggtggtggtggcctcttggttcatcacaactgcagccactgacacctcagaagcaagaacaaagtacaactgcccagccaggtggagttggaggactccgcagagaggaggcgacactgagcagggtcctgatgaagatttcaccagccagggaagatggtgctctgaatgtcacagcaatgccacctgcacggaggatgaggccgttacgacgtgcacctgtcaggagggcttcaccggcgatggcctgacctgcgtggacctggatgagtgcgccattcctggagctcacaactgctccgccaacagcagctgcgtaaacacgccaggctccttctcctgcgtctgccccgaaggcttccgcctgtcgcccggtctcggctgcacagacgtggatgagtgcgctgagcctgggcttagccactgccacgccctggccacatgtgtcaatgtggtgggcagctacttgtgcgtatgccccgcgggctaccggggggatggatggcactgtgagtgctccccgggctcctgcgggccggggttggactgcgtgcccgagggcgacgcgctcgtgtgcgcggatccgtgccaggcgcaccgcaccctggacgagtactggcgcagcaccgagtacggggagggctacgcctgcgacacggacctgcgcggctggtaccgcttcgtgggccagggcggtgcgcgcatggccgagacctgcgtgccagtcctgcgctgcaacacggccgcccccatgtggctcaatggcacgcatccgtccagcgacgagggcatcgtgagccgcaaggcctgcgcgcactggagcggccactgctgcctgtgggatgcgtccgtccaggtgaaggcctgtgccggcggctactacgtctacaacctgacagcgccccccgagtgtcacctggcgtactgcacagaccccagctccgtggaggggacgtgtgaggagtgcagtatagacgaggactgcaaatcgaataatggcagatggcactgccagtgcaaacaggacttcaacatcactgatatctccctcctggagcacaggctggaatgtggggccaatgacatgaaggtgtcgctgggcaagtgccagctgaagagtctgggcttcgacaaggtcttcatgtacctgagtgacagccggtgctcgggcttcaatgacagagacaaccgggactgggtgtctgtagtgaccccagcccgggatggcccctgtgggacagtgttgacgaggaatgaaacccatgccacttacagcaacaccctctacctggcagatgagatcatcatccgtgacctcaacatcaaaatcaactttgcatgctcctaccccctggacatgaaagtcagcctgaagaccgccctacagccaatggtcagtgctctaaacatcagagtgggcgggaccggcatgttcaccgtgcggatggcgctcttccagaccccttcctacacgcagccctaccaaggctcctccgtgacactgtccactgaggcttttctctacgtgggcaccatgttggatgggggcgacctgtcccgatttgcactgctcatgaccaactgctatgccacacccagtagcaatgccacggaccccctgaagtacttcatcatccaggacagatgcccacacactagagactcaactatccaagtggtggagaatggggagtcctcccagggccgattttccgtccagatgttccggtttgctggaaactatgacctagtctacctgcactgtgaagtctatctctgtgacaccatgaatgaaaagtgcaagcctacctgctctgggaccagattccgaagtgggagtgtcatagatcaatcccgtgtcctgaacttgggtcccatcacacggaaaggtgtccaggccacagtctcaagggcttttagcagcttggggctcctgaaagtctggctgcctctgcttctctcggccaccttgaccctgacttttcagtgactgacagcggaaagccctgtgctccatggctgccatctcacctcctgctgggcagggggcatgatgcgggccagtgctccagccacagaaaagaaagttcatgctttgttcagcctgccttcttttctcccttttaatcctggctgtcgagaaacagcctgtgtctttaaatgctgctttttctcaaaatgggacttgtgacggtgtacctgaggcccccatctccttaaagagtgtggcaaaataatgatttttaaatctc

SEQ ID NO: 98803 - protein, 1065 aa, Artificial Sequence
  derived and/or modified sequence
MDTPENVLQYIQWVEENFPENKEYLITLLEHLMKEFLDKKKYHNDPRFISYCLKFAEYNSDLHQFFEFLYNHGIGTLSSPLYIAWAGHLEAQGELQHASAVLQRGIQNQAEPREFLQQQYRLFQTRLTETHLPAQARTSEPLHNVQVLNQMITSKSNPGNNMACISKNQGSELSGVISSACDKESNMERRVITISKSEYSVHSSLASKVDVEQVVMYCKEKLIRGESEFSFEELRAQKYNQRRKHEQWVNEDRHYMKRKEANAFEEQLLKQKMDELHKKLHQVVETSHEDLPASQERSEVNPARMGPSVGSQQELRAPCLPVTYQQTPVNMEKNPREAPPVVPPLANAISAALVSPATSQSIAPPVPLKAQTVTDSMFAVASKDAGCVNKSTHEFKPQSGAEIKEGCETHKVANTSSFHTTPNTSLGMVQATPSKVQPSPTVHTKEALGFIMNMFQAPTLPDISDDKDEWQSLDQNEDAFEAQFQKNVRSSGAWGVNKIISSLSSAFHVFEDGNKENYGLPQPKNKPTGARTFGERSVSRLPSKPKEEVPHAEEFLDDSTVWGIRCNKTLAPSPKSPGDFTSAAQLASTPFHKLPVESVHILEDKENVVAKQCTQATLDSCEENMVVPSRDGKFSPIQEKSPKQALSSHMYSASLLRLSQPAAGGVLTCEAELGVEACRLTDTDAAIAEDPPDAIAGLQAEWMQMSSLGTVDAPNFIVGNPWDDKLIFKLLSGLSKPVSSYPNTFEWQCKLPAIKPKTEFQLGSKLVYVHHLLGEGAFAQVYEATQGDLNDAKNKQKFVLKVQKPANPWEFYIGTQLMERLKPSMQHMFMKFYSAHLFQNGSVLVGELYSYGTLLNAINLYKNTPEKVMPQGLVISFAMRMLYMIEQVHDCEIIHGDIKPDNFILGNGFLEQDDEDDLSAGLALIDLGQSIDMKLFPKGTIFTAKCETSGFQCVEMLSNKPWNYQIDYFGVAATVYCMLFGTYMKVKNEGGECKPEGLFRRLPHLDMWNEFFHVMLNIPDCHHLPSLDLLRQKLKKVFQQHYTNKIRALRNRLIVLLLECKRSRK

SEQ ID NO: 98804 - DNA, 3198 bp, Artificial Sequence
  derived and/or modified sequence
atggatacgcctgaaaacgtgctgcagtacattcaatgggtagaagagaattttcctgagaacaaggaatatctgatcacactgcttgagcacttgatgaaagagtttctggataagaagaaataccataacgaccctcgatttattagttattgcctaaagttcgctgagtacaactcagatttgcaccagttcttcgagtttctgtataaccacgggatcgggactttaagctcgcccctctatatcgcgtgggctgggcacctggaggctcagggagagctgcagcacgcaagtgcagtgctccagaggggtatacagaatcaggcggagccgagagagttcttgcaacagcagtatcgcctttttcagacacgcctcaccgagacccacctccccgcccaggctcgcacctcagagcccttacacaatgtgcaggtgctgaatcagatgattaccagcaaaagcaacccgggaaacaatatggcctgtatatccaaaaaccagggatcggaattgtctggtgtgatctccagtgcttgcgataaagaatctaatatggagagaagggttatcactattagtaagagcgagtacagcgtacattctagtcttgcgtccaaggtggatgtcgagcaggtcgttatgtactgcaaagagaaacttattcgcggagaatccgagttctcgttcgaggagctgcgcgcgcagaaatataaccagcggcggaagcacgaacagtgggtgaacgaagaccgccattacatgaagcggaaggaagccaatgcttttgaggaacagttgcttaaacagaagatggacgaactgcacaagaagctgcatcaagtcgttgaaacgtcacacgaggatttacccgccagccaggagcggtccgaggtgaacccagcccgcatgggtcctagcgttgggtcacagcaggaacttcgagccccctgtcttccagtgacgtatcagcagacgcctgtgaacatggaaaaaaatccccgcgaggctccccccgtggtgcctccccttgcaaacgccatttctgcagccctggtgtctcccgccacgagccaatccattgccccaccagtgcctctgaaagcccagactgtaaccgatagcatgtttgccgttgcctccaaagatgctggttgcgtgaataagtcgactcacgaattcaagcctcagtccggagcggaaattaaagaaggctgcgaaacacacaaggtggctaatacttcaagctttcacacgacccccaacacctccctgggcatggtgcaagcgactcccagcaaggtgcagcccagtccgaccgtgcataccaaggaggccctgggattcatcatgaacatgtttcaggctccgactctgccagacatttcagacgataaagacgagtggcagagtttggatcaaaacgaggatgcttttgaggcccagttccaaaaaaacgttcgtagtagtggtgcttggggggtcaataagatcatcagcagcctctcctccgccttccatgtctttgaagacgggaacaaagagaattatggtctgccccagccaaaaaacaaaccaacaggagctcggacctttggtgagcggtctgtgtcccggctgccttcaaaacctaaagaagaggtgcctcatgccgaggagtttctggatgattctacagtctggggcattcgctgcaacaaaaccctggcgcccagccctaaaagtcctggcgatttcacgtctgctgctcagctggcctctaccccctttcataagctgcccgtcgaaagcgtgcatatcttggaggacaaagagaatgtcgtcgcgaagcagtgtacccaggctacccttgattcttgtgaggagaatatggtggtgccttctcgcgatggtaaattctccccaattcaggagaagagccctaaacaggcgctgagctctcacatgtattctgcatccctgttgcgactgagtcagccggccgctggcggcgtcctgacatgtgaggccgaattgggcgttgaggcgtgtcggcttaccgacactgacgccgccattgccgaagatcccccagacgctatcgccgggctccaagctgagtggatgcagatgtcatctctcggaacagtggatgccccaaattttattgtgggaaacccatgggatgacaaactcatctttaagctcctcagtgggctgtccaagccagtgtcttcctaccctaacacattcgagtggcaatgtaaactcccagctatcaagccaaagactgaatttcaacttggttccaagctggtatatgttcatcacctcctgggtgagggggcttttgcccaggtttacgaagcgacccaaggtgatctgaacgatgccaaaaacaaacaaaagttcgtgcttaaagtgcagaagcctgccaacccttgggaattctatatcggcacacagctcatggagcggcttaagccaagcatgcaacacatgttcatgaaattttactcggcccatctgtttcagaatggatcagtgctggtgggcgaactctactcatatggaaccctactaaatgcaataaatctgtacaaaaatacgccagagaaggtgatgccccaagggctcgtaattagcttcgctatgcgcatgttgtatatgatagaacaggttcacgactgcgaaattatccatggagatataaagcccgataacttcatactcggaaacggctttcttgaacaggacgatgaggatgacttgtctgccggcctggcattgatcgatctgggccaaagcatcgacatgaagctctttcctaaagggaccatatttaccgcgaaatgcgagacatctgggttccaatgcgttgaaatgcttagtaacaagccatggaattatcagattgattattttggggttgccgccactgtctactgcatgctctttggtacctacatgaaagtgaaaaatgaaggtggcgagtgtaaacccgagggactgttcagaaggctccctcacctagacatgtggaacgaattttttcacgtcatgctcaatattccggactgtcatcatctaccgtctctcgacctcctgagacaaaagcttaaaaaagtctttcaacagcattacaccaataaaattcgtgctttacggaataggctgatagtgctactgctggaatgtaaacggtctaggaaatag

SEQ ID NO: 98805 - DNA, 3198 bp, Artificial Sequence
  derived and/or modified sequence
atggacaccccagaaaatgtgctgcagtacatccagtgggtggaggagaacttccctgagaacaaggagtacctgatcaccctgctggagcacctgatgaaggagttcctggacaagaagaagtaccacaatgacccccgcttcatctcctactgcctgaagtttgctgagtacaacagcgacctgcaccagttctttgagttcctgtacaaccacggcatcggcaccctgagcagccccctgtacatcgcctgggccggccacctggaggcccagggcgagctgcagcacgccagcgctgtgctgcagaggggcatccagaaccaggccgagccccgggagttcctgcagcagcagtaccgcctcttccagacccggctgacagagacccacctgcctgcccaggcccggaccagcgagcccctgcacaacgtgcaggtgctgaaccagatgatcaccagcaagagcaaccctggcaacaacatggcctgcatcagcaagaaccagggcagcgagctgagcggggtcatcagcagcgcctgtgacaaggagagcaacatggagaggagggtcatcaccatcagcaagtctgagtacagcgtgcacagcagcctggccagcaaggtggatgtggagcaggtggtgatgtactgcaaggagaagctgatccggggggagagcgagttctcctttgaggagctgcgggcccagaagtacaaccagaggaggaagcatgagcagtgggtgaatgaagatagacactacatgaagaggaaggaggccaatgcctttgaggagcagctgctgaagcagaagatggatgagctgcacaagaagctgcaccaggtggtggagaccagccatgaggacctgcctgccagccaggagaggtctgaggtgaacccagccaggatgggccccagcgtgggcagccagcaggagctgcgggccccctgcctgcctgtgacctaccagcagacccctgtgaacatggagaagaacccccgggaggcccctcctgtggtgccccccctggccaatgccatctctgctgccctggtgtccccagccaccagccagagcatcgcccctcctgtgcccctgaaggcccagacagtgacagacagcatgtttgctgtggccagcaaggatgctggctgtgtgaacaagagcacccatgagttcaagccccagagcggggctgagatcaaggagggctgtgagacccacaaggtggccaacaccagcagcttccacaccacccccaacaccagcctgggcatggtgcaggccacccccagcaaggtgcagcccagccccaccgtgcacaccaaggaggccctgggcttcatcatgaacatgttccaggcccccaccctgcctgacatcagtgatgacaaggatgagtggcagagcctggaccagaatgaagatgcctttgaggcccagttccagaagaatgtgcgcagcagcggggcctggggcgtgaacaagatcatcagcagcctgagcagcgccttccacgtgtttgaagatggcaacaaggagaactacggcctgccccagcccaagaacaagcccaccggggcccggacctttggagagaggtctgtgtcccggctgcccagcaagcccaaggaggaggtgccccacgccgaggagttcctggatgacagcacagtgtggggcatccgctgcaacaagaccctggcccccagccccaagagccctggggacttcaccagcgctgcccagctggccagcacccccttccacaagctgcctgtggagagcgtgcacatcctggaggacaaggaaaatgtggtggccaagcagtgcacccaggccaccctggacagctgtgaggagaacatggtggtgcccagcagagatggcaagttcagccccatccaggagaagagccccaagcaggccctgagcagccacatgtacagcgccagcctgctgcggctgagccagcctgctgctggaggagtgctgacctgtgaggccgagctgggcgtggaggcctgccgcctgacagacacagatgctgccatcgcagaagatcctccagatgccatcgccggcctgcaggccgagtggatgcagatgagcagcctgggcaccgtggatgcccccaacttcatcgtgggcaacccctgggatgacaagctgatcttcaagctgctgagcggcctgagcaagcctgtgagcagctaccccaacacctttgagtggcagtgcaagctgcctgccatcaagcccaagacagagttccagctgggcagcaagctggtgtatgtgcaccacctgctgggggagggcgcctttgcccaggtgtatgaggccacccagggcgacctgaatgatgccaagaacaagcagaagtttgtgctgaaggtgcagaagccagccaacccctgggagttctacatcggcacccagctgatggagcggctgaagcccagcatgcagcacatgttcatgaagttctacagcgcccacctgttccagaatggatctgtgctggtgggggagctgtacagctatggcaccctgctgaatgccatcaacctgtacaagaacaccccagagaaggtgatgccccagggcctggtgatcagctttgccatgaggatgctgtacatgattgagcaggtgcatgactgtgagatcatccatggagacatcaagccagacaacttcatcctgggcaatggcttcctggagcaggatgatgaagatgacctgtctgctggcctggccctgattgacctgggccagagcattgacatgaagctgttccccaagggcaccatcttcaccgccaagtgtgagaccagcggcttccagtgtgtggagatgctgagcaacaagccctggaactaccagattgactactttggagtggccgccaccgtgtactgcatgctgtttggcacctacatgaaggtgaagaatgaaggaggagagtgcaagccagagggcctcttccggcggctgccccacctggacatgtggaatgagttcttccacgtgatgctgaacatcccagactgccaccacctgcccagcctggacctgctgcggcagaagctgaagaaggtgttccagcagcactacaccaacaagatccgggccctgaggaacagactcatcgtgctgctgctggagtgcaagaggagcaggaagtag

SEQ ID NO: 98806 - DNA, 3198 bp, Artificial Sequence
  derived and/or modified sequence
atggacacccccgagaacgtgctgcagtacatccagtgggtggaggagaactttcctgagaacaaagaatacctgattacactgttggagcacctgatgaaagagttcctggacaaaaagaaataccataatgacccacggtttatatcctactgtctgaaatttgcagagtacaactcagacctgcaccaatttttcgagttcctgtacaaccacggaattggcacactgtcatcaccactgtacatcgcatgggccggccatctggaagctcagggtgagctgcagcacgccagtgcagtgttacagcgcggaatccagaatcaggccgagcctcgtgagttcctgcaacagcagtatcgcctgtttcaaacacggcttaccgagactcacctgcccgctcaggcgagaacgtctgagcccctgcacaatgtccaggtgctcaatcagatgatcacttcgaagtctaaccccgggaataacatggcttgtatttcaaaaaaccagggtagtgaactctccggggttatctcttccgcctgtgataaagagagcaacatggagaggcgcgtcatcaccatctccaagagcgaatatagcgttcatagtagtttagctagtaaggtggacgttgaacaggtggtgatgtattgcaaggagaaactgatccgaggcgagtctgaattttcgttcgaggagctgcgggcccaaaaatacaaccagcgccgaaagcatgaacagtgggtgaacgaggataggcactacatgaagcggaaagaggccaatgcatttgaagaacagctactgaagcagaagatggatgagcttcataaaaagctgcatcaggtcgtggaaaccagtcatgaggaccttcccgcgtctcaagagcgctccgaggtcaatccagcgaggatgggcccgagcgtgggctcccagcaagagttaagagccccttgtctgcccgtaacgtatcagcagacccccgtcaatatggagaaaaaccctcgggaggcacctcctgtggttcccccactggccaatgctatctccgccgccttggtgtcacctgccacgagccagtccatagctcctcctgtgcctctgaaagcacaaactgtgactgattccatgttcgctgtggcctcaaaggatgcaggctgcgtgaataagtccactcacgagttcaagccacagagcggcgccgagatcaaggaaggatgtgaaactcacaaagttgctaacacctccagctttcacacaactcctaacacatcactcggcatggttcaggccacgccaagcaaagttcagccttcccccacagttcataccaaggaagctcttggctttatcatgaatatgtttcaggcccccacactcccagatattagtgacgacaaagatgagtggcaaagcttggatcagaatgaggatgcttttgaggcccagtttcagaagaacgttagaagctctggcgcatggggagtgaacaagataatcagctccctatcttcagcctttcatgtgttcgaggatgggaataaggaaaactatggtctaccacagcctaaaaataaacccactggggcccggacatttggtgaacggtcagtcagccgactaccaagtaagcctaaagaagaggtgccccacgccgaggagtttcttgacgattcaactgtatggggcattcgctgtaataaaactcttgccccctccccaaagagcccgggcgacttcacctccgccgcgcagttggcaagcactccattccataagcttccagttgagtcagtgcatatactagaggacaaggagaatgtggtcgcaaagcagtgcacccaggcgacccttgattcctgcgaggaaaacatggtggtgcccagtagggatggtaagttttctccaatccaggagaagagtcctaagcaggccctctcatcccacatgtatagcgctagcctgcttaggttgagccagcctgcagccggcggtgtcttgacttgcgaggcggaactgggcgtcgaggcttgtcggttgacagacacagatgccgctatagcagaggaccccccagatgcaatcgcagggctgcaagcagagtggatgcagatgagctccctcggtaccgtggacgcgcctaatttcattgtggggaacccttgggacgacaaacttatcttcaagctgctgtcagggctgtccaagcccgtgtcaagctatccgaacacctttgaatggcaatgcaagttgcccgctattaagcccaaaaccgagttccagctgggatccaaactggtgtacgttcaccacctgctgggcgaaggcgcatttgcccaggtttatgaggcaactcagggcgaccttaacgatgcaaagaacaagcagaaatttgtcctcaaggtgcaaaagcccgctaatccctgggagttttacatcggaactcagctcatggagagactgaagccatctatgcagcatatgttcatgaagttctatagtgcccatctgttccagaatgggagcgtcttggttggggagctgtatagctacggaaccctgctgaacgctatcaatctttacaagaatacacctgagaaggtaatgccccagggcctagtgataagctttgcaatgagaatgctgtacatgattgagcaggtccacgactgcgagatcattcatggggacattaagcctgacaattttattctggggaacggttttttggagcaggatgacgaagacgatctgagtgctgggttggctttgatcgacctcggacagtccatcgacatgaaactgttcccaaaggggaccatcttcaccgcaaaatgcgagactagcggcttccagtgtgtggagatgctcagcaataaaccatggaattatcaaatcgactacttcggcgttgccgcaactgtctattgcatgctgtttggtacttatatgaaggtgaagaatgaagggggcgaatgcaaaccggaaggcctttttcgtcgcctcccccatcttgacatgtggaacgagttttttcatgtgatgctgaacataccagattgccaccacctgcctagcctagatttgctccgacagaagctgaagaaggtatttcagcagcactatacgaacaaaattcgggcccttcgaaatcgacttatagttttgctccttgaatgcaaaagatcccggaagtag

SEQ ID NO: 98807 - DNA, 3198 bp, Artificial Sequence
  derived and/or modified sequence
atggatacaccagagaatgtcctgcagtacatccaatgggtcgaggaaaatttcccagaaaataaggaatatctaataactctcttagagcacctaatgaaggagtttcttgacaagaagaaataccataatgatcctaggtttattagctattgcctcaagttcgcagaatacaattccgatctgcatcagttcttcgaatttctgtacaaccacggtataggaacgctctcatccccactgtacatcgcctgggcgggtcatctcgaagcccagggggaactgcagcacgcctcagcggtcctccagagaggaatacagaaccaggccgagccgcgagagttcctccagcagcaatacagattattccagactaggctgaccgagacacatctgcccgctcaggcgcgaacatcagaaccactgcacaacgtccaggtactaaatcagatgatcacttcaaaatccaaccccggtaacaatatggcatgcatctccaaaaatcaaggatctgagctttccggagttataagttccgcctgcgacaaggagtcaaatatggagcggcgagtgattactatctctaagtctgagtatagtgtacactcctcactcgcgtctaaagtggacgtcgaacaggtggtcatgtactgcaaagagaagcttatcaggggggaatcagagttcagtttcgaggagctgcgcgctcaaaaatataatcagaggcgaaaacatgagcagtgggtaaacgaagaccggcactatatgaaaagaaaagaggccaacgcctttgaagagcagctgttgaaacagaagatggatgaactacataaaaaactgcatcaggtggtggagacgtctcacgaggaccttcccgcatctcaagagcgtagcgaggtgaaccccgcacggatgggaccctccgtgggttcacagcaagaattgagggcgccatgtctgcctgtaacttatcagcaaactccagtcaacatggaaaagaatccgagagaggccccacctgtagtgccccctctggctaacgccatatcagcagcccttgtgtccccagccacgagccagtctatcgcacccccagtgccattgaaagcccaaaccgtcaccgattccatgttcgccgttgcatcgaaagacgcaggatgcgtgaataaaagcacgcacgaatttaaaccacagagcggcgctgaaatcaaggaggggtgtgagacacacaaagtggccaacacctcaagcttccacaccacgccgaatacttctctgggtatggtgcaagctacccctagcaaggtgcagcccagccctactgttcataccaaagaggccttaggattcatcatgaacatgttccaagccccaaccttgcccgacatatctgacgataaggatgaatggcagagcctcgaccagaacgaagatgcattcgaggcacagtttcagaagaacgtgcggtcatccggagcctggggggttaacaaaattatcagcagcctctccagcgcctttcacgttttcgaggatggtaataaggagaactatgggcttccccagcctaagaacaaaccaaccggggctaggacattcggggaaaggagcgtgtcacgcctccccagcaaacccaaggaggaggtcccacacgcagaggaattcctcgacgattccacggtgtggggcatccgctgtaataagactctcgccccatcacctaagtctccaggcgattttacctccgccgctcagctcgccagcacgcctttccacaaattacccgtagaatcagttcacatcttggaggacaaggaaaatgtggtcgcaaagcagtgcacccaggctaccctcgatagttgcgaagagaatatggtcgtgccatcacgtgatgggaagttttctcctatccaggagaagagtccaaagcaggctctttctagtcacatgtacagtgcgtcactgttgcgactgtcccagcctgccgcaggcggagtgctgacatgcgaggctgagctgggcgttgaagcctgcaggctgacggatactgatgccgcaattgccgaggacccacccgacgctattgcgggactccaggccgagtggatgcaaatgagttcgctgggaacagttgacgcccctaactttatagtgggaaacccgtgggatgataagttgatcttcaaattactgtccggactttccaaaccagtctcatcatacccgaatacgttcgaatggcagtgcaaattgccagcaattaagccgaagacagaattccagttaggatccaagttagtatacgtgcaccatctgctgggtgaaggtgccttcgcacaggtgtatgaagcaacacagggggatctgaatgacgcgaagaataagcagaagtttgttctgaaggtgcagaaaccagcgaacccctgggagttttacattggaacccaactgatggagaggctcaagccaagtatgcagcatatgttcatgaaattctacagcgctcacctgttccagaacgggagcgtacttgtcggagagctatatagctacgggacactgttaaatgccatcaatctctataagaacacccccgaaaaggttatgccgcagggtcttgtcatctccttcgctatgagaatgctatacatgatcgagcaggtccacgactgtgagattatacacggcgatatcaaaccggataatttcattctcggcaacgggtttctggagcaagatgatgaggatgatctgagcgctgggctggccctgattgacctgggtcagtctatcgatatgaaactgtttcctaagggcacaatcttcacagccaagtgcgagacatctggctttcaatgtgttgagatgttatcaaacaagccctggaattaccagatcgattactttggcgttgccgctacagtctattgtatgctgttcgggacgtacatgaaggtaaaaaatgagggcggagagtgcaagcccgagggactgtttcggaggctgccccaccttgacatgtggaatgaattctttcacgttatgctgaacatacctgactgccatcatctgccttctctggacctgctgcggcagaagctgaagaaggtcttccagcagcattacacgaacaagattagggccctgcgcaaccggctaattgtgcttctcttggaatgcaaacgtagccggaagtag

SEQ ID NO: 98808 - DNA, 3532 bp, Artificial Sequence
  derived and/or modified sequence
attcgaatcggcggcggcttctagtttgcggttcaggtttggccgctgccggccagcgtcctctggccatggacaccccggaaaatgtccttcaatacatacagtgggtagaagagaattttcctgagaataaagaatacttgataactttactagaacatttaatgaaggaatttttagataagaagaaataccacaatgacccaagattcatcagttattgtttaaaatttgctgagtacaacagtgacctccatcaattttttgagtttctgtacaaccatgggattggaaccctgtcatcccctctgtacattgcctgggcggggcatctggaagcccaaggagagctgcagcatgccagtgctgtccttcagagaggaattcaaaaccaggctgaacccagagagttcctgcaacaacaatacaggttatttcagacacgcctcactgaaacccatttgccagctcaagctagaacctcagaacctctgcataatgttcaggttttaaatcaaatgataacatcaaaatcaaatccaggaaataacatggcctgcatttctaagaatcagggttcagagctttctggagtgatatcttcagcttgtgataaagagtcaaatatggaacgaagagtgatcacgatttctaaatcagaatattctgtgcactcatctttggcatccaaagttgatgttgagcaggttgttatgtattgcaaggagaagcttattcgtggggaatcagaattttcctttgaagaattgagagcccagaaatacaatcaacggagaaagcatgagcaatgggtaaatgaagacagacattatatgaaaaggaaagaagcaaatgcttttgaagaacagctattaaaacagaaaatggatgaacttcataagaagttgcatcaggtggtggagacatcccatgaggatctgcccgcttcccaggaaaggtccgaggttaatccagcacgtatggggccaagtgtaggctcccagcaggaactgagagcgccatgtcttccagtaacctatcagcagacaccagtgaacatggaaaagaacccaagagaggcacctcctgttgttcctcctttggcaaatgctatttctgcagctttggtgtccccagccaccagccagagcattgctcctcctgttcctttgaaagcccagacagtaacagactccatgtttgcagtggccagcaaagatgctggatgtgtgaataagagtactcatgaattcaagccacagagtggagcagagatcaaagaagggtgtgaaacacataaggttgccaacacaagttcttttcacacaactccaaacacatcactgggaatggttcaggcaacgccatccaaagtgcagccatcacccaccgtgcacacaaaagaagcattaggtttcatcatgaatatgtttcaggctcctacacttcctgatatttctgatgacaaagatgaatggcaatctctagatcaaaatgaagatgcatttgaagcccagtttcaaaaaaatgtaaggtcatctggggcttggggagtcaataagatcatctcttctttgtcatctgcttttcatgtgtttgaagatggaaacaaagaaaattatggattaccacagcctaaaaataaacccacaggagccaggacctttggagaacgctctgtcagcagacttccttcaaaaccaaaggaggaagtgcctcatgctgaagagtttttggatgactcaactgtatggggtattcgctgcaacaaaaccctggcacccagtcctaagagcccaggagacttcacatctgctgcacaacttgcgtctacaccattccacaagcttccagtggagtcagtgcacattttagaagataaagaaaatgtggtagcaaaacagtgtacccaggcgactttggattcttgtgaggaaaacatggtggtgccttcaagggatggaaaattcagtccaattcaagagaaaagcccaaaacaggccttgtcgtctcacatgtattcagcatccttacttcgtctgagccagcctgctgcaggtggggtacttacctgtgaggcagagttgggcgttgaggcttgcagactcacagacactgacgctgccattgcagaagatccaccagatgctattgctgggctccaagcagaatggatgcagatgagttcacttgggactgttgatgctccaaacttcattgttgggaacccatgggatgataagctgattttcaaacttttatctgggctttctaaaccagtgagttcctatccaaatacttttgaatggcaatgtaaacttccagccatcaagcccaagactgaatttcaattgggttctaagctggtctatgtccatcaccttcttggagaaggagcctttgcccaggtgtacgaagctacccagggagatctgaatgatgctaaaaataaacagaaatttgttttaaaggtccaaaagcctgccaacccctgggaattctacattgggacccagttgatggaaagactaaagccatctatgcagcacatgtttatgaagttctattctgcccacttattccagaatggcagtgtattagtaggagagctctacagctatggaacattattaaatgccattaacctctataaaaatacccctgaaaaagtgatgcctcaaggtcttgtcatctcttttgctatgagaatgctttacatgattgagcaagtgcatgactgtgaaatcattcatggagacattaaaccagacaatttcatacttggaaacggatttttggaacaggatgatgaagatgatttatctgctggcttggcactgattgacctgggtcagagtatagatatgaaactttttccaaaaggaactatattcacagcaaagtgtgaaacatctggttttcagtgtgttgagatgctcagcaacaaaccatggaactaccagatcgattactttggggttgctgcaacagtatattgcatgctctttggcacttacatgaaagtgaaaaatgaaggaggagagtgtaagcctgaaggtctttttagaaggcttcctcatttggatatgtggaatgaattttttcatgttatgttgaatattccagattgtcatcatcttccatctttggatttgttaaggcaaaagctgaagaaagtatttcaacaacactatactaacaagattagggccctacgtaataggctaattgtactgctcttagaatgtaagcgttcacgaaaataaaatttggatatagacagtccttaaaaatcacactgtaaatatgaatctgctcactttaaacctgtttttttttcatttattgtttatgtaaatgtttgttaaaaataaatcccatggaatatttccatgtaacttagttgttataaatatttcaacaaaatatacaaccccataaggtccctatatagcaggctgattgggctgcttctgggatgcaagcatttgtgagaataattcagacatgagcattctctagaaatcacttt

SEQ ID NO: 98809 - DNA, 3198 bp, Artificial Sequence
  derived and/or modified sequence
atggacacccccgagaacgtgctgcagtacatccagtgggtggaggagaacttccccgagaacaaggagtacctgatcaccctgctggagcacctgatgaaggagttcctggacaagaagaagtaccacaacgaccccagattcatcagctactgcctgaagttcgccgagtacaacagcgacctgcaccagttcttcgagttcctgtacaaccacggcatcggcaccctgagcagccccctgtacatcgcctgggccggccacctggaggcccagggcgagctgcagcacgccagcgccgtgctgcagagaggcatccagaaccaggccgagcccagagagttcctgcagcagcagtacagactgttccagaccagactgaccgagacccacctgcccgcccaggccagaaccagcgagcccctgcacaacgtgcaggtgctgaaccagatgatcaccagcaagagcaaccccggcaacaacatggcctgcatcagcaagaaccagggcagcgagctgagcggcgtgatcagcagcgcctgcgacaaggagagcaacatggagagaagagtgatcaccatcagcaagagcgagtacagcgtgcacagcagcctggccagcaaggtggacgtggagcaggtggtgatgtactgcaaggagaagctgatcagaggcgagagcgagttcagcttcgaggagctgagagcccagaagtacaaccagagaagaaagcacgagcagtgggtgaacgaggacagacactacatgaagagaaaggaggccaacgccttcgaggagcagctgctgaagcagaagatggacgagctgcacaagaagctgcaccaggtggtggagaccagccacgaggacctgcccgccagccaggagagaagcgaggtgaaccccgccagaatgggccccagcgtgggcagccagcaggagctgagagccccctgcctgcccgtgacctaccagcagacccccgtgaacatggagaagaaccccagagaggccccccccgtggtgccccccctggccaacgccatcagcgccgccctggtgagccccgccaccagccagagcatcgccccccccgtgcccctgaaggcccagaccgtgaccgacagcatgttcgccgtggccagcaaggacgccggctgcgtgaacaagagcacccacgagttcaagccccagagcggcgccgagatcaaggagggctgcgagacccacaaggtggccaacaccagcagcttccacaccacccccaacaccagcctgggcatggtgcaggccacccccagcaaggtgcagcccagccccaccgtgcacaccaaggaggccctgggcttcatcatgaacatgttccaggcccccaccctgcccgacatcagcgacgacaaggacgagtggcagagcctggaccagaacgaggacgccttcgaggcccagttccagaagaacgtgagaagcagcggcgcctggggcgtgaacaagatcatcagcagcctgagcagcgccttccacgtgttcgaggacggcaacaaggagaactacggcctgccccagcccaagaacaagcccaccggcgccagaaccttcggcgagagaagcgtgagcagactgcccagcaagcccaaggaggaggtgccccacgccgaggagttcctggacgacagcaccgtgtggggcatcagatgcaacaagaccctggcccccagccccaagagccccggcgacttcaccagcgccgcccagctggccagcacccccttccacaagctgcccgtggagagcgtgcacatcctggaggacaaggagaacgtggtggccaagcagtgcacccaggccaccctggacagctgcgaggagaacatggtggtgcccagcagagacggcaagttcagccccatccaggagaagagccccaagcaggccctgagcagccacatgtacagcgccagcctgctgagactgagccagcccgccgccggcggcgtgctgacctgcgaggccgagctgggcgtggaggcctgcagactgaccgacaccgacgccgccatcgccgaggacccccccgacgccatcgccggcctgcaggccgagtggatgcagatgagcagcctgggcaccgtggacgcccccaacttcatcgtgggcaacccctgggacgacaagctgatcttcaagctgctgagcggcctgagcaagcccgtgagcagctaccccaacaccttcgagtggcagtgcaagctgcccgccatcaagcccaagaccgagttccagctgggcagcaagctggtgtacgtgcaccacctgctgggcgagggcgccttcgcccaggtgtacgaggccacccagggcgacctgaacgacgccaagaacaagcagaagttcgtgctgaaggtgcagaagcccgccaacccctgggagttctacatcggcacccagctgatggagagactgaagcccagcatgcagcacatgttcatgaagttctacagcgcccacctgttccagaacggcagcgtgctggtgggcgagctgtacagctacggcaccctgctgaacgccatcaacctgtacaagaacacccccgagaaggtgatgccccagggcctggtgatcagcttcgccatgagaatgctgtacatgatcgagcaggtgcacgactgcgagatcatccacggcgacatcaagcccgacaacttcatcctgggcaacggcttcctggagcaggacgacgaggacgacctgagcgccggcctggccctgatcgacctgggccagagcatcgacatgaagctgttccccaagggcaccatcttcaccgccaagtgcgagaccagcggcttccagtgcgtggagatgctgagcaacaagccctggaactaccagatcgactacttcggcgtggccgccaccgtgtactgcatgctgttcggcacctacatgaaggtgaagaacgagggcggcgagtgcaagcccgagggcctgttcagaagactgccccacctggacatgtggaacgagttcttccacgtgatgctgaacatccccgactgccaccacctgcccagcctggacctgctgagacagaagctgaagaaggtgttccagcagcactacaccaacaagatcagagccctgagaaacagactgatcgtgctgctgctggagtgcaagagaagcagaaagtag

SEQ ID NO: 98810 - protein, 1028 aa, Artificial Sequence
  derived and/or modified sequence
MDTPENVLQMLEAHMQSYKGNDPLGEWERYIQWVEENFPENKEYLITLLEHLMKEFLDKKKYHNDPRFISYCLKFAEYNSDLHQFFEFLYNHGIGTLSSPLYIAWAGHLEAQGELQHASAVLQRGIQNQAEPREFLQQQYRLFQTRLTETHLPAQARTSEPLHNVQVLNQMITSKSNPGNNMACISKNQGSELSGVISSACDKESNMERRVITISKSEYSVHSSLASKVDVEQVVMYCKEKLIRGESEFSFEELRAQKYNQRRKHEQWVNEDRHYMKRKEANAFEEQLLKQKMDELHKKLHQVVETSHEDLPASQERSEVNPARMGPSVGSQQELRAPCLPVTYQQTPVNMEKNPREAPPVVPPLANAISAALVSPATSQSIAPPVPLKAQTVTDSMFAVASKDAGCVNKSTHEFKPQSGAEIKEGCETHKVANTSSFHTTPNTSLGMVQATPSKVQPSPTVHTKEALGFIMNMFQAPTLPDISDDKDEWQSLDQNEDAFEAQFQKNVRSSGAWGVNKIISSLSSAFHVFEDGNKENYGLPQPKNKPTGARTFGERSVSRLPSKPKEEVPHAEEFLDDSTVWGIRCNKTLAPSPKSPGDFTSAAQLASTPFHKLPVESVHILEDKENVVAKQCTQATLDSCEENMVVPSRDGKFSPIQEKSPKQALSSHMYSASLLRLSQPAAGGVLTCEAELGVEACRLTDTDAAIAEDPPDAIAGLQAEWMQMSSLGTVDAPNFIVGNPWDDKLIFKLLSGLSKPVSSYPNTFEWQCKLPAIKPKTEFQLGSKLVYVHHLLGEGAFAQVYEATQGDLNDAKNKQKFVLKVQKPANPWEFYIGTQLMERLKPSMQHMFMKFYSAHLFQNGSVLVGELYSYGTLLDDEDDLSAGLALIDLGQSIDMKLFPKGTIFTAKCETSGFQCVEMLSNKPWNYQIDYFGVAATVYCMLFGTYMKVKNEGGECKPEGLFRRLPHLDMWNEFFHVMLNIPDCHHLPSLDLLRQKLKKVFQQHYTNKIRALRNRLIVLLLECKRSRK

SEQ ID NO: 98811 - DNA, 3087 bp, Artificial Sequence
  derived and/or modified sequence
atggacactcccgaaaacgtgttgcagatgttagaagctcatatgcagagttataaaggcaatgacccactgggcgagtgggagagatatattcagtgggtcgaagagaattttcctgagaataaggaatacctgatcacactgctcgagcaccttatgaaagagtttctggacaagaagaaatatcataatgacccccgtttcatctcctactgtctgaagttcgccgagtacaactctgatctccatcagttttttgaatttctctataaccacggaatcggcacactttccagtccactgtatattgcctgggcggggcacctggaggcccaaggagagctgcaacacgcctctgcagtgcttcaacgaggtatccagaaccaggccgaacccagggaattcctgcagcagcaatatagactcttccagacccgactgaccgaaactcatctcccagcacaggcgaggacttcagagccgctccacaatgtccaggttctcaatcagatgatcacaagcaagagcaatcccggcaacaatatggcttgcataagcaaaaaccaagggagtgagctgtcaggtgtcatttccagcgcctgcgataaggagtcaaacatggagcggcgtgtgattactatctccaaaagcgaatacagtgtccactcgtcactggcttccaaggtggacgttgagcaggtggttatgtattgtaaggaaaagctgatcagaggcgaaagcgagttttcctttgaggaacttagagctcagaaatacaatcagcgccggaagcacgaacaatgggtaaacgaggaccggcattacatgaagaggaaagaagccaacgcattcgaggaacagttgttgaagcagaagatggacgagctacacaaaaaactgcaccaggtcgtcgagacatctcatgaggaccttcctgcctctcaggagcggtccgaagtaaaccccgccagaatgggccccagcgtaggaagccagcaggagctcagggccccatgcctgccagtgacctaccagcaaacccctgtgaatatggagaagaatccacgggaagctcccccggtagtccctccattggccaatgccatttccgccgcactcgtaagccccgccacatctcagagtattgccccccctgtaccactaaaggcccagacagtcaccgactctatgttcgcagttgcttccaaggacgccggttgtgtgaacaagtctacacatgaattcaagcctcagtctggcgcggagatcaaggaaggctgcgagacccataaagttgcaaacacttccagctttcacacgacccctaatacgtcccttgggatggtgcaggccaccccaagtaaggtgcaaccctcccctacagttcatacaaaggaggctcttggtttcatcatgaatatgttccaggcgcccacgctgcccgacatcagtgacgacaaagacgaatggcagtctttggatcaaaatgaggacgcatttgaagcacagttccaaaagaatgtacggtcgagtggggcgtggggagtaaacaagataatttccagtctgagctctgcctttcacgttttcgaagacggcaacaaggaaaattatggcctgccgcagcccaagaacaagccaactggggcgaggacttttggggagcggagtgttagtcgtttgccctccaagcccaaggaggaggtgccccacgccgaagagtttcttgacgactcgacagtatggggaattaggtgtaacaagactttagcaccctctccaaaaagccccggtgatttcacctctgccgctcagctcgcttctaccccttttcataaactgccagtggagagcgtccacattcttgaagacaaggagaacgtggtcgccaagcagtgcacacaggcaaccctcgatagctgcgaggaaaatatggtagtccctagtagagatggaaaattttcccccatccaagaaaaaagccccaaacaggcattatcctctcatatgtacagcgccagcctcctgcggctttcccaacccgccgctgggggcgtcctgacctgtgaggccgagctgggcgtggaagcgtgtcggctcacggacactgatgctgccatcgcagaggaccccccagatgcaattgcaggcctccaagccgaatggatgcaaatgtcctccttagggaccgttgatgcgcccaactttattgtggggaacccctgggacgacaagctgatcttcaagttgctcagcggtctgtcaaagcccgtttcttcttatcccaacacttttgagtggcaatgcaaacttccagctattaagccgaagacagagttccagctgggctcaaagctggtatatgtgcatcacttgcttggggagggggcattcgcacaagtgtacgaggccacccaaggagatctcaatgatgccaagaataagcagaagttcgtcctgaaggtgcagaaacctgcaaatccttgggagttctatattggtacccagcttatggagcgcctcaagcccagcatgcagcatatgtttatgaagttctatagcgcacacctatttcagaatggctccgtgctggtcggcgagctgtactcttacggaactctgctggacgacgaagatgatctgtccgccggcctcgctttgatcgacttgggtcagtcaatcgacatgaagttatttccaaaaggcactatctttactgcgaaatgcgagaccagcggcttccagtgtgtggaaatgctgtccaataagccatggaactatcagatcgactattttggcgtggcagcgaccgtctactgtatgttgttcggtacgtacatgaaggtcaagaacgaaggtggagagtgtaaacccgagggcctgtttcgcagactgccacatttggatatgtggaatgaattctttcacgtgatgctgaatatccctgattgtcaccacctgccgtccctggacctgctgcgtcagaagctcaaaaaagtgtttcagcagcactataccaacaagatccgtgctttaagaaataggctgattgtcctgcttctggagtgcaagcgatccaggaagtag

SEQ ID NO: 98812 - DNA, 2475 bp, Artificial Sequence
  derived and/or modified sequence
atggatacccctgagaatgtacttcaaatgctggaggcacatatgcagagttataagggcaacgatccgttgggcgagtgggagcgctatatccaatgggtagaagagaatttccccgagaataaggagtacctaatcactttgttggagcacttaatgaaagaatttcttgataagaagaagtatcataacgatcctagatttatttcttattgcctgaagtttgccgagtacaactcagacctgcatcaattcttcgaatttttatacaatcatgggattggcacactaagtagcccgctctacatcgcctgggctggtcatctcgaagcgcagggggagcttcagcatgcctcagccgtgctgcagagaggcatccagaaccaggcggagcccagagaatttttacagcaacagtataggctgttccagacacgtctgacagaaacccatcttcctgcacaggccagaacaagtgaacctctgcacaacgttcaagtcctcaatcagatgattacttccaaatcgaacccaggtaacaatatggcttgtatcagtaagaaccaggggtccgagctctcaggagttatatcgtctgcttgcgacaaggaatccaacatggagaggcgtgttatcacaattagtaagagtgaatattccgttcatagctctctggcctcaaaagtggacgttgaacaggttgtgatgtattgcaaggagaaactcatcagaggggagagcgagttctctttcgaagagttgcgggcacaaaagtataatcaaagacgaaagcacgagcagtgggtgaacgaagatcggcactacatgaagagaaaggaagcaaacgcctttgaagaacaactcttgaagcagaagatggatgagttacataaaaagctgcatcaggtggtggaaaccagccatgaagacttgcccgcaagccaggaacggtccgaagtgaaccctgcaaggatgggcccaagcgttggttctcagcaggaactccgggcaccttgtctacccgtgacatatcaacagactccagtgaatatggagaaaaaccctcgggaagcgcctccagttgtgccgccactggctaatgccataagcgccgcgctggtcagccctgcgacctcccagtcaatcgcgccacctgtgcccttgaaggcccagactgtgacggattctatgttcgcagttgcatccaaagacgccggctgcgtgaacaagtctacccacgagtttaagccacagtctggggccgaaatcaaagagggttgcgaaacccacaaggtcgcgaataccagttctttccacacaacacccaacacaagcctgggtatggttcaggccactccaagcaaggtacagccctcgcccactgtgcacactaaagaggccctcgggtttatcatgaacatgtttcaggcgcctaccctcccagacatttccgacgataaagacgagtggcagtccctggatcagaatgaggacgcgtttgaagctcaattccagaagaatgtgcggagtagtggcgcatggggtgttaacaaaattatttcttcactgtcttccgcgttccatgtctttgaagatggtaacaaggagaattatggtctcccgcaaccgaaaaataagcccactggtgctagaacatttggggaaaggtccgtcagtcgcctaccgtcaaaacccaaagaggaagtcccacacgcagaagagtttctggatgactccaccgtctgggggatcagatgcaacaaaactcttgctccctcacctaagtcccctggggactttacttccgccgcccagctagcttccacaccatttcacaagctgcctgtggaaagcgtccacattctagaagacaaggaaaacgtcgtagccaagcagtgtacccaggcgacattggacagctgtgaggaaaatatggtggtgccatcccgcgacggaaaattctctccaattcaggaaaaatcacctaagcaggcactgagtagccacatgtacagtgcaagcctgctgcgactgtcccagcctgccgccggcggagtgttgacgtgtgaagcagagttgggagtggaagcctgccggctcacagacacggacgccgcaatagccgaagacccccccgacgccattgcaggcctgcaggccgaatggatgcaaatgagcagtctggggacagtggacgcgccgaactttatcgtggggaacccttgggacgataagctgatcttcaagctcctcagcggcttgtccaagccagtgagttcctatcccaatacatttgagtggcagtgcaaacttccagctattaagcccaaaactgagtttcagctcggcagcaaactggtttacgttcaccatctgctgggggagggggcatttgcacaagtttacgaagccacccagggagaccttaacgatgcgaagaataagcaaaagtttgttctgaaggtaaaaagttag

SEQ ID NO: 98813 - DNA, 3087 bp, Artificial Sequence
  derived and/or modified sequence
atggacaccccagaaaatgtgctgcagatgctggaggcccacatgcagagctacaagggaaatgaccccctgggggagtgggagcgctacatccagtgggtggaggagaacttccctgagaacaaggagtacctgatcaccctgctggagcacctgatgaaggagttcctggacaagaagaagtaccacaatgacccccgcttcatctcctactgcctgaagtttgctgagtacaacagcgacctgcaccagttctttgagttcctgtacaaccacggcatcggcaccctgagcagccccctgtacatcgcctgggccggccacctggaggcccagggcgagctgcagcacgccagcgctgtgctgcagaggggcatccagaaccaggccgagccccgggagttcctgcagcagcagtaccgcctcttccagacccggctgacagagacccacctgcctgcccaggcccggaccagcgagcccctgcacaacgtgcaggtgctgaaccagatgatcaccagcaagagcaaccctggcaacaacatggcctgcatcagcaagaaccagggcagcgagctgagcggggtcatcagcagcgcctgtgacaaggagagcaacatggagaggagggtcatcaccatcagcaagtctgagtacagcgtgcacagcagcctggccagcaaggtggatgtggagcaggtggtgatgtactgcaaggagaagctgatccggggggagagcgagttctcctttgaggagctgcgggcccagaagtacaaccagaggaggaagcatgagcagtgggtgaatgaagatagacactacatgaagaggaaggaggccaatgcctttgaggagcagctgctgaagcagaagatggatgagctgcacaagaagctgcaccaggtggtggagaccagccatgaggacctgcctgccagccaggagaggtctgaggtgaacccagccaggatgggccccagcgtgggcagccagcaggagctgcgggccccctgcctgcctgtgacctaccagcagacccctgtgaacatggagaagaacccccgggaggcccctcctgtggtgccccccctggccaatgccatctctgctgccctggtgtccccagccaccagccagagcatcgcccctcctgtgcccctgaaggcccagacagtgacagacagcatgtttgctgtggccagcaaggatgctggctgtgtgaacaagagcacccatgagttcaagccccagagcggggctgagatcaaggagggctgtgagacccacaaggtggccaacaccagcagcttccacaccacccccaacaccagcctgggcatggtgcaggccacccccagcaaggtgcagcccagccccaccgtgcacaccaaggaggccctgggcttcatcatgaacatgttccaggcccccaccctgcctgacatcagtgatgacaaggatgagtggcagagcctggaccagaatgaagatgcctttgaggcccagttccagaagaatgtgcgcagcagcggggcctggggcgtgaacaagatcatcagcagcctgagcagcgccttccacgtgtttgaagatggcaacaaggagaactacggcctgccccagcccaagaacaagcccaccggggcccggacctttggagagaggtctgtgtcccggctgcccagcaagcccaaggaggaggtgccccacgccgaggagttcctggatgacagcacagtgtggggcatccgctgcaacaagaccctggcccccagccccaagagccctggggacttcaccagcgctgcccagctggccagcacccccttccacaagctgcctgtggagagcgtgcacatcctggaggacaaggaaaatgtggtggccaagcagtgcacccaggccaccctggacagctgtgaggagaacatggtggtgcccagcagagatggcaagttcagccccatccaggagaagagccccaagcaggccctgagcagccacatgtacagcgccagcctgctgcggctgagccagcctgctgctggaggagtgctgacctgtgaggccgagctgggcgtggaggcctgccgcctgacagacacagatgctgccatcgcagaagatcctccagatgccatcgccggcctgcaggccgagtggatgcagatgagcagcctgggcaccgtggatgcccccaacttcatcgtgggcaacccctgggatgacaagctgatcttcaagctgctgagcggcctgagcaagcctgtgagcagctaccccaacacctttgagtggcagtgcaagctgcctgccatcaagcccaagacagagttccagctgggcagcaagctggtgtatgtgcaccacctgctgggggagggcgcctttgcccaggtgtatgaggccacccagggcgacctgaatgatgccaagaacaagcagaagtttgtgctgaaggtgcagaagccagccaacccctgggagttctacatcggcacccagctgatggagcggctgaagcccagcatgcagcacatgttcatgaagttctacagcgcccacctgttccagaatggatctgtgctggtgggggagctgtacagctatggcaccctgctggatgatgaagatgacctgtctgctggcctggccctgattgacctgggccagagcattgacatgaagctgttccccaagggcaccatcttcaccgccaagtgtgagaccagcggcttccagtgtgtggagatgctgagcaacaagccctggaactaccagattgactactttggagtggccgccaccgtgtactgcatgctgtttggcacctacatgaaggtgaagaatgaaggaggagagtgcaagccagagggcctcttccggcggctgccccacctggacatgtggaatgagttcttccacgtgatgctgaacatcccagactgccaccacctgcccagcctggacctgctgcggcagaagctgaagaaggtgttccagcagcactacaccaacaagatccgggccctgaggaaccggctgattgtgctgctgctggagtgcaagaggagcaggaagtag

SEQ ID NO: 98814 - DNA, 2475 bp, Artificial Sequence
  derived and/or modified sequence
atggacaccccagaaaatgtgctgcagatgctggaggcccacatgcagagctacaagggaaatgaccccctgggggagtgggagcgctacatccagtgggtggaggagaacttccctgagaacaaggagtacctgatcaccctgctggagcacctgatgaaggagttcctggacaagaagaagtaccacaatgacccccgcttcatctcctactgcctgaagtttgctgagtacaacagcgacctgcaccagttctttgagttcctgtacaaccacggcatcggcaccctgagcagccccctgtacatcgcctgggccggccacctggaggcccagggcgagctgcagcacgccagcgctgtgctgcagaggggcatccagaaccaggccgagccccgggagttcctgcagcagcagtaccgcctcttccagacccggctgacagagacccacctgcctgcccaggcccggaccagcgagcccctgcacaacgtgcaggtgctgaaccagatgatcaccagcaagagcaaccctggcaacaacatggcctgcatcagcaagaaccagggcagcgagctgagcggggtcatcagcagcgcctgtgacaaggagagcaacatggagaggagggtcatcaccatcagcaagtctgagtacagcgtgcacagcagcctggccagcaaggtggatgtggagcaggtggtgatgtactgcaaggagaagctgatccggggggagagcgagttctcctttgaggagctgcgggcccagaagtacaaccagaggaggaagcatgagcagtgggtgaatgaagatagacactacatgaagaggaaggaggccaatgcctttgaggagcagctgctgaagcagaagatggatgagctgcacaagaagctgcaccaggtggtggagaccagccatgaggacctgcctgccagccaggagaggtctgaggtgaacccagccaggatgggccccagcgtgggcagccagcaggagctgcgggccccctgcctgcctgtgacctaccagcagacccctgtgaacatggagaagaacccccgggaggcccctcctgtggtgccccccctggccaatgccatctctgctgccctggtgtccccagccaccagccagagcatcgcccctcctgtgcccctgaaggcccagacagtgacagacagcatgtttgctgtggccagcaaggatgctggctgtgtgaacaagagcacccatgagttcaagccccagagcggggctgagatcaaggagggctgtgagacccacaaggtggccaacaccagcagcttccacaccacccccaacaccagcctgggcatggtgcaggccacccccagcaaggtgcagcccagccccaccgtgcacaccaaggaggccctgggcttcatcatgaacatgttccaggcccccaccctgcctgacatcagtgatgacaaggatgagtggcagagcctggaccagaatgaagatgcctttgaggcccagttccagaagaatgtgcgcagcagcggggcctggggcgtgaacaagatcatcagcagcctgagcagcgccttccacgtgtttgaagatggcaacaaggagaactacggcctgccccagcccaagaacaagcccaccggggcccggacctttggagagaggtctgtgtcccggctgcccagcaagcccaaggaggaggtgccccacgccgaggagttcctggatgacagcacagtgtggggcatccgctgcaacaagaccctggcccccagccccaagagccctggggacttcaccagcgctgcccagctggccagcacccccttccacaagctgcctgtggagagcgtgcacatcctggaggacaaggaaaatgtggtggccaagcagtgcacccaggccaccctggacagctgtgaggagaacatggtggtgcccagcagagatggcaagttcagccccatccaggagaagagccccaagcaggccctgagcagccacatgtacagcgccagcctgctgcggctgagccagcctgctgctggaggagtgctgacctgtgaggccgagctgggcgtggaggcctgccgcctgacagacacagatgctgccatcgcagaagatcctccagatgccatcgccggcctgcaggccgagtggatgcagatgagcagcctgggcaccgtggatgcccccaacttcatcgtgggcaacccctgggatgacaagctgatcttcaagctgctgagcggcctgagcaagcctgtgagcagctaccccaacacctttgagtggcagtgcaagctgcctgccatcaagcccaagacagagttccagctgggcagcaagctggtgtatgtgcaccacctgctgggggagggcgcctttgcccaggtgtatgaggccacccagggcgacctgaatgatgccaagaacaagcagaagtttgtgctgaaggtgaagagctag

SEQ ID NO: 98815 - DNA, 3087 bp, Artificial Sequence
  derived and/or modified sequence
atggacacccccgagaacgtgctgcagatgctggaggcccacatgcagtcatacaagggaaatgacccgctgggagaatgggagagatatattcaatgggtggaggagaacttccctgagaataaggagtatctgatcacactgctagaacacttgatgaaagagttccttgataagaaaaaataccacaacgatcctagattcatcagctactgtctcaagttcgcagagtataacagtgatctgcaccaattttttgagttcctatataatcacggcattggcacacttagtagccctttgtatattgcatgggccggccacctcgaagcccagggcgagctgcaacacgccagtgctgtgctccagcgtgggattcaaaatcaggctgagccaagagagtttcttcaacagcaatacagattgtttcagacaagactcacagagacccacctccctgctcaagcacgaacaagtgaacctctgcacaacgtgcaggtgttaaaccagatgatcacctccaaatcaaatccaggcaacaacatggcctgcatcagcaaaaatcaggggtcggagctgtccggagtgataagctcagcatgtgacaaggagagtaacatggaaaggagagtgatcaccataagcaaaagcgagtattctgtgcattcctcccttgcaagtaaggtggacgtggaacaggtcgttatgtactgtaaggaaaaactgatcaggggtgagtctgaattttcatttgaagagctaagagcgcagaagtacaaccagcgtcgtaagcatgagcagtgggtaaatgaggaccggcattatatgaaacgcaaggaggctaacgccttcgaagaacaactgctgaaacaaaagatggatgagctccacaagaagctgcaccaagtggtggaaacttcgcatgaagacttacccgcttctcaggaacgcagcgaagtcaatcccgctagaatgggaccatccgtgggcagccagcaggagctgcgggctccatgccttcctgtgacgtatcagcagacgcccgtgaatatggaaaaaaatcccagagaggccccccctgtcgtaccaccacttgccaatgcaattagcgctgcgctggtgagcccagccacaagccaaagtatagcaccaccagtcccactcaaggcccaaacagtaacagacagtatgttcgcggtggcctcgaaagatgcgggctgcgtgaataagagcacccacgaattcaaaccacagtccggcgccgagattaaggagggctgcgaaacccacaaggttgccaatacatctagcttccatactacacccaacaccagtttagggatggtccaggcaactccatccaaggtccaaccttctccaacagtgcatacaaaggaagcactagggttcattatgaacatgttccaagcgcccaccctgccagatatcagcgatgacaaggatgaatggcagtcgctggatcagaatgaggacgcctttgaagcccagttccaaaaaaacgtgaggtcctccggcgcttggggagttaacaaaatcatctctagtctctcctcagcatttcacgtctttgaggacgggaacaaggaaaactacgggctcccccagcccaaaaataaacctactggggcccggacattcggagagagaagtgtgagccgcctcccatcaaaaccgaaagaagaggtccctcacgccgaggaatttctggacgactccacagtatggggtattcggtgtaacaaaactctcgctccctcacccaaatctcccggggatttcacatcagcggcccagcttgcatccacgccgttccacaagcttcccgtcgagagcgtacacattctggaggataaagagaatgttgtggccaaacagtgcactcaggcaaccctggatagctgtgaagagaacatggttgtgcccagtagggacggcaaattttcaccaattcaagaaaagtcccccaaacaggctctctcgagccatatgtactccgcgagcctgcttcggctgtcacaacccgccgcaggcggagtgctgacgtgtgaggctgagttaggggttgaggcctgccgacttacagatacagatgctgctatagccgaggaccccccggacgcaatcgccggtttgcaggcggagtggatgcagatgtccagtctgggcaccgtggacgcccccaattttattgtgggcaatccgtgggatgacaagctgatcttcaagctcctgtccggcctttcaaagcccgtgagttcttaccctaacaccttcgaatggcagtgtaagctgccagccatcaaacccaaaactgagttccagctaggcagcaaactcgtgtacgttcatcatctcctgggggaaggagccttcgcccaagtgtacgaagcaacacagggagacctcaacgatgctaaaaacaagcagaagtttgtccttaaggttcaaaagccagccaatccttgggagttctatatcggcacgcagttaatggaaaggttaaagcctagcatgcagcacatgtttatgaagttttattccgcccatctgtttcagaacggcagtgttctggtcggagaactttatagttatggcaccctgctggacgatgaggatgacctttcagctggtcttgcgttgatcgatttggggcagagcatagacatgaaattatttcccaaggggaccatctttaccgccaagtgcgagacatctggcttccaatgtgtggaaatgttatccaacaagccctggaactaccaaatcgactattttggggtggcagcgaccgtgtactgtatgcttttcggtacctatatgaaggttaaaaacgagggcggagagtgtaagcccgaggggcttttccgccggttaccacatcttgacatgtggaatgagttttttcacgtaatgctcaatattccagactgccaccatttgccgagcctggacctcttgcggcagaagttaaaaaaggttttccagcagcactacaccaacaagatccgggctcttcgaaatcggttgatcgtgctgttgctggagtgcaagaggagccgaaaatag

SEQ ID NO: 98816 - DNA, 2475 bp, Artificial Sequence
  derived and/or modified sequence
atggacacccccgagaacgtgctgcagatgctggaggcccacatgcagtcttataagggcaacgaccccctcggcgaatgggaacgttatatacaatgggtcgaggagaattttcccgaaaacaaagagtatcttataacacttctggagcacctgatgaaagagtttctggacaagaagaagtaccacaatgatcccagattcatcagctactgcctcaagtttgccgaatataatagcgacttacaccagttcttcgaatttctgtacaaccacggcatcggcactctatcatcgccgctatatatcgcctgggccgggcatcttgaggctcagggggagctgcagcatgctagcgccgtactgcaaaggggcatccagaaccaggcagaaccaagagaattcctgcagcagcagtaccgacttttccagactcgccttactgagactcacttgccagctcaggccagaacttcagagccgctccataatgtgcaggtgctaaatcagatgataacaagtaaatcaaaccccgggaacaacatggcttgtatttctaagaatcagggctctgagttaagtggagtcatcagttcagcatgcgacaaagaaagcaatatggagaggagagttattactatttcgaaatcggagtactcagtgcacagtagcctggcttccaaggtggacgtcgaacaagtggtaatgtactgcaaggaaaagcttatccgaggagagagcgagttttcttttgaggagctccgggcgcagaagtataaccagcggaggaagcatgagcaatgggttaacgaagaccgccactacatgaaaaggaaggaggcaaacgcctttgaagagcagctgctgaagcagaagatggacgagctccacaagaagcttcaccaggttgtggagaccagccacgaagacctgcctgcttctcaggaaagaagtgaagtgaatcccgcgagaatgggcccatccgtagggagtcaacaagagctccgcgccccatgccttcctgtgacataccagcagacacccgttaacatggagaagaacccacgagaggccccccccgttgtgccccccttggccaacgccattagtgctgccctggtctcacccgctacttctcagagcatcgcccctccggtaccattaaaagctcagacagtcacagatagtatgtttgctgtagcgagcaaggatgctggttgcgtgaataagtcgacccacgagtttaaaccccagtcaggcgctgaaataaaagaagggtgcgagacccacaaagtggcaaatacatccagctttcatactacccctaacacaagcctcgggatggtgcaagctacccctagcaaggtgcaacccagtccaaccgtacataccaaggaggcgcttggatttattatgaacatgttccaggctccaactttaccagacatctctgacgataaagacgagtggcagagtctggatcagaacgaggatgctttcgaagcgcagtttcagaaaaatgtcagaagctctggggcctggggtgtgaacaagattatcagctccctgagtagtgcgttccacgtgttcgaggacgggaataaggagaattatgggcttccgcagccgaagaacaaacccaccggagcaaggacattcggggagagaagcgtgtcacgacttccatctaaacctaaggaggaggtgccccatgctgaagaatttttagacgacagcactgtctgggggatccggtgtaataagaccttggccccaagcccaaaaagccccggggactttacttctgcagctcaactggcttctacgccttttcacaagttgcctgtggagtcagtacatatcctggaagacaaggagaatgttgtagccaaacagtgcacacaggccaccctcgactcttgtgaggaaaacatggtggtcccctcgagggacggcaagtttagcccaatccaagaaaagtctccaaagcaggccctatccagtcacatgtatagcgcttccctcctgcgattaagccagcctgctgcgggaggagtgctcacttgcgaggcagaacttggtgttgaggcttgcagactgaccgacactgacgccgcaatcgctgaggacccaccagacgccatcgcaggccttcaggcagaatggatgcagatgtcatccctaggtaccgtggatgctcctaacttcatagtggggaatccttgggacgacaagttaatcttcaagctgctgtctgggctcagtaaacccgtgtctagttaccctaacactttcgaatggcagtgtaaattgcccgctatcaagcctaaaaccgaattccaactgggcagtaaattggtgtatgtgcaccacctgctcggggaaggcgcctttgcccaggtatacgaggctactcagggtgacctcaacgacgcaaagaataaacagaaattcgttctcaaggtgaaaagttag

SEQ ID NO: 98817 - DNA, 3087 bp, Artificial Sequence
  derived and/or modified sequence
atggacacgcctgagaatgtcctgcagatgttagaggctcatatgcagtcctataaggggaatgaccctctgggggaatgggaacgctacatccagtgggtggaggagaattttccggagaacaaagagtatctgatcacgcttctcgaacatttgatgaaggaattcctggacaagaagaagtatcacaacgatcccaggtttataagttactgtctcaagtttgccgaatacaatagcgacttgcatcagttctttgagtttctctataatcacgggatagggactctcagttctcctttatacatagcttgggcgggtcacctggaggcccaaggagagctacaacacgcctccgctgtgctgcagcgagggatacagaaccaagctgagccccgtgagttccttcagcaacagtaccggctgttccaaaccaggctaactgagacccatcttcctgcccaggcccgtactagcgaacccctgcataacgtccaagtgttgaatcagatgatcactagtaagagcaatccaggtaacaacatggcttgcatctccaagaatcaaggcagcgagctgtcaggagttatctcaagtgcatgcgacaaggagtctaacatggaaagaagagtgatcactatttccaagagcgagtattctgtgcattcctctctggcctctaaagttgatgtggagcaggtggtgatgtattgtaaggagaaactgattcgtggggagtccgaattcagtttcgaggagttacgggcacagaaatataatcagcggagaaaacatgaacagtgggtgaacgaagatcggcactatatgaagcggaaggaagccaacgcattcgaagaacaactgctgaagcaaaagatggacgagcttcacaaaaagctccaccaggtcgtagagacatcccacgaggacttgcccgcatcccaggaaagaagcgaagttaaccccgcacggatggggccttctgtaggatctcagcaggaattgagagccccttgtttgcccgtaacctatcagcagactccagtgaacatggagaagaaccctcgggaagcccctccagtagtgcctccactagcgaatgccataagtgctgctctcgtatcccctgccacctcccagtcgatcgcaccccctgtcccactcaaggcccagacagtaacggatagcatgtttgctgtggccagtaaggatgcaggttgcgtgaataaatccacacacgagttcaaaccccagagtggagccgagatcaaggagggctgcgaaacacataaggtggcaaatacctcctcatttcatacaacaccaaatacaagtttgggcatggtccaagctactccgtccaaagttcagccgtcgcccacagtacataccaaggaagctcttggctttatcatgaatatgtttcaggcccctaccctccccgatattagcgacgacaaggatgagtggcagagcctcgatcagaatgaggacgcctttgaagcacagttccaaaagaacgtgcgaagctctggggcttggggggtgaataaaatcatcagtagccttagcagcgcctttcacgtattcgaggatggcaacaaggagaattacggactcccacagccaaagaacaagcctacgggcgctcgaacgttcggggaaagatcggtgtcaaggctgcctagtaaacctaaggaagaggtaccacatgcagaggaattcctcgacgattctacggtatggggcatcagatgcaacaagaccctggccccttcacccaagtctcccggtgacttcaccagcgcagcgcagctcgcgagtacaccttttcacaagttgcctgttgagagtgtgcatattctcgaggacaaagaaaacgttgtggctaagcagtgcacacaggctactctggattcatgcgaggagaatatggtggtgccgagccgggatggcaagttttctccgattcaggagaagtctcctaaacaggctctgtcctcgcatatgtattcagcgagtctgttaaggctgtcccagccagcggctggtggggtgcttacttgcgaagcagagctgggcgtagaggcatgtcggctaactgacaccgatgctgcaatcgctgaggacccacccgacgccattgccggtctacaggctgagtggatgcaaatgtccagtctgggtacggttgatgcccctaacttcatcgtcggcaatccatgggatgacaagttgattttcaaactgctgtcgggactgtcaaagcccgtgtcatcttatcctaatacgttcgagtggcagtgtaaactgcccgcaatcaaaccaaaaacggaattccagcttggcagcaagcttgtctacgtgcatcatttactgggcgagggtgctttcgcccaggtgtacgaggcaacacagggggatctgaacgacgcaaaaaataagcagaaattcgtccttaaggttcagaagcccgctaatccatgggagttttatatcggaacccagcttatggagaggctcaagccttctatgcaacacatgttcatgaagttttacagcgcacacctcttccaaaatggcagcgtgttggtgggagaactttacagctacgggaccctcctcgacgacgaggatgacctgtccgcaggcctggcactgattgatcttggccaatcaatcgatatgaagctattccccaaaggaactatattcacggcaaaatgcgaaaccagcggcttccaatgcgttgagatgctgtccaacaagccttggaactaccagattgactactttggcgtagcagcaaccgtgtattgcatgctattcgggacatatatgaaggtgaagaatgagggaggagagtgcaaacctgaaggactatttcggcgtctaccccacctcgatatgtggaacgagttctttcatgtgatgctgaacatccctgactgccaccacttaccctccctcgacctgttgcgacaaaagctgaagaaggtatttcaacaacactatacgaataaaattagggccttgaggaaccgactgattgtcctcctgctggagtgcaagaggtcaagaaaatag

SEQ ID NO: 98818 - DNA, 2475 bp, Artificial Sequence
  derived and/or modified sequence
atggatactccagagaacgttctgcagatgctagaggctcacatgcagtcatacaaaggaaatgaccccctgggagagtgggaaagatacatacagtgggtagaggaaaatttccctgagaacaaggaatatctgattactctcctggaacacctcatgaaagagttcctcgacaagaaaaagtaccataatgatcctaggtttatttcgtactgtctcaaatttgccgaatataattccgacctgcatcagttttttgagtttctctacaaccacgggatcggaacactgagtagccccttatatatcgcatgggcgggtcacctggaagcacagggggagctccagcacgcatccgccgtgctgcagcgaggaatacagaaccaagcggagcccagagagtttttgcaacagcaataccgactgtttcagacgcgccttacggagacgcatcttcccgctcaggcaaggactagtgagccacttcacaacgtccaggtactgaaccaaatgatcacctccaagtctaaccctggaaacaatatggcctgcatttccaagaaccaggggagcgagctgagtggcgtcataagctctgcgtgcgataaggaatctaatatggaacggagagtgatcacaatctcgaaatcagagtattcagtacatagtagtttagcttctaaagtggacgtcgagcaagtagtgatgtactgtaaagaaaagctcataaggggagaatctgaattctctttcgaggagcttagagcccagaagtataaccaacggagaaagcacgaacaatgggttaacgaggaccggcactacatgaaacggaaggaggcaaatgccttcgaagagcagctcctcaagcagaaaatggacgagcttcacaagaaactgcaccaggtggtagagacttcacatgaagacctgcctgccagtcaggagcgatctgaagtcaacccggcaaggatgggtccgtcagtgggcagccagcaggaattaagagccccatgcttacccgtgacctaccagcaaactccagtcaacatggaaaaaaatcccagagaagcacctccagtagtacctccgctagctaatgctatcagcgctgctctcgtgtcccctgcaaccagtcagagcatcgccccacctgtgcctcttaaagcgcagacggtaaccgactctatgtttgcagtggcgtcaaaggatgctgggtgcgtgaataagtctacccacgagtttaagccccagagtggagcagaaatcaaagagggctgtgaaactcacaaggtcgctaataccagctcttttcatactacccctaacacatcactgggcatggtgcaggccacaccaagtaaggttcaaccttcccctactgtgcatacaaaggaagctcttgggtttatcatgaacatgttccaggcccctactctgcctgacatttctgatgacaaggacgaatggcagagtctcgaccaaaacgaggacgcctttgaagcccagtttcagaagaatgtgcgcagctccggagcgtggggggtgaacaagatcatcagctctctgagcagcgccttccacgtgtttgaagatggcaataaagaaaactacggcctgcctcagcccaagaataagccgactggggctcgaacttttggtgagcgctcagtgtctcgccttcccagtaagccaaaagaagaggtgccccatgccgaggaattcttggacgactcaacagtgtggggcattcgttgcaacaagaccttggcccctagcccgaagtcacccggagacttcactagtgctgcccaactagcatctaccccattccacaagctccctgtcgagtcagtgcacatcctggaggacaaggagaatgttgtcgctaaacagtgtacccaagctactttagactcttgtgaggaaaacatggtcgttccatcccgcgacgggaagttctctccaatacaggagaagtctcctaaacaggccctcagttcacatatgtactccgcctcactactgcggctgtctcagcccgctgccggaggcgtgctaacttgcgaagctgaactgggcgtcgaggcgtgtcggctcaccgacaccgatgccgctatcgcggaagatcctccagatgcgattgcagggctgcaggccgagtggatgcagatgtcatccctcggtacagtggacgctcccaacttcattgtgggaaacccatgggatgacaaactgatttttaaattgttatcaggtctgtccaaaccggtgagtagttatcctaacacctttgaatggcagtgcaaattacccgcaatcaagcccaagacagagttccagctcgggtccaaactcgtttacgttcaccacctgctgggcgaaggcgcatttgctcaagtgtacgaagccacccagggtgacctgaacgatgccaagaataagcaaaaatttgtcctcaaagtgaagtcttag

SEQ ID NO: 98819 - DNA, 3287 bp, Artificial Sequence
  derived and/or modified sequence
attcgaatcggcggcggcttctagtttgcggttcaggtttggccgctgccggccagcgtcctctggccatggacaccccggaaaatgtccttcagatgcttgaagcccacatgcagagctacaagggcaatgaccctcttggtgaatgggaaagatacatacagtgggtagaagagaattttcctgagaataaagaatacttgataactttactagaacatttaatgaaggaatttttagataagaagaaataccacaatgacccaagattcatcagttattgtttaaaatttgctgagtacaacagtgacctccatcaattttttgagtttctgtacaaccatgggattggaaccctgtcatcccctctgtacattgcctgggcggggcatctggaagcccaaggagagctgcagcatgccagtgctgtccttcagagaggaattcaaaaccaggctgaacccagagagttcctgcaacaacaatacaggttatttcagacacgcctcactgaaacccatttgccagctcaagctagaacctcagaacctctgcataatgttcaggttttaaatcaaatgataacatcaaaatcaaatccaggaaataacatggcctgcatttctaagaatcagggttcagagctttctggagtgatatcttcagcttgtgataaagagtcaaatatggaacgaagagtgatcacgatttctaaatcagaatattctgtgcactcatctttggcatccaaagttgatgttgagcaggttgttatgtattgcaaggagaagcttattcgtggggaatcagaattttcctttgaagaattgagagcccagaaatacaatcaacggagaaagcatgagcaatgggtaaatgaagacagacattatatgaaaaggaaagaagcaaatgcttttgaagaacagctattaaaacagaaaatggatgaacttcataagaagttgcatcaggtggtggagacatcccatgaggatctgcccgcttcccaggaaaggtccgaggttaatccagcacgtatggggccaagtgtaggctcccagcaggaactgagagcgccatgtcttccagtaacctatcagcagacaccagtgaacatggaaaagaacccaagagaggcacctcctgttgttcctcctttggcaaatgctatttctgcagctttggtgtccccagccaccagccagagcattgctcctcctgttcctttgaaagcccagacagtaacagactccatgtttgcagtggccagcaaagatgctggatgtgtgaataagagtactcatgaattcaagccacagagtggagcagagatcaaagaagggtgtgaaacacataaggttgccaacacaagttcttttcacacaactccaaacacatcactgggaatggttcaggcaacgccatccaaagtgcagccatcacccaccgtgcacacaaaagaagcattaggtttcatcatgaatatgtttcaggctcctacacttcctgatatttctgatgacaaagatgaatggcaatctctagatcaaaatgaagatgcatttgaagcccagtttcaaaaaaatgtaaggtcatctggggcttggggagtcaataagatcatctcttctttgtcatctgcttttcatgtgtttgaagatggaaacaaagaaaattatggattaccacagcctaaaaataaacccacaggagccaggacctttggagaacgctctgtcagcagacttccttcaaaaccaaaggaggaagtgcctcatgctgaagagtttttggatgactcaactgtatggggtattcgctgcaacaaaaccctggcacccagtcctaagagcccaggagacttcacatctgctgcacaacttgcgtctacaccattccacaagcttccagtggagtcagtgcacattttagaagataaagaaaatgtggtagcaaaacagtgtacccaggcgactttggattcttgtgaggaaaacatggtggtgccttcaagggatggaaaattcagtccaattcaagagaaaagcccaaaacaggccttgtcgtctcacatgtattcagcatccttacttcgtctgagccagcctgctgcaggtggggtacttacctgtgaggcagagttgggcgttgaggcttgcagactcacagacactgacgctgccattgcagaagatccaccagatgctattgctgggctccaagcagaatggatgcagatgagttcacttgggactgttgatgctccaaacttcattgttgggaacccatgggatgataagctgattttcaaacttttatctgggctttctaaaccagtgagttcctatccaaatacttttgaatggcaatgtaaacttccagccatcaagcccaagactgaatttcaattgggttctaagctggtctatgtccatcaccttcttggagaaggagcctttgcccaggtgtacgaagctacccagggagatctgaatgatgctaaaaataaacagaaatttgttttaaaggtccaaaagcctgccaacccctgggaattctacattgggacccagttgatggaaagactaaagccatctatgcagcacatgtttatgaagttctattctgcccacttattccagaatggcagtgtattagtaggagagctctacagctatggaacattattagatgatgaagatgatttatctgctggcttggcactgattgacctgggtcagagtatagatatgaaactttttccaaaaggaactatattcacagcaaagtgtgaaacatctggttttcagtgtgttgagatgctcagcaacaaaccatggaactaccagatcgattactttggggttgctgcaacagtatattgcatgctctttggcacttacatgaaagtgaaaaatgaaggaggagagtgtaagcctgaaggtctttttagaaggcttcctcatttggatatgtggaatgaattttttcatgttatgttgaatattccagattgtcatcatcttccatctttggatttgttaaggcaaaagctgaagaaagtatttcaacaacactatactaacaagattagggccctacgtaataggctaattgtactgctcttagaatgtaagcgttcacgaaaataaaatttggatatagacagtccttaaaaatcacactgtaaatatgaatctgctcactttaaacctgtttttttttcatttattgtttatgtaaatgtttgttaaaaataaatcccatggaatatttccatgtaa

SEQ ID NO: 98820 - DNA, 2506 bp, Artificial Sequence
  derived and/or modified sequence
ggtttggccgctgccggccagcgtcctctggccatggacaccccggaaaatgtccttcagatgcttgaagcccacatgcagagctacaagggcaatgaccctcttggtgaatgggaaagatacatacagtgggtagaagagaattttcctgagaataaagaatacttgataactttactagaacatttaatgaaggaatttttagataagaagaaataccacaatgacccaagattcatcagttattgtttaaaatttgctgagtacaacagtgacctccatcaattttttgagtttctgtacaaccatgggattggaaccctgtcatcccctctgtacattgcctgggcggggcatctggaagcccaaggagagctgcagcatgccagtgctgtccttcagagaggaattcaaaaccaggctgaacccagagagttcctgcaacaacaatacaggttatttcagacacgcctcactgaaacccatttgccagctcaagctagaacctcagaacctctgcataatgttcaggttttaaatcaaatgataacatcaaaatcaaatccaggaaataacatggcctgcatttctaagaatcagggttcagagctttctggagtgatatcttcagcttgtgataaagagtcaaatatggaacgaagagtgatcacgatttctaaatcagaatattctgtgcactcatctttggcatccaaagttgatgttgagcaggttgttatgtattgcaaggagaagcttattcgtggggaatcagaattttcctttgaagaattgagagcccagaaatacaatcaacggagaaagcatgagcaatgggtaaatgaagacagacattatatgaaaaggaaagaagcaaatgcttttgaagaacagctattaaaacagaaaatggatgaacttcataagaagttgcatcaggtggtggagacatcccatgaggatctgcccgcttcccaggaaaggtccgaggttaatccagcacgtatggggccaagtgtaggctcccagcaggaactgagagcgccatgtcttccagtaacctatcagcagacaccagtgaacatggaaaagaacccaagagaggcacctcctgttgttcctcctttggcaaatgctatttctgcagctttggtgtccccagccaccagccagagcattgctcctcctgttcctttgaaagcccagacagtaacagactccatgtttgcagtggccagcaaagatgctggatgtgtgaataagagtactcatgaattcaagccacagagtggagcagagatcaaagaagggtgtgaaacacataaggttgccaacacaagttcttttcacacaactccaaacacatcactgggaatggttcaggcaacgccatccaaagtgcagccatcacccaccgtgcacacaaaagaagcattaggtttcatcatgaatatgtttcaggctcctacacttcctgatatttctgatgacaaagatgaatggcaatctctagatcaaaatgaagatgcatttgaagcccagtttcaaaaaaatgtaaggtcatctggggcttggggagtcaataagatcatctcttctttgtcatctgcttttcatgtgtttgaagatggaaacaaagaaaattatggattaccacagcctaaaaataaacccacaggagccaggacctttggagaacgctctgtcagcagacttccttcaaaaccaaaggaggaagtgcctcatgctgaagagtttttggatgactcaactgtatggggtattcgctgcaacaaaaccctggcacccagtcctaagagcccaggagacttcacatctgctgcacaacttgcgtctacaccattccacaagcttccagtggagtcagtgcacattttagaagataaagaaaatgtggtagcaaaacagtgtacccaggcgactttggattcttgtgaggaaaacatggtggtgccttcaagggatggaaaattcagtccaattcaagagaaaagcccaaaacaggccttgtcgtctcacatgtattcagcatccttacttcgtctgagccagcctgctgcaggtggggtacttacctgtgaggcagagttgggcgttgaggcttgcagactcacagacactgacgctgccattgcagaagatccaccagatgctattgctgggctccaagcagaatggatgcagatgagttcacttgggactgttgatgctccaaacttcattgttgggaacccatgggatgataagctgattttcaaacttttatctgggctttctaaaccagtgagttcctatccaaatacttttgaatggcaatgtaaacttccagccatcaagcccaagactgaatttcaattgggttctaagctggtctatgtccatcaccttcttggagaaggagcctttgcccaggtgtacgaagctacccagggagatctgaatgatgctaaaaataaacagaaatttgttttaaaggtaaaatcct

SEQ ID NO: 98821 - DNA, 3087 bp, Artificial Sequence
  derived and/or modified sequence
atggacacccccgagaacgtgctgcagatgctggaggcccacatgcagagctacaagggcaacgaccccctgggcgagtgggagagatacatccagtgggtggaggagaacttccccgagaacaaggagtacctgatcaccctgctggagcacctgatgaaggagttcctggacaagaagaagtaccacaacgaccccagattcatcagctactgcctgaagttcgccgagtacaacagcgacctgcaccagttcttcgagttcctgtacaaccacggcatcggcaccctgagcagccccctgtacatcgcctgggccggccacctggaggcccagggcgagctgcagcacgccagcgccgtgctgcagagaggcatccagaaccaggccgagcccagagagttcctgcagcagcagtacagactgttccagaccagactgaccgagacccacctgcccgcccaggccagaaccagcgagcccctgcacaacgtgcaggtgctgaaccagatgatcaccagcaagagcaaccccggcaacaacatggcctgcatcagcaagaaccagggcagcgagctgagcggcgtgatcagcagcgcctgcgacaaggagagcaacatggagagaagagtgatcaccatcagcaagagcgagtacagcgtgcacagcagcctggccagcaaggtggacgtggagcaggtggtgatgtactgcaaggagaagctgatcagaggcgagagcgagttcagcttcgaggagctgagagcccagaagtacaaccagagaagaaagcacgagcagtgggtgaacgaggacagacactacatgaagagaaaggaggccaacgccttcgaggagcagctgctgaagcagaagatggacgagctgcacaagaagctgcaccaggtggtggagaccagccacgaggacctgcccgccagccaggagagaagcgaggtgaaccccgccagaatgggccccagcgtgggcagccagcaggagctgagagccccctgcctgcccgtgacctaccagcagacccccgtgaacatggagaagaaccccagagaggccccccccgtggtgccccccctggccaacgccatcagcgccgccctggtgagccccgccaccagccagagcatcgccccccccgtgcccctgaaggcccagaccgtgaccgacagcatgttcgccgtggccagcaaggacgccggctgcgtgaacaagagcacccacgagttcaagccccagagcggcgccgagatcaaggagggctgcgagacccacaaggtggccaacaccagcagcttccacaccacccccaacaccagcctgggcatggtgcaggccacccccagcaaggtgcagcccagccccaccgtgcacaccaaggaggccctgggcttcatcatgaacatgttccaggcccccaccctgcccgacatcagcgacgacaaggacgagtggcagagcctggaccagaacgaggacgccttcgaggcccagttccagaagaacgtgagaagcagcggcgcctggggcgtgaacaagatcatcagcagcctgagcagcgccttccacgtgttcgaggacggcaacaaggagaactacggcctgccccagcccaagaacaagcccaccggcgccagaaccttcggcgagagaagcgtgagcagactgcccagcaagcccaaggaggaggtgccccacgccgaggagttcctggacgacagcaccgtgtggggcatcagatgcaacaagaccctggcccccagccccaagagccccggcgacttcaccagcgccgcccagctggccagcacccccttccacaagctgcccgtggagagcgtgcacatcctggaggacaaggagaacgtggtggccaagcagtgcacccaggccaccctggacagctgcgaggagaacatggtggtgcccagcagagacggcaagttcagccccatccaggagaagagccccaagcaggccctgagcagccacatgtacagcgccagcctgctgagactgagccagcccgccgccggcggcgtgctgacctgcgaggccgagctgggcgtggaggcctgcagactgaccgacaccgacgccgccatcgccgaggacccccccgacgccatcgccggcctgcaggccgagtggatgcagatgagcagcctgggcaccgtggacgcccccaacttcatcgtgggcaacccctgggacgacaagctgatcttcaagctgctgagcggcctgagcaagcccgtgagcagctaccccaacaccttcgagtggcagtgcaagctgcccgccatcaagcccaagaccgagttccagctgggcagcaagctggtgtacgtgcaccacctgctgggcgagggcgccttcgcccaggtgtacgaggccacccagggcgacctgaacgacgccaagaacaagcagaagttcgtgctgaaggtgcagaagcccgccaacccctgggagttctacatcggcacccagctgatggagagactgaagcccagcatgcagcacatgttcatgaagttctacagcgcccacctgttccagaacggcagcgtgctggtgggcgagctgtacagctacggcaccctgctggacgacgaggacgacctgagcgccggcctggccctgatcgacctgggccagagcatcgacatgaagctgttccccaagggcaccatcttcaccgccaagtgcgagaccagcggcttccagtgcgtggagatgctgagcaacaagccctggaactaccagatcgactacttcggcgtggccgccaccgtgtactgcatgctgttcggcacctacatgaaggtgaagaacgagggcggcgagtgcaagcccgagggcctgttcagaagactgccccacctggacatgtggaacgagttcttccacgtgatgctgaacatccccgactgccaccacctgcccagcctggacctgctgagacagaagctgaagaaggtgttccagcagcactacaccaacaagatcagagccctgagaaacagactgatcgtgctgctgctggagtgcaagagaagcagaaagtag

SEQ ID NO: 98822 - DNA, 2475 bp, Artificial Sequence
  derived and/or modified sequence
atggacacccccgagaacgtgctgcagatgctggaggcccacatgcagagctacaagggcaacgaccccctgggcgagtgggagagatacatccagtgggtggaggagaacttccccgagaacaaggagtacctgatcaccctgctggagcacctgatgaaggagttcctggacaagaagaagtaccacaacgaccccagattcatcagctactgcctgaagttcgccgagtacaacagcgacctgcaccagttcttcgagttcctgtacaaccacggcatcggcaccctgagcagccccctgtacatcgcctgggccggccacctggaggcccagggcgagctgcagcacgccagcgccgtgctgcagagaggcatccagaaccaggccgagcccagagagttcctgcagcagcagtacagactgttccagaccagactgaccgagacccacctgcccgcccaggccagaaccagcgagcccctgcacaacgtgcaggtgctgaaccagatgatcaccagcaagagcaaccccggcaacaacatggcctgcatcagcaagaaccagggcagcgagctgagcggcgtgatcagcagcgcctgcgacaaggagagcaacatggagagaagagtgatcaccatcagcaagagcgagtacagcgtgcacagcagcctggccagcaaggtggacgtggagcaggtggtgatgtactgcaaggagaagctgatcagaggcgagagcgagttcagcttcgaggagctgagagcccagaagtacaaccagagaagaaagcacgagcagtgggtgaacgaggacagacactacatgaagagaaaggaggccaacgccttcgaggagcagctgctgaagcagaagatggacgagctgcacaagaagctgcaccaggtggtggagaccagccacgaggacctgcccgccagccaggagagaagcgaggtgaaccccgccagaatgggccccagcgtgggcagccagcaggagctgagagccccctgcctgcccgtgacctaccagcagacccccgtgaacatggagaagaaccccagagaggccccccccgtggtgccccccctggccaacgccatcagcgccgccctggtgagccccgccaccagccagagcatcgccccccccgtgcccctgaaggcccagaccgtgaccgacagcatgttcgccgtggccagcaaggacgccggctgcgtgaacaagagcacccacgagttcaagccccagagcggcgccgagatcaaggagggctgcgagacccacaaggtggccaacaccagcagcttccacaccacccccaacaccagcctgggcatggtgcaggccacccccagcaaggtgcagcccagccccaccgtgcacaccaaggaggccctgggcttcatcatgaacatgttccaggcccccaccctgcccgacatcagcgacgacaaggacgagtggcagagcctggaccagaacgaggacgccttcgaggcccagttccagaagaacgtgagaagcagcggcgcctggggcgtgaacaagatcatcagcagcctgagcagcgccttccacgtgttcgaggacggcaacaaggagaactacggcctgccccagcccaagaacaagcccaccggcgccagaaccttcggcgagagaagcgtgagcagactgcccagcaagcccaaggaggaggtgccccacgccgaggagttcctggacgacagcaccgtgtggggcatcagatgcaacaagaccctggcccccagccccaagagccccggcgacttcaccagcgccgcccagctggccagcacccccttccacaagctgcccgtggagagcgtgcacatcctggaggacaaggagaacgtggtggccaagcagtgcacccaggccaccctggacagctgcgaggagaacatggtggtgcccagcagagacggcaagttcagccccatccaggagaagagccccaagcaggccctgagcagccacatgtacagcgccagcctgctgagactgagccagcccgccgccggcggcgtgctgacctgcgaggccgagctgggcgtggaggcctgcagactgaccgacaccgacgccgccatcgccgaggacccccccgacgccatcgccggcctgcaggccgagtggatgcagatgagcagcctgggcaccgtggacgcccccaacttcatcgtgggcaacccctgggacgacaagctgatcttcaagctgctgagcggcctgagcaagcccgtgagcagctaccccaacaccttcgagtggcagtgcaagctgcccgccatcaagcccaagaccgagttccagctgggcagcaagctggtgtacgtgcaccacctgctgggcgagggcgccttcgcccaggtgtacgaggccacccagggcgacctgaacgacgccaagaacaagcagaagttcgtgctgaaggtgaagagctag

SEQ ID NO: 98823 - DNA, 1089 bp, Artificial Sequence
  derived and/or modified sequence
atggaggaggcccagagaagctacatcctgacccagggccccctgcccaacacctgcggccacttctgggagatggtgtgggagcagaagagcagaggcgtggtgatgctgaacagagtgatggagaagggcagcctgaagtgcgcccagtactggccccagaaggaggagaaggagatgatcttcgaggacaccaacctgaagctgaccctgatcagcgaggacatcaagagctactacaccgtgagacagctggagctggagaacctgaccacccaggagaccagagagatcctgcacttccactacaccacctggcccgacttcggcgtgcccgagagccccgccagcttcctgaacttcctgttcaaggtgagagagagcggcagcctgagccccgagcacggccccgtggtggtgcactgcagcgccggcatcggcagaagcggcaccttctgcctggccgacacctgcctgctgctgatggacaagagaaaggaccccagcagcgtggacatcaagaaggtgctgctggagatgagaaagttcagaatgggcctgatccagaccgccgaccagctgagattcagctacctggccgtgatcgagggcgccaagttcatcatgggcgacagcagcgtgcaggaccagtggaaggagctgagccacgaggacctggagcccccccccgagcacatcccccccccccccagaccccccaagagaatcctggagccccacaacggcaagtgcagagagttcttccccaaccaccagtgggtgaaggaggagacccaggaggacaaggactgccccatcaaggaggagaagggcagccccctgaacgccgccccctacggcatcgagagcatgagccaggacaccgaggtgagaagcagagtggtgggcggcagcctgagaggcgcccaggccgccagccccgccaagggcgagcccagcctgcccgagaaggacgaggaccacgccctgagctactggaagcccttcctggtgaacatgtgcgtggccaccgtgctgaccgccggcgcctacctgtgctacagattcctgttcaacagcaacacctag

SEQ ID NO: 98824 - DNA, 1089 bp, Artificial Sequence
  derived and/or modified sequence
atggaggaggctcagcgttcctatatcctgacacaaggcccattgcccaatacttgtggacatttctgggaaatggtctgggaacagaagtctagaggagtcgtgatgctgaatcgcgtgatggaaaagggatccttaaaatgtgcccagtattggcctcaaaaagaggaaaaagagatgatttttgaagacacgaatttgaaactcactctcattagtgaagacattaagagctactacaccgtgagacaactagaattggaaaaccttaccacacaagagactcgagaaatcctacacttccattatacaacctggcctgacttcggcgtccctgaatctccagcttccttcctaaactttttgtttaaggtgcgagaatccggatccttgagtcccgaacatggcccggttgtagtacattgttctgcaggtattggccgctccggcacgttctgtctcgctgatacctgtctcctgttgatggataagagaaaagatcctagctctgtggatatcaagaaagtacttttggagatgagaaaattcaggatgggcctcattcagacagctgaccagctcaggttcagttatctcgcagtgatagaaggggctaaatttataatgggcgactccagtgtacaggatcagtggaaagaactgagtcacgaggacctggaaccaccgcctgagcacattcccccccccccacgtcctcccaagaggatcctggaaccccacaacggaaagtgtagagagtttttccctaatcaccagtgggttaaagaggaaacgcaggaagacaaggactgtccaataaaggaggagaagggatccccattgaacgccgcaccatatgggatcgagtcaatgtcacaagacaccgaggtgcgttctagagttgttggcggctccctcaggggagcacaggctgccagcccggctaagggggagccaagtctacctgagaaggatgaggatcacgcgctctcatactggaagcccttcttggtgaacatgtgcgtggctaccgtgctcaccgctggggcgtatctatgttacaggtttctgtttaatagcaacacctag

SEQ ID NO: 98825 - DNA, 1089 bp, Artificial Sequence
  derived and/or modified sequence
atggaggaggcccagaggagctacatcctgacccagggccccctgcccaacacctgtggccacttctgggagatggtgtgggagcagaagagcagaggagtggtgatgctgaacagagtgatggagaagggcagcctgaagtgtgcccagtactggccccagaaggaggagaaggagatgatctttgaggacaccaacctgaagctgaccctcatcagcgaggacatcaagagctactacacagtgcggcagctggagctggagaacctgaccacccaggagacccgggagatcctgcacttccactacaccacctggccagactttggagtgcctgagagccctgccagcttcctgaacttcctgttcaaggtgcgggagagcggcagcctgagccctgagcacggccctgtggtggtgcactgcagcgctggcatcggccgcagcggcaccttctgcctggccgacacctgcctgctgctgatggacaagaggaaggaccccagctctgtggacatcaagaaggtgctgctggagatgaggaagttcaggatgggcctcatccagacagctgaccagctgcgcttctcctacctggccgtcatcgagggcgccaagttcatcatgggagacagctctgtgcaggaccagtggaaggagctgagccatgaggacctggagcccccacctgagcacatccccccaccacccaggcctcccaagaggatcctggagccccacaacgggaagtgccgggagttcttccccaaccaccagtgggtgaaggaggagacccaggaggacaaggactgccccatcaaggaggagaagggcagccccctgaatgctgccccctacggcatcgagagcatgagccaggacacagaggtgcgcagccgggtggtgggcggcagcctgcggggggcccaggccgccagccctgccaagggggagcccagcctgcctgagaaggatgaggaccacgccctgagctactggaagcccttcctggtgaacatgtgtgtggccaccgtgctgacagctggggcctacctgtgctaccgcttcctgttcaacagcaacacctag

SEQ ID NO: 98826 - DNA, 1089 bp, Artificial Sequence
  derived and/or modified sequence
atggaggaggcccagcggagctacatcctgacccagggccccctgcccaacacatgtggtcacttctgggagatggtttgggagcagaaatccagaggcgtagtgatgctgaacagagtgatggagaagggatcactgaagtgtgcgcaatattggccccagaaagaagaaaaagagatgatcttcgaggacacaaaccttaagctgactctgatatccgaggacatcaagtcgtattatacagtgagacagctcgaactggaaaatctgacgacacaggaaactcgtgagatcctgcactttcactacacgacctggccagactttggtgtcccggagagtcccgcatcatttctaaatttccttttcaaggtgcgggagtcaggcagtttgagccccgaacatggcccggtggttgtccactgctcagcaggaatcgggcgttccggtaccttctgtctcgctgacacctgccttctgttgatggacaaaagaaaagatccctcatccgtggacataaagaaggtgctgttggagatgcgcaaattcagaatggggctaatccagacggcggaccagttacggttttcctatttagccgtgatcgagggagccaaatttattatgggagattcctctgtccaagatcagtggaaggaactgtctcatgaagacctggagcccccacccgaacacatcccaccccccccccgccccccaaaaagaatcctggagccccataatggaaagtgtcgggaattcttcccaaatcatcagtgggtgaaagaagagacacaggaggataaagattgcccgattaaagaagaaaaaggcagccccctcaatgcagcgccatatggcattgaatcgatgtctcaggatactgaggtcagatccagagtggtcgggggctcgctgcgcggagcccaagccgcctctcccgccaaaggtgaacctagtctgcctgaaaaagacgaggatcatgccttaagctactggaaaccttttctggtgaatatgtgtgttgccacagtacttaccgccggagcctatctttgttacagattcctgttcaactccaacacttag

SEQ ID NO: 98827 - DNA, 1089 bp, Artificial Sequence
  derived and/or modified sequence
atggaggaagctcaacgctcatacatcctaacccagggccctctgcctaatacctgcggacacttctgggaaatggtgtgggagcagaaatctcgaggggtcgtgatgctgaacagggttatggaaaagggcagtttgaaatgcgctcagtattggccccagaaagaggagaaggagatgatttttgaggacaccaatttgaaactcaccctcattagcgaagacatcaaaagctactatactgtccgtcagctagagcttgaaaatctcactactcaggaaactcgggagattttacatttccactacacgacttggccagatttcggtgtcccggaatcacctgcaagtttcttgaattttctctttaaggtaagagagtcaggatctctgtcccccgagcacgggccagtggtggttcactgttctgcaggcataggtagaagtggcacattttgcctcgctgatacgtgtcttctgcttatggacaaacgcaaggatccatcctccgtcgacatcaagaaggtcctgctagagatgaggaagttcaggatggggctgattcagacagccgaccaattaagattttcatatctggcagttatcgaaggcgctaaattcataatgggcgattctagcgtccaagaccagtggaaggagttatctcacgaggacctcgagcctcctcctgagcatataccgccacctccgagaccccctaaaagaatcctcgagccccacaatggcaaatgcagggagtttttccccaaccatcagtgggtcaaagaggaaacacaggaggataaggattgccctatcaaggaggagaaagggagccccctcaacgccgcaccctacgggatcgagtctatgtcccaggacacagaagtgcggagccgcgtggtgggcggaagccttagaggtgcccaggccgcatctccggctaaaggcgaaccaagcctgccagagaaagacgaagaccacgccctgagctattggaaaccgtttctggtgaacatgtgcgtcgccaccgttctgaccgccggagcttacttgtgctatagattcctatttaatagtaacacatag

SEQ ID NO: 98828 - protein, 836 aa, Artificial Sequence
  derived and/or modified sequence
MTATVENLTFQKDTLGNAVDKNRRHGSTEPLVLAWSSQFRRLTWGCALDALHRSPCVAASQHGVTHLIRSSRTPHSTRCRKEDAQPGHHGNGAASVTAQARGQRSVLQVPLPVPRSCLFSESFVVSVSSQSRFLASVPGTGVQRSTAADMAASTAAGKQRIPKVAKVKNKAPAEVQITAEQLLREAKERELELLPPPPQQKITDEEELNDYKLRKRKTFEDNIRKNRTVISNWIKYAQWEESLKEIQRARSIYERALDVDYRNITLWLKYAEMEMKNRQVNHARNIWDRAITTLPRVNQFWYKYTYMEEMLGNVAGARQVFERWMEWQPEEQAWHSYINFELRYKEVDRARTIYERFVLVHPDVKNWIKYARFEEKHAYFAHARKVYERAVEFFGDEHMDEHLYVAFAKFEENQKEFERVRVIYKYALDRISKQDAQELFKNYTIFEKKFGDRRGIEDIIVSKRRFQYEEEVKANPHNYDAWFDYLRLVESDAEAEAVREVYERAIANVPPIQEKRHWKRYIYLWINYALYEELEAKDPERTRQVYQASLELIPHKKFTFAKMWILYAQFEIRQKNLSLARRALGTSIGKCPKNKLFKVYIELELQLREFDRCRKLYEKFLEFGPENCTSWIKFAELETILGDIDRARAIYELAISQPRLDMPEVLWKSYIDFEIEQEETERTRNLYRRLLQRTQHVKVWISFAQFELSSGKEGSLTKCRQIYEEANKTMRNCEEKEERLMLLESWRSFEEEFGTASDKERVDKLMPEKVKKRRKVQTDDGSDAGWEEYFDYIFPEDAANQPNLKLLAMAKLWKKQQQEKEDAEHHPDEDVDESES

SEQ ID NO: 98829 - DNA, 2511 bp, Artificial Sequence
  derived and/or modified sequence
atgactgccacagtcgagaacctgacctttcagaaagatacattagggaacgctgttgacaagaatcggcgtcacgggtccacagagcccctagtgcttgcttggagctctcagtttcggagactcacgtgggggtgcgccctggatgcccttcacaggtccccttgcgtggcggcctcccagcacggggtcacacacctcatcaggagcagtaggacaccccactcaacaagatgccgtaaagaggatgcacagcccggacatcatgggaacggtgccgcgtcagtaactgctcaagctcgtggacagcgttcagtgcttcaggtgccattacccgttcctcggtcatgtctcttttccgaaagtttcgtggtgtccgtttctagccagagtcgcttcctggctagtgtccccggaaccggggtgcaacggtctaccgccgctgatatggccgccagcacagctgcgggcaagcagaggattccaaaggtggcaaaggtgaaaaataaggcccccgcagaagttcaaatcaccgctgagcagttgttacgtgaggccaaggagcgcgagttagaactcttgcccccacccccccagcagaaaatcaccgatgaggaagagttgaacgattataagctacgcaaacgaaagacatttgaagacaacatcagaaagaatcgcactgtgatctctaactggattaagtatgcacagtgggaagaatccctgaaggagattcaacgggctagaagcatctatgagagggctctggatgtcgattaccggaatatcaccttgtggctgaagtatgcggagatggagatgaagaaccgccaggtcaatcatgctagaaatatctgggatagggcaattaccacgctgcctcgtgtgaatcaattctggtacaaatatacctatatggaagagatgctgggaaatgtagccggagccaggcaggtattcgaaagatggatggagtggcagcccgaagagcaagcctggcatagctacatcaatttcgagctgagatataaggaggtggacagagcccggacgatttatgagcggtttgtgttggtccatcccgatgtgaaaaactggattaagtatgctcgcttcgaagagaagcacgcatatttcgcgcatgctagaaaagtgtatgaaagggcagtggagttcttcggcgatgagcacatggatgaacacttgtacgtcgccttcgccaagttcgaagagaatcagaaagagtttgagcgtgtcagagttatttataagtacgccctcgaccgtatctctaagcaagatgctcaggagttgtttaagaattacaccatctttgaaaagaaatttggagatagacggggcattgaggacatcattgtctcaaagcgccgctttcagtatgaagaagaggtgaaggccaacccccacaattacgatgcctggttcgattacctgaggttagtggagtctgacgctgaggccgaagctgtgcgtgaggtgtacgagagagcaatcgcgaacgtgccccctatccaggagaagcgccattggaagcggtacatttacctgtggattaactacgccctgtatgaggagctagaagctaaagaccccgaacgtacccgacaggtgtatcaagcatctctggagctgataccccataagaagttcaccttcgcgaagatgtggatcctgtacgctcagttcgagatccggcagaaaaatctgagccttgctaggcgggccttgggaacttccattggcaagtgtccgaagaacaaactgttcaaggtgtatatcgaactagagctccaactgagggagttcgacagatgccgcaagctttacgagaagttcctcgaattcgggcccgagaactgtacatcctggataaaattcgcggaactcgaaacgattttgggagacatagatagggctcgcgccatttatgaattagccatttctcaaccacgtctggacatgcctgaggtgctgtggaaatcctacattgactttgaaatcgagcaggaggaaactgagcgaacccggaacttgtaccgccgcctgctgcagaggacacagcatgtaaaggtatggatcagctttgctcaattcgaactctccagtggtaaggagggatccttgaccaaatgccggcaaatttatgaagaagccaacaagactatgcggaactgcgaagagaaggaggaacgcctcatgctccttgagtcatggagaagctttgaggaagaatttgggaccgctagtgataaagagcgcgtggataagctgatgccagagaaggtgaagaagcggagaaaggtgcagacagacgatggctccgacgcgggctgggaggaatactttgattacatcttccctgaggacgcagcgaatcagcctaatctgaagctccttgccatggccaaattatggaagaaacagcagcaggagaaggaagatgccgagcaccatcctgatgaggatgtagacgagagtgaatcttag

SEQ ID NO: 98830 - DNA, 2511 bp, Artificial Sequence
  derived and/or modified sequence
atgacagccaccgtggagaacctgaccttccagaaggacaccctgggcaatgctgtggacaagaacagaagacatggcagcacagagcccctggtgctggcctggagcagccagttccggcggctgacctggggctgtgccctggatgccctgcacaggagcccctgtgtggccgccagccagcacggcgtgacccacctgatccgcagcagcaggaccccccacagcacccgctgcaggaaggaggatgcccagcccggccaccacggcaatggagctgcctctgtgacagcccaggcccggggccagaggtctgtgctgcaggtgcccctgcctgtgcccaggagctgcctcttcagcgagagctttgtggtgtctgtgagcagccagagccgcttcctggcctctgtgcccggcaccggggtgcagaggagcacagctgctgacatggccgccagcacagctgctgggaagcagaggatccccaaggtggccaaggtgaagaacaaggccccagctgaggtgcagatcacagctgagcagctgctgcgggaggccaaggagcgggagctggagctgctgcccccaccaccccagcagaagatcacagatgaggaggagctgaatgactacaagctgaggaagaggaagacctttgaggacaacatcaggaagaacagaactgtcatcagcaactggatcaagtatgcccagtgggaggagagcctgaaggagatccagagggcccggagcatctatgagcgggccctggatgtggactacagaaacatcaccctgtggctgaagtatgcagagatggagatgaagaaccggcaggtgaaccacgccaggaacatctgggaccgggccatcaccaccctgccccgggtgaaccagttctggtacaagtacacctacatggaggagatgctgggcaatgtggccggggcccggcaggtgtttgagcgctggatggagtggcagcctgaggagcaggcctggcacagctacatcaactttgagctgcgctacaaggaggtggaccgggcccggaccatctatgaaagatttgtgctggtgcacccagatgtgaagaactggatcaagtatgccaggtttgaggagaagcacgcctactttgcccacgccaggaaggtgtatgaaagagctgtggagttctttggagatgagcacatggatgagcacctgtatgtggcctttgccaagtttgaggagaaccagaaggagtttgagcgggtgcgggtcatctacaagtatgccctggaccgcatcagcaagcaggatgcccaggagctgttcaagaactacaccatctttgagaagaagtttggagacagaagaggaattgaggacatcatcgtgtccaagaggcgcttccagtatgaggaggaggtgaaggccaacccccacaactatgatgcctggtttgactacctgcggctggtggagagtgatgctgaggccgaggccgtgcgggaggtgtatgaaagagccatcgccaacgtgccccccatccaggagaagaggcactggaagcgctacatctacctgtggatcaactatgccctgtatgaggagctggaggccaaggaccctgagaggacccggcaggtgtaccaggccagcctggagctgatcccccacaagaagttcacctttgccaagatgtggatcctgtatgcccagtttgagatccggcagaagaacctgagcctggcccggcgggccctgggcaccagcatcggcaagtgccccaagaacaagctgttcaaggtgtacatcgagctggagctgcagctgcgggagtttgaccgctgcaggaagctgtatgagaagttcctggagtttggacctgagaactgcacctcctggatcaagtttgctgagctggagaccatcctgggggacatcgaccgggcccgggccatctatgagctggccatcagccagccccggctggacatgcctgaggtgctgtggaagagctacatcgactttgaaattgagcaggaggagacagagaggaccaggaacctgtaccgccgcctgctgcagaggacccagcacgtgaaggtgtggatcagctttgcccagtttgagctgagcagcggcaaggagggcagcctgaccaagtgccggcagatctatgaggaggccaacaagaccatgaggaactgtgaggagaaggaggagcggctgatgctgctggagagctggaggagctttgaggaggagtttggaacagccagtgacaaggagcgggtggacaagctgatgcctgagaaggtgaagaagaggaggaaggtgcagacagatgatggcagtgatgctggctgggaggagtactttgactacatcttcccagaagatgctgccaaccagcccaacctgaagctgctggccatggccaagctgtggaagaagcagcagcaggagaaggaggatgctgagcaccacccagatgaagatgtggatgagagcgagagctag

SEQ ID NO: 98831 - DNA, 2511 bp, Artificial Sequence
  derived and/or modified sequence
atgaccgccaccgtggagaacctgaccttccagaaggacaccctggggaacgctgtagacaagaaccgtaggcacggatccacagaacctcttgtgctggcctggagcagccaatttcgtaggctgacgtggggttgtgccctggacgctctccatagatcaccatgcgtggcagccagtcagcatggtgtgactcacttgatccgtagcagccggacgccgcactccaccaggtgtcgtaaagaagacgcccagccgggccatcatggtaacggagcagcctcagtcacagcccaagcgcggggccagaggagtgtgctgcaggtaccgctccccgtacctcgctcttgcctcttcagcgaatctttcgtggtatccgtcagttctcagtccaggttcctggcgtctgtgccaggaacaggagtccaacgttcgacagcggccgacatggcagccagtaccgcagccggtaaacagcgcatacctaaggtggctaaggtcaaaaacaaagcaccggctgaggtccagataactgccgagcagctccttcgggaggccaaggaaagggagctcgagctgcttccacctcctccccagcaaaagattaccgacgaggaagagctgaatgactataaactgagaaaaagaaaaactttcgaagacaatatcaggaaaaaccgtaccgttatatcaaattggatcaaatatgcgcagtgggaggagtcactcaaagagatccagagggcccgttctatatatgaacgtgcactcgatgtcgactataggaacataaccctgtggctgaagtacgcagaaatggaaatgaagaatcgtcaagttaatcatgcccgaaatatttgggatcgcgccatcaccacactcccgcgtgtgaaccagttctggtataaatatacatatatggaggagatgcttggaaatgtggccggtgcaaggcaagtctttgagcggtggatggagtggcagccagaggagcaggcttggcactcctacataaatttcgagctgcggtacaaagaagtcgacagagcccggactatttatgaacggtttgttctcgttcaccctgatgttaagaattggattaagtacgcaaggtttgaagagaaacacgcctacttcgctcacgcccgcaaggtttatgaacgcgccgtagagttcttcggggacgagcacatggacgagcatctgtacgtcgcattcgctaagtttgaagaaaaccagaaggaatttgaaagggtgcgagtcatctacaaatatgccctggatcgcataagtaagcaagatgcacaggagctcttcaaaaattatactatctttgagaagaagttcggcgaccggagagggattgaggacattatagtaagtaagagacgttttcaatacgaagaagaagttaaggctaacccgcataactacgacgcctggtttgactacctgcgtctggtggagagtgatgcagaagctgaggctgtcagagaggtgtacgagcgcgccatcgctaatgtgccgcctatccaggagaagcggcactggaaacgatacatatatctgtggattaattacgcgctttacgaggagctggaggcgaaagatcctgagcggaccaggcaggtgtatcaagctagcctggagctcataccacacaaaaagttcacctttgcaaagatgtggatcctctatgcccagttcgagattcggcaaaaaaacctatctctggcacggagggcgctcggcacatctattggcaagtgccccaagaataagctcttcaaggtgtatatcgaattggagcttcaactgcgggaatttgatagatgcaggaagctgtacgagaaattcctggagtttggacctgagaactgtacgtcatggattaaatttgcagaactcgagactatcctcggtgacatcgaccgggcgcgcgctatatatgaactcgccataagccagcccaggctggatatgcccgaagtcctgtggaagagttacatcgattttgagattgagcaggaagagacggagcggaccaggaacctgtaccggcggctcttgcagagaacccagcacgtgaaggtgtggatctcattcgcgcagttcgagctcagtagcggcaaggaaggtagccttaccaaatgccgtcagatttacgaagaagccaataaaactatgcgaaactgtgaggaaaaagaggaacggttgatgctgctcgagagttggcgctcctttgaggaagagtttggaacagccagtgacaaagagcgggtggataagttgatgcctgaaaaggtgaaaaagagacggaaagtccagacagacgacggcagcgatgccggctgggaggagtattttgactacattttccccgaggatgccgccaaccaacccaacctcaagctcctggcgatggctaaactgtggaaaaaacagcaacaggagaaagaagatgcagagcatcatccagatgaggatgtagacgaatccgagtcttag

SEQ ID NO: 98832 - DNA, 2511 bp, Artificial Sequence
  derived and/or modified sequence
atgacggcaaccgtggaaaatctcaccttccagaaggataccctggggaacgcggtggataagaatcgcagacacggctcgacagagccattggtcctcgcttggtcttcccagttccgacggctcacatggggctgtgccctggatgcgctgcacaggtccccttgcgtggctgcctcgcagcacggagtgacgcatctcatccggtcttcccgcacgccacactcaacccgctgtagaaaagaagacgctcagccaggccatcatggtaacggggcagctagtgtcaccgcgcaggccaggggccagagatccgtgctccaggtcccgcttcccgttcctcgatcctgcctgttctctgaatcgttcgtcgtttccgtgagctcgcagtcccgctttcttgctagtgtgcccggaacaggtgttcagcgtagtacggccgctgacatggctgcaagcacggccgctggcaaacaaagaatcccaaaggtggctaaagttaagaacaaggcacccgctgaagtccaaattacagctgaacagctgttaagagaagccaaggagagggaattggaactgctgcctccaccaccgcagcagaagattactgacgaagaagagctcaatgattacaagctgcggaagcggaaaacatttgaagataatatcagaaaaaacaggactgtgatcagtaactggattaaatatgctcaatgggaggaaagcctgaaggagatccagcgggcaagaagcatctacgaaagagccctggacgttgactatcgaaacataactctatggcttaaatatgccgagatggaaatgaagaacagacaggtcaatcatgcccgtaacatctgggacagggctatcacaaccttgccacgagtgaaccagttctggtacaagtacacttatatggaggagatgttgggcaatgtggctggcgcaagacaggtgttcgagcggtggatggagtggcagcccgaagaacaggcgtggcactcctatattaatttcgaattaagatacaaggaggtcgaccgagccaggacaatttacgagcggttcgtcctggtccatcctgatgtaaaaaattggatcaaatacgcaagatttgaggagaagcacgcttatttcgcccatgcacgaaaagtctacgaacgggcagtcgagttttttggagatgagcacatggatgagcacctctatgtggcattcgctaaattcgaagagaaccagaaagagttcgagcgagtccgcgttatctataagtacgcccttgacaggatctcaaagcaagatgcccaggaactgttcaagaattataccattttcgagaaaaaattcggtgaccgcaggggcattgaggacatcattgtctccaaaagaaggttccagtacgaagaggaagtgaaagctaaccctcacaattacgatgcctggtttgactacctgcgcctggtagagtctgatgctgaggctgaagccgtgcgtgaggtttatgaacgcgctatcgccaatgtgcctcccattcaagagaagagacactggaagaggtacatctatttgtggatcaattatgctctatacgaggaactggaggcgaaagacccagagcggactaggcaggtgtatcaagccagcctcgagctcatccctcacaagaaattcacattcgccaagatgtggatcctgtatgcccagtttgaaataagacagaaaaacctttccctggcacgcagggcattggggacatccattgggaaatgccctaaaaacaaactgttcaaggtctacatcgagcttgagctgcagttaagagaattcgaccggtgcagaaaattatacgagaaattcctggaatttggtccggaaaactgtacctcttggatcaagtttgcggagttggagactatcctcggggatatcgaccgggctcgtgctatttacgagcttgcgatctcgcagccaaggttagacatgccagaggtactgtggaagagttacattgatttcgaaatcgagcaggaggaaacggagaggaccagaaacctttatcggaggcttctccagcggacccaacacgtgaaggtatggatctcttttgctcagtttgagttatcatccggcaaagaaggatccctgactaagtgtaggcagatctatgaagaagcaaacaagacaatgcgtaactgcgaggagaaggaggagcggctcatgctcctcgaaagctggcgtagttttgaggaggagttcggaaccgcttcagataaagaaagagtggacaaactcatgccagagaaagtgaaaaagagaaggaaagttcagaccgatgatggatctgatgccggttgggaggaatactttgattatatcttcccagaggacgccgcaaatcagcctaatctcaagctcctggccatggctaaactgtggaaaaagcagcagcaggaaaaggaggacgctgaacaccatccagatgaagacgtggacgagagtgagagttag

SEQ ID NO: 98833 - DNA, 4370 bp, Artificial Sequence
  derived and/or modified sequence
ctttccgacactctttgggaagagaatctctaatgacggcaacagtggagaacctaacgttccagaaggacactttgggaaatgctgttgacaaaaacaggcgccacggctcgacagagccactcgtcctcgcctggtcatcccagttccggaggctgacctggggatgcgccctggacgccctgcaccgcagtccttgcgtcgctgctagtcagcacggcgttacccacctcatccgcagctccaggacgccgcactccacgcgctgccgcaaggaggacgcgcagcctggtcaccatggaaacggtgccgcctccgtcacggctcaagcgagaggtcaaaggtcagtcctgcaagttccgcttccggttccgagatcctgtttgttttctgaaagctttgtggtttcggtgagctctcagagccgatttctagcgtccgtgccggggacaggtgtccagaggtcgactgctgcagacatggcggcctccaccgcggccgggaagcagcggattcccaaagtggccaaggtgaaaaacaaagccccggctgaggtacagataactgctgaacaactcttaagagaggctaaagaaagagaacttgagcttcttccacctccacctcaacagaagatcacagatgaagaagaattaaatgattataaactaaggaaaaggaagacttttgaagataatataagaaaaaacaggactgtgattagtaactggataaaatacgcacaatgggaagaaagcctaaaggagattcaaagggctcgatccatatacgagcgtgctttagatgtagactaccgaaatattacactctggctgaaatacgcagaaatggaaatgaagaatcgccaagtcaaccatgctcgaaatatctgggaccgggccataacaacgctgcctcgagttaatcagttctggtacaagtacacgtacatggaggaaatgttgggaaacgttgccggtgcccggcaggtgtttgagcgctggatggagtggcagcctgaggagcaagcctggcactcctacatcaactttgagctgagatacaaagaggtggatcgggcccgcaccatttatgagcgatttgtcctcgtgcaccctgatgttaagaactggatcaagtatgcccgctttgaagaaaaacatgcttattttgcccatgcacggaaagtgtatgagagagctgtggaattctttggagatgaacatatggatgagcacctttatgttgcctttgccaagtttgaagaaaatcagaaagagtttgaaagggtacgagtgatttacaagtatgccctggacagaatttcaaaacaagatgcccaagaactctttaaaaattataccatctttgagaagaagtttggtgataggcggggtattgaagatatcattgtgagcaaacggagattccagtacgaagaagaagtgaaggcgaatccacacaattatgatgcatggtttgattacttgcgcttggtagaaagtgacgcagaagctgaagccgtgagagaagtctatgaaagggccattgccaatgtcccacccattcaggagaagaggcactggaagcgctacatttatctttggatcaactatgcactctatgaagaattggaggcaaaggatcctgagaggacaagacaggtgtatcaagcctctttggaactaattcctcacaaaaagttcacatttgccaaaatgtggatactgtatgcacagtttgaaatacgacagaagaatctgtcattagccagaagagcattgggaacttccataggcaaatgtccaaagaacaaattatttaaagtttacatagaattggagctacagcttcgagaatttgacagatgccggaagctttatgaaaagttcctggaatttggacctgaaaattgtacctcatggattaaattcgctgaattagagacaatccttggtgatattgacagagcacgggcaatctatgaattagccatcagtcagccacgtttagacatgccagaggtgctttggaaatcatatattgattttgaaattgagcaggaagaaacagaaagaacacgaaacctttaccggcggttgcttcaacggacgcagcatgtcaaggtatggatcagctttgctcagtttgagttgtcttcaggaaaagaaggaagtttgactaaatgcagacaaatttatgaagaagctaacaaaaccatgcgaaactgtgaagaaaaggaagagagacttatgctgctggaatcttggcgaagttttgaagaagaatttggaacagcttcagataaggagagagtagacaaactcatgccagagaaagtcaagaagagaagaaaggtccagactgatgatgggtctgatgcaggctgggaagaatactttgattacatctttccagaagatgctgccaaccaacctaacctcaaactcctggccatggccaaactgtggaagaaacagcagcaggaaaaggaggatgctgagcaccatccagatgaggacgtcgatgagagtgaatcctgatctttttttcatagacaaatgttttgttatttttataaattaattgtttggaactcttgtgactcctggaagttcttatatatttcaccagtaagaaattgattggtatctttgatggctactttttaagttattttttaaatgctcttgggttagctaggggtagggattgcaagtaaaggacttttttaactgctggatttgtttttccaactgagtccaaacttttctaatgtctgtccacatcatgcattaggaaatgtaattaaggtaacattctacagttacttttcatgtcatacccataaagatagtttatgcattcatctgaaatgtgtaactttttcatgtcttcagagtcacagacttgagttcatttcccagctctgccactcatgattatataacttaattttcattttcctcattcacaaaatgggccaatagtttgacagctcattttgaagattacattataaaaggaatatacctggtgggtgcatagtaagtgctcagtaaattgtttgttctaagccacttttaaaaatggtttcattccttgtagaattgaatgcgagtggattaataatttaccttactttcttactagtgtccagttatattgttttttagaacaacacttggaaaataatttgcagtgattatatttctgaacaaggttcagaaaacattgtttactaagaatttagtctaataatttcagttaggcgctcatcagttctccagagtggttgagtttgtaataccttgtttaaagaataatggcttgttcacgtgtgtgctatgaaaaatgatgtcccatgttcacataaatttgggaaattctggactaagacttaagtctcgttaatcaaatctctttatagttaggcttctgtacattatgtatctccagtagcaatgttgccatattatttatttcccaaacttagtggacaatggagtcatttctacctagagtaccagtaaacatctcccagtgtgctatagtagaaaatgtctactcctcactgctgacatgttaaacttactcttggtttagagcatgtgtagaaacacctaaggtagctctatgctaaataatgaagagtagcacaagaatgaatgtatttgctgatacgttgctcacattctcaagcaaaaattcaactgcattaaccgatctgagagttttcctttaacctggactgtgtttctcaagcacattttttctttgttcactgcccaaggactagaactgtatttttaaggttgttttcccctaaaaggacctttagtaagcaaatttattattaaatgtgcacatcttattcacccaagggaataaaagctacttcgtaatgttgttactaaattttatcttgaaaataaataacagtgtttgaggacagaagaaactaggactgttgttgagataaaatctgttttcagcctgactgctttagtcactggacgagcatcagctactgcggtgtcagatcacttctcgagtagaggtctgcctagtgagtgagcaggagaacatcatcttaatagcctttggctcacccagagtcagggagagatgaaaataataggtcagaatgcaagtgacttaatcacagtcttcctagaattatctgtttatgttgcatgaatgcataagaaaaaaattctgtcatgttcccaaggtagaattgtaataagcatgtgccagtgtgaaagctggaaggaaaaaagctattctctaacaggagaacataaagattcatttctctcccaccctcaactccaccaaagtaaatcctttcgatagtaaaagtttaa

SEQ ID NO: 98834 - DNA, 2511 bp, Artificial Sequence
  derived and/or modified sequence
atgaccgccaccgtggagaacctgaccttccagaaggacaccctgggcaacgccgtggacaagaacagaagacacggcagcaccgagcccctggtgctggcctggagcagccagttcagaagactgacctggggctgcgccctggacgccctgcacagaagcccctgcgtggccgccagccagcacggcgtgacccacctgatcagaagcagcagaaccccccacagcaccagatgcagaaaggaggacgcccagcccggccaccacggcaacggcgccgccagcgtgaccgcccaggccagaggccagagaagcgtgctgcaggtgcccctgcccgtgcccagaagctgcctgttcagcgagagcttcgtggtgagcgtgagcagccagagcagattcctggccagcgtgcccggcaccggcgtgcagagaagcaccgccgccgacatggccgccagcaccgccgccggcaagcagagaatccccaaggtggccaaggtgaagaacaaggcccccgccgaggtgcagatcaccgccgagcagctgctgagagaggccaaggagagagagctggagctgctgcccccccccccccagcagaagatcaccgacgaggaggagctgaacgactacaagctgagaaagagaaagaccttcgaggacaacatcagaaagaacagaaccgtgatcagcaactggatcaagtacgcccagtgggaggagagcctgaaggagatccagagagccagaagcatctacgagagagccctggacgtggactacagaaacatcaccctgtggctgaagtacgccgagatggagatgaagaacagacaggtgaaccacgccagaaacatctgggacagagccatcaccaccctgcccagagtgaaccagttctggtacaagtacacctacatggaggagatgctgggcaacgtggccggcgccagacaggtgttcgagagatggatggagtggcagcccgaggagcaggcctggcacagctacatcaacttcgagctgagatacaaggaggtggacagagccagaaccatctacgagagattcgtgctggtgcaccccgacgtgaagaactggatcaagtacgccagattcgaggagaagcacgcctacttcgcccacgccagaaaggtgtacgagagagccgtggagttcttcggcgacgagcacatggacgagcacctgtacgtggccttcgccaagttcgaggagaaccagaaggagttcgagagagtgagagtgatctacaagtacgccctggacagaatcagcaagcaggacgcccaggagctgttcaagaactacaccatcttcgagaagaagttcggcgacagaagaggcatcgaggacatcatcgtgagcaagagaagattccagtacgaggaggaggtgaaggccaacccccacaactacgacgcctggttcgactacctgagactggtggagagcgacgccgaggccgaggccgtgagagaggtgtacgagagagccatcgccaacgtgccccccatccaggagaagagacactggaagagatacatctacctgtggatcaactacgccctgtacgaggagctggaggccaaggaccccgagagaaccagacaggtgtaccaggccagcctggagctgatcccccacaagaagttcaccttcgccaagatgtggatcctgtacgcccagttcgagatcagacagaagaacctgagcctggccagaagagccctgggcaccagcatcggcaagtgccccaagaacaagctgttcaaggtgtacatcgagctggagctgcagctgagagagttcgacagatgcagaaagctgtacgagaagttcctggagttcggccccgagaactgcaccagctggatcaagttcgccgagctggagaccatcctgggcgacatcgacagagccagagccatctacgagctggccatcagccagcccagactggacatgcccgaggtgctgtggaagagctacatcgacttcgagatcgagcaggaggagaccgagagaaccagaaacctgtacagaagactgctgcagagaacccagcacgtgaaggtgtggatcagcttcgcccagttcgagctgagcagcggcaaggagggcagcctgaccaagtgcagacagatctacgaggaggccaacaagaccatgagaaactgcgaggagaaggaggagagactgatgctgctggagagctggagaagcttcgaggaggagttcggcaccgccagcgacaaggagagagtggacaagctgatgcccgagaaggtgaagaagagaagaaaggtgcagaccgacgacggcagcgacgccggctgggaggagtacttcgactacatcttccccgaggacgccgccaaccagcccaacctgaagctgctggccatggccaagctgtggaagaagcagcagcaggagaaggaggacgccgagcaccaccccgacgaggacgtggacgagagcgagagctag

SEQ ID NO: 98835 - protein, 461 aa, Artificial Sequence
  derived and/or modified sequence
MDLPDESQWDETTCGLAVCQHPQCWATIRRIERGHPRILGSSCKTPLDAEDKLPVLTVVDILDSGFAAHHLPECTFTKAHSLLSQSSKFYSKFHGRPPKGLPDKSLINCTNRLPKFPVLNLNETQLPCPEDVRNMVVLWIPEETEIHVSQHGKKKRKNSAVKSKSFLGLSGNQSAGTRVGTPGMIVPPPTPVQLSEQFSSDFLPLWAQSEALPQDLLKELLPGGKQTMLCPEMKIKLAMMKKNLPLEKNRPDSVISSKMFLSIHRLTLERPALRYPERLKKLHNLKTEGYRKQQQRQQQQQQQQKKVKTPIKKQEAKKKAKSDPGIQSTSHKHPVTTVHDRLYGYRTLPGQNSDMKQQQQMEKGTTSKQDSTERPKMNYYDHADFHHSVKSPELYETEPTNKDISAPVDAVPEAQAARQKKISFNFSEIMASTGWNSELKLLRILQDTDDEDEEDQSSGAE

SEQ ID NO: 98836 - DNA, 1386 bp, Artificial Sequence
  derived and/or modified sequence
atggacctgcccgacgagagccagtgggacgagaccacctgcggcctggccgtgtgccagcacccccagtgctgggccaccatcagaagaatcgagagaggccaccccagaatcctgggcagcagctgcaagacccccctggacgccgaggacaagctgcccgtgctgaccgtggtggacatcctggacagcggcttcgccgcccaccacctgcccgagtgcaccttcaccaaggcccacagcctgctgagccagagcagcaagttctacagcaagttccacggcagaccccccaagggcctgcccgacaagagcctgatcaactgcaccaacagactgcccaagttccccgtgctgaacctgaacgagacccagctgccctgccccgaggacgtgagaaacatggtggtgctgtggatccccgaggagaccgagatccacgtgagccagcacggcaagaagaagagaaagaacagcgccgtgaagagcaagagcttcctgggcctgagcggcaaccagagcgccggcaccagagtgggcacccccggcatgatcgtgcccccccccacccccgtgcagctgagcgagcagttcagcagcgacttcctgcccctgtgggcccagagcgaggccctgccccaggacctgctgaaggagctgctgcccggcggcaagcagaccatgctgtgccccgagatgaagatcaagctggccatgatgaagaagaacctgcccctggagaagaacagacccgacagcgtgatcagcagcaagatgttcctgagcatccacagactgaccctggagagacccgccctgagataccccgagagactgaagaagctgcacaacctgaagaccgagggctacagaaagcagcagcagagacagcagcagcagcagcagcagcagaagaaggtgaagacccccatcaagaagcaggaggccaagaagaaggccaagagcgaccccggcatccagagcaccagccacaagcaccccgtgaccaccgtgcacgacagactgtacggctacagaaccctgcccggccagaacagcgacatgaagcagcagcagcagatggagaagggcaccaccagcaagcaggacagcaccgagagacccaagatgaactactacgaccacgccgacttccaccacagcgtgaagagccccgagctgtacgagaccgagcccaccaacaaggacatcagcgcccccgtggacgccgtgcccgaggcccaggccgccagacagaagaagatcagcttcaacttcagcgagatcatggccagcaccggctggaacagcgagctgaagctgctgagaatcctgcaggacaccgacgacgaggacgaggaggaccagagcagcggcgccgagtag

SEQ ID NO: 98837 - DNA, 1386 bp, Artificial Sequence
  derived and/or modified sequence
atggacctgcctgatgagtcgcagtgggacgagacgacttgcggattagcagtctgtcaacacccccagtgctgggctaccattcggaggatagaaagggggcaccctcgtatactgggctcaagttgtaagacgccgttggacgcggaggacaagctacccgtgctcactgtggtggacatcctcgactctgggtttgctgcccaccacctgcccgagtgtaccttcaccaaggctcatagccttctctctcagtctagcaagttctactcaaaattccatggtcgtccccccaaaggactgcccgacaagtctctgattaactgcacaaatcggttacctaagttcccagtcctcaatttgaatgagacacaactgccatgccccgaagacgtgcgaaacatggtggttctgtggatacctgaggagactgagatccacgtgtcgcagcacggcaaaaagaagagaaagaactcagcagtgaaaagcaagtctttcctcggtctgtccggaaaccagtcagccggaaccagggtgggcacgccaggaatgatcgtccctccacctaccccagtgcagctgtctgagcagttttctagcgacttcctcccactttgggcacagagcgaggcactaccccaggacctccttaaggagctgctccctgggggcaaacagacgatgctatgccctgagatgaaaattaagctggctatgatgaagaagaatctgcctctggaaaagaatagaccagactccgtcatcagtagcaaaatgttcttgagcatccacaggctcactctcgagaggcctgcacttcgctacccagaacgactgaagaagctgcacaacctcaaaactgaaggataccgtaaacagcaacagcggcagcagcagcagcaacagcagcagaagaaggtcaagacccccataaaaaagcaagaagctaagaagaaggctaagtcagatcctggcatccagtccacatctcacaagcatcccgtcacaacagtgcacgacagactgtatggataccgtactctgccaggtcagaattcggacatgaaacagcagcagcagatggagaagggcaccacaagtaaacaggacagcactgagaggcctaaaatgaattactacgatcacgctgatttccaccatagcgtaaagagccctgaactctatgagactgaacctaccaacaaggatatctcagccccagttgatgccgttcctgaggctcaggccgctcgacagaaaaagatctcttttaatttctcagaaattatggccagtaccgggtggaattccgaattgaagttgctgcgcattctgcaagatacggatgacgaggacgaggaagaccagagtagtggtgccgagtag

SEQ ID NO: 98838 - DNA, 1386 bp, Artificial Sequence
  derived and/or modified sequence
atggatctgcctgatgagtcgcagtgggatgaaacaacttgtggactggctgtttgccagcatccgcagtgctgggccacaatccggcgtatcgagcggggccaccccaggattctcggatcttcctgcaagaccccgcttgacgcagaagataagctgccggtcctaacagtcgtcgatattctggatagcggattcgccgcacaccacctcccagagtgcactttcaccaaagcccactctctgctgtctcagtcttcaaaattctattctaaatttcacggcaggcccccaaaaggactgccagataaatcactcataaactgtacgaaccgcctaccaaagttccctgtgctcaatctgaacgagacccagttgccttgcccagaagatgttcgaaacatggtagtactatggataccagaggaaacagagatccatgtgagccagcacggcaaaaagaaaaggaaaaactcagccgtgaaaagtaaatctttcttaggcctctcaggaaaccagtctgcaggaacccgcgtgggaacaccaggtatgatcgtgcctcctcccacccctgttcaactgagcgaacagttctcatcagattttctccccctttgggcgcaatccgaggcactgccacaagacctccttaaggagctgttgcccggaggaaagcagactatgctgtgcccggagatgaagatcaagttagcgatgatgaaaaaaaacctgcccctggaaaaaaatcgccctgacagcgtaatttcttctaagatgttcctgtcaatacaccggctcacactggagcgccctgctttacggtatccggagcggttgaagaaactgcacaacctgaagactgaggggtaccgaaagcaacaacaacgccaacagcagcagcagcagcagcaaaagaaagtcaagacaccaatcaaaaagcaagaggcaaaaaagaaggccaagtccgaccctgggatccagagcacctcccataagcacccggtgacaactgtacatgaccgcctttatgggtaccggacattgcccggacaaaactcagacatgaagcagcagcaacagatggagaaagggactaccagcaagcaagacagtacagaaaggcctaaaatgaactattatgatcacgccgatttccaccactccgtcaaatcaccagagctttacgagacagagccgacaaacaaagatattagcgcacccgtggatgccgtgccagaggctcaggcggcccgccagaaaaagatttctttcaacttctccgagattatggcgtctactgggtggaatagcgagcttaagttacttcgtattttgcaggataccgacgatgaggatgaagaggatcagtccagtggcgctgagtag

SEQ ID NO: 98839 - DNA, 1386 bp, Artificial Sequence
  derived and/or modified sequence
atggacctgcctgatgagagccagtgggatgagaccacctgtggcctggccgtgtgccagcacccccagtgctgggccaccatcagaagaattgagcggggccacccccgcatcctgggcagcagctgcaagacccccctggatgctgaggacaagctgcctgtgctgactgtggtggacatcctggacagcggctttgctgcccaccacctgcctgaatgtaccttcaccaaggcccacagcctgctgagccagagcagcaagttctacagcaagttccacggccggccccccaagggcctgcctgacaagagcctcatcaactgcaccaaccggctgcccaagtttcctgtgctgaacctgaatgagacccagctgccctgcccagaagatgtgaggaacatggtggtgctgtggatccctgaggagacagagatccacgtgtcccagcacggcaagaagaagaggaagaacagcgctgtgaagagcaagagcttcctgggcctgagcggcaaccagagcgctggcaccagggtgggcaccccaggcatgattgtgcccccacccacccctgtgcagctgtctgagcagttcagcagtgacttcctgcccctgtgggcccagagcgaggccctgccccaggacctgctgaaggagctgctgcccggcggcaagcagaccatgctgtgcccagagatgaagatcaagctggccatgatgaagaagaacctgcccctggagaagaacagaccagattctgtcatcagcagcaagatgttcctgagcatccaccggctgaccctggagaggcctgccctgcgctacccagagcggctgaagaagctgcacaacctgaagacagagggctacaggaagcagcagcagaggcagcagcagcagcagcagcagcagaagaaggtgaagacccccatcaagaagcaggaggccaagaagaaggccaagagtgaccccggcatccagagcaccagccacaagcaccctgtgaccaccgtgcatgaccggctgtatggctaccgcaccctgcccggccagaacagcgacatgaagcagcagcagcagatggagaagggcaccaccagcaagcaggacagcacagagcggcccaagatgaactactatgaccatgctgacttccaccacagcgtgaagagccctgagctgtatgaaacagagcccaccaacaaggacatcagcgcccctgtggatgctgtgcctgaggcccaggccgcccggcagaagaagatctccttcaacttcagcgagatcatggccagcacaggctggaacagcgagctgaagctgctgcgcatcctgcaggacacagatgatgaagatgaggaggaccagagcagcggggctgagtag

SEQ ID NO: 98840 - DNA, 1386 bp, Artificial Sequence
  derived and/or modified sequence
atggacctgcccgacgagagccagtgggacgagaccacctgcggcttggccgtctgtcaacatccccagtgctgggcgaccataagacgaatcgagcgggggcatccccgcatcttggggagcagctgcaagacccccttggatgctgaggacaagctccccgtcctgacagtggtggatattctggactccggctttgctgctcatcaccttccggaatgcacttttaccaaagcacattcgctgctctctcagtctagcaaattttacagcaagtttcatggtagaccgccaaaagggctccccgacaaaagtctcatcaattgtactaataggctccctaagttccccgtgctgaatctcaatgagactcagttaccttgccctgaggatgtgcgtaacatggtggttctgtggatcccggaagaaactgaaatccatgtctcacagcatggcaagaaaaagcgaaagaattccgccgttaaaagtaaaagttttttgggactgtccggaaaccagtcagcggggacccgagtgggaacccccggtatgatcgttcctccccccactcccgtgcagttatctgaacagttcagctctgacttcttgcctctctgggcccagtctgaagccctcccgcaggatctgctaaaggagctcctcccaggcggcaagcagactatgctctgcccggaaatgaaaataaaactcgccatgatgaaaaagaatttacccctggagaagaacagaccagattccgttatctcgtctaagatgttcttgagtatacacagactcacactcgagcgacctgctctcaggtaccctgagcgactcaaaaagctccacaacctcaaaacggagggataccgcaagcagcaacagagacagcagcagcagcagcagcagcaaaagaaggtgaagactcccatcaagaagcaggaggcgaagaagaaagcaaaatctgatcccggaatccagtcaaccagccataaacatcctgtgacaaccgtacacgatcgcctgtacggttataggaccttacctgggcagaatagtgatatgaaacaacagcagcaaatggagaagggtacaacctctaagcaggacagtacagaacggcccaaaatgaattattacgatcacgcggattttcaccacagtgtgaagtcaccagaactgtacgaaacagagccgacaaacaaagacatttccgcacccgtggacgcggttcccgaagcacaggcggccagacagaaaaaaatctctttcaatttctcagaaatcatggccagtacaggctggaattctgagctgaagctgctgagaatactgcaggacacagacgatgaggatgaagaagaccagtcttccggtgctgaatag

SEQ ID NO: 98841 - DNA, 1386 bp, Artificial Sequence
  derived and/or modified sequence
atggacctgcccgacgagagccagtgggacgagaccacctgcggcttagccgtgtgtcagcatccccagtgctgggccactatcaggagaattgagaggggacaccctcgaattctggggagttcatgtaagacacccctcgacgctgaagataaactgccagtgttgacagtggtggacatactggacagcggattcgccgcacaccatctaccagagtgtactttcaccaaggcacattcccttctctcacaaagttcaaaattctattccaaattccatggcagacctccaaaaggcctgcccgacaagtccttgataaattgcactaatcggctcccaaagtttcccgtgctgaatctgaacgaaacacagctgccttgccctgaggatgtgcggaatatggtggtactatggatccccgaagaaactgaaatccacgtctcccaacacgggaaaaagaagaggaagaattctgctgtgaagagcaagagcttcctcggattaagcggtaatcagagtgccggcactagggtgggaacacccggaatgatagtgccacctcccaccccggtgcagctatctgaacagtttagcagtgattttttgcccctttgggcccagagcgaggctctccctcaggatcttctgaaggagctcctgcccggggggaaacagactatgctgtgccctgaaatgaaaatcaagctcgctatgatgaagaagaacctgcctctggaaaagaacagaccggactcagtcattagttctaagatgtttctgagcatccatcgcctgactttagaaagacccgcgttgagatacccagaaaggctcaagaagctccacaatctcaaaaccgagggctatcgcaaacaacagcagagacagcagcagcaacagcaacagcaaaaaaaagtcaagaccccaatcaagaagcaggaggcgaaaaagaaagccaagtctgatcctggcattcagagtactagtcataaacacccagttacaaccgtacacgaccgactctatggttataggacactgcccggccagaatagtgatatgaagcaacagcagcagatggaaaaggggaccacctccaagcaggattcaacagagcgaccaaaaatgaactactatgatcatgccgactttcaccactcagtcaagagcccagaactgtatgaaactgaacctactaataaagatatatctgcacccgtcgacgctgtgcctgaagctcaggccgctcgccagaaaaagatctccttcaacttcagcgagataatggctagtactggctggaatagtgagctcaaactacttcgcatattacaggacaccgatgatgaagacgaggaagaccagagctccggcgccgagtag

SEQ ID NO: 98842 - DNA, 1386 bp, Artificial Sequence
  derived and/or modified sequence
atggacctgcccgacgagtcccaatgggatgaaaccacatgtggattggccgtctgccaacacccccagtgttgggccacaatcaggcgcatcgagcggggtcaccctcgcattctcggcagctcctgtaagacacccctcgacgccgaagataaattaccagttcttacagtggtggacatccttgattccggtttcgcagcccaccacctgcctgagtgtaccttcactaaggcccactccctcctctcacaaagctctaagttttattcgaagttccacggacgtccccctaagggattgccagacaagagccttattaactgtactaatcgtctgccaaagttccccgtgctaaacctgaatgagacccaactgccttgtcccgaagatgtgaggaacatggtggtgctctggattcctgaagaaacagagatacatgtctcacaacacggcaaaaaaaagaggaaaaattccgccgtgaagtccaagagcttccttggcctgagcggcaaccagagcgcgggaactagggtgggcacccccggaatgatcgtgcccccaccgacaccagttcaactatctgagcaatttagctccgattttctgccattgtgggcccagagcgaggccctgccccaggatttattgaaggagcttcttccgggagggaagcagacaatgctatgtcccgaaatgaagataaagctggctatgatgaagaagaacctgcctctggagaaaaacagacccgacagcgttatttcatccaagatgtttctgtcaatccatcggctgacacttgaaaggcccgctcttagataccccgagcggttgaaaaaactgcataaccttaaaacggagggctatagaaagcagcagcagcggcagcagcagcagcagcagcagcagaagaaagtgaaaacaccgatcaagaaacaagaggctaaaaaaaaagcaaaatctgaccctggaatacaaagcacatctcataaacatcctgtgacaaccgtgcatgatagactctacggataccgaacgttgcccggacagaacagcgacatgaagcagcaacaacaaatggagaaggggaccacctctaagcaggactctaccgagagaccaaaaatgaactactatgatcacgccgactttcatcactctgttaagagcccagaactgtacgagaccgagcctacgaataaggatatctctgctcctgtagacgcagtcccagaggcacaggcagcgcgtcagaagaagattagcttcaatttctctgaaattatggcctctacaggctggaattctgaactgaagttgctgaggattctgcaggacactgatgatgaggatgaggaggatcagtcgtctggtgcggagtag

SEQ ID NO: 98843 - DNA, 1386 bp, Artificial Sequence
  derived and/or modified sequence
atggatctcccagatgagtcccaatgggacgagaccacctgcggcctggctgtttgccagcatccccagtgctgggccacaataagaagaatagaacggggtcatcctaggatactgggttccagctgtaaaacccctctggacgccgaagataagttgcccgtgctgaccgtcgtagatatcttggatagtggcttcgccgctcaccatttacctgagtgtacatttaccaaagcacactccctactgagtcagtcctcaaagttttatagcaaatttcatgggaggccccctaaagggctgccagataagagtctcattaattgcactaatcggctcccgaaattccctgtactcaacctcaatgagacgcagttgccttgtcccgaggatgtgcggaacatggtcgtgctctggattccggaagagacagaaatacacgtgagtcagcacggaaagaagaagaggaagaactctgctgtcaagagtaagtctttcctgggtctgtctggtaatcagagtgcagggacacgtgtgggcaccccgggaatgattgttccccctccaactcctgtacagctgagtgagcagtttagctcggactttttacccctttgggcacaatcagaggcgttaccccaggatctactcaaagaactgcttcccggtgggaaacagaccatgctgtgcccggaaatgaaaattaagctcgccatgatgaagaagaatttgccccttgagaaaaaccgcccagactccgtgatttcaagcaagatgtttctgtccatccaccgcctcaccttggagcgccctgccttgagatatccggagcgactgaagaagctccacaatcttaagaccgagggttatagaaagcagcagcagcgtcagcaacagcaacaacagcagcagaagaaagtcaagacccctataaaaaagcaggaggccaagaaaaaggccaaatcagatcccggtattcaatctacctctcacaaacacccagtgaccaccgtacacgaccgcctatacggttataggaccttgcccggtcagaacagtgacatgaagcaacagcagcagatggaaaagggtacgacttcaaagcaggactccacagaacgacctaagatgaactactacgaccatgctgactttcatcatagcgtgaaatcgccagagctttacgagactgaacccacaaataaggacatctcagccccagtagacgcggtgcccgaggcccaggcggcaaggcagaaaaagatcagctttaacttctcagaaatcatggcatctaccggctggaactccgaactgaagcttcttagaattctgcaggatacagacgatgaagatgaggaagatcagtcctccggtgcggagtag

SEQ ID NO: 98844 - DNA, 2130 bp, Artificial Sequence
  derived and/or modified sequence
cctttaggacccgaggcaggctctgggcccgccgggtccgttaatctcaccgcgccgcaaggggccacgttttaccacttgatttagcaaccctaagcggtttggaatctgctttgctctcacaggacctcagcccgtcgtgatcagattctcccactttcttttttctttcctggaatggagtgggcagtctttttccatctctaccgaagttgatgttcatttttaatcttttcgcccctcacgcttttgtaataatggtactaagactgagtgttatttagattttattgttgttgtttgtgtttaacgcgaactatttaggcagcccagggataatgctggccatatagagatgcgcctgattaggtctcaggagtcaattcggactgggcagagcactagaatgctgcagggttggcctttggcctaaaccatttctagctatggacttgccagatgagagccagtgggacgaaaccacctgtggcttggctgtttgtcagcacccacaatgctgggcaactatccgccgcattgagaggggccatcctcgaatcctcggctcatcctgcaaaactcccctggatgctgaagataaactcccagtgctcaccgtggtagacatcttagattccggctttgcagctcatcatttaccagaatgtacctttactaaggcccattctttattgtctcagagttcaaagttttactccaaatttcatggcaggcctccgaagggtttacctgacaaaagtttgatcaactgtactaacagacttcccaaatttccagtgttgaatttgaatgagacgcaacttccctgccctgaagatgttagaaatatggttgtattgtggatcccagaagaaacagagatacatgtgagccagcatgggaagaagaaaagaaagaactcggcagtgaaaagcaagtcatttctgggtctctctggaaatcagtccgcaggaacacgagtaggaacaccagggatgatcgtgcctcccccaaccccagtgcaattgtctgaacaattcagttcagatttcctacctctctgggctcaatccgaagcgttacctcaggatctactgaaggaacttttgccaggtggaaagcaaaccatgctctgtccagagatgaagataaaattggccatgatgaaaaagaatcttcccttggaaaagaaccgacctgacagtgtgatttcttctaagatgtttctatctatacaccgcctcaccctggaaagaccagcactgcgatatcctgaacgtttgaagaaattacataacctgaagacagaaggttacaggaaacagcagcagcggcagcagcagcagcagcagcaacagaagaaggtgaaaacacctattaagaaacaggaggctaaaaagaaagccaagagtgatccagggatccagagcacttcacataaacatccagttaccaccgttcatgaccgtctctatggttacagaactctgccaggtcagaacagtgacatgaagcagcagcagcagatggaaaaaggaaccacttcgaaacaggattccacggagagaccaaagatgaactactatgaccatgcggatttccaccacagtgtaaaaagtcctgaattgtatgaaacagaacccactaacaaggacattagtgctccagtggacgctgtgccagaagcccaggctgccaggcaaaagaagatctcctttaacttttcagaaattatggctagcacaggctggaactctgagctcaaactacttaggattcttcaggacactgatgatgaggatgaggaggaccagtcctctggggcagagtgagaagcctctggaggaatagactgaaggcatcccctggggcagccgtgttccaaagcgggatggctggtatcctgagggcagcaacgtttcacataagggcaagaggagaggggcttctgctctctggagcctttaccagggcctgagctctgagcttagggattccattttctttgttcacctctacttgcctctaaaataaatgtaggagaaaaatccccagcctttttaaatttagattatttcctttccattagggtcagaataattttggtgattaaacacaactgcttttcaa

SEQ ID NO: 98845 - DNA, 2049 bp, Artificial Sequence
  derived and/or modified sequence
gcggccgggcgcagcgcgtgggagacgaaggcgtggctgactcggcggggcggatccctttaggacccgaggcaggctctgggcccgccgggtccgttaatctcaccgcgccgcaaggggccacgttttaccacttgatttagcaaccctaagcggtttggaatctgctttgctctcacaggacctcagcccgtcgtgatcagattctcccactttcttttttctttcctggaatggagtgggcagtctttttccatctctaccgaagttgatgttcatttttaatcttttcgcccctcacgcttttgtaataatgagcactagaatgctgcagggttggcctttggcctaaaccatttctagctatggacttgccagatgagagccagtgggacgaaaccacctgtggcttggctgtttgtcagcacccacaatgctgggcaactatccgccgcattgagaggggccatcctcgaatcctcggctcatcctgcaaaactcccctggatgctgaagataaactcccagtgctcaccgtggtagacatcttagattccggctttgcagctcatcatttaccagaatgtacctttactaaggcccattctttattgtctcagagttcaaagttttactccaaatttcatggcaggcctccgaagggtttacctgacaaaagtttgatcaactgtactaacagacttcccaaatttccagtgttgaatttgaatgagacgcaacttccctgccctgaagatgttagaaatatggttgtattgtggatcccagaagaaacagagatacatgtgagccagcatgggaagaagaaaagaaagaactcggcagtgaaaagcaagtcatttctgggtctctctggaaatcagtccgcaggaacacgagtaggaacaccagggatgatcgtgcctcccccaaccccagtgcaattgtctgaacaattcagttcagatttcctacctctctgggctcaatccgaagcgttacctcaggatctactgaaggaacttttgccaggtggaaagcaaaccatgctctgtccagagatgaagataaaattggccatgatgaaaaagaatcttcccttggaaaagaaccgacctgacagtgtgatttcttctaagatgtttctatctatacaccgcctcaccctggaaagaccagcactgcgatatcctgaacgtttgaagaaattacataacctgaagacagaaggttacaggaaacagcagcagcggcagcagcagcagcagcagcaacagaagaaggtgaaaacacctattaagaaacaggaggctaaaaagaaagccaagagtgatccagggatccagagcacttcacataaacatccagttaccaccgttcatgaccgtctctatggttacagaactctgccaggtcagaacagtgacatgaagcagcagcagcagatggaaaaaggaaccacttcgaaacaggattccacggagagaccaaagatgaactactatgaccatgcggatttccaccacagtgtaaaaagtcctgaattgtatgaaacagaacccactaacaaggacattagtgctccagtggacgctgtgccagaagcccaggctgccaggcaaaagaagatctcctttaacttttcagaaattatggctagcacaggctggaactctgagctcaaactacttaggattcttcaggacactgatgatgaggatgaggaggaccagtcctctggggcagagtgagaagcctctggaggaatagactgaaggcatcccctggggcagccgtgttccaaagcgggatggctggtatcctgagggcagcaacgtttcacataagggcaagaggagaggggcttctgctctctggagcctttaccagggcctgagctctgagcttagggattccattttctttgttcacctctacttgcctctaaaataaatgtaggagaaaaatccccagcctttttaaatttagattatttcctttccattagggtcagaataattttggtgattaaacacaactgcttttcaa

SEQ ID NO: 98846 - protein, 102 aa, Artificial Sequence
  derived and/or modified sequence
MGAEWELGAEAGGSLLLCAALLAAGCALGLRLGRGQGAADRGALIWLCYDALVHFALAFPADHPVRVRAVWLLDDLPPRVAHQKPQPQHQQLAVLLALPVFF

SEQ ID NO: 98847 - protein, 128 aa, Artificial Sequence
  derived and/or modified sequence
MGAEWELGAEAGGSLLLCAALLAAGCALGLRLGRGQGAADRGALIWLCYDALVHFALEGPFVYLSLVGNVANSDGLIASLSDARWVYFDPTIVSVEILTVALDGSLALFLIYAIVKEKYYRDRVAWGE

SEQ ID NO: 98848 - DNA, 261 bp, Artificial Sequence
  derived and/or modified sequence
atgggcgccgagtgggagctgggcgccgaggccggcggcagcctgctgctgtgcgccgccctgctggccgccggctgcgccctgggcctgagactgggcagaggccagggcgccgccgacagaggcgccctgatctggctgtgctacgacgccctggtgcacttcgccctggagagagtgggcaagaccaccaaccaggagagcgccggcgtgctgggcagcaccgagtggaacttcaagaacaccgacaagctgctgtag

SEQ ID NO: 98849 - DNA, 261 bp, Artificial Sequence
  derived and/or modified sequence
atgggggctgagtgggaactgggggctgaggctggaggctccttgctgctgtgtgcagccctgttggctgctgggtgtgccctcggcctgcgcctcgggaggggccagggtgctgccgacagaggtgccttaatttggctgtgttacgacgccctagttcacttcgcgcttgagagggtaggtaaaaccactaatcaggaatctgcaggcgtgctggggagtaccgaatggaactttaagaataccgataaactactttag

SEQ ID NO: 98850 - DNA, 261 bp, Artificial Sequence
  derived and/or modified sequence
atgggcgctgagtgggagctgggcgctgaggccggcggcagcctgctgctgtgtgccgccctgctggccgccggctgtgccctgggcctgcggctgggccggggccagggcgctgctgacagaggagccctgatctggctgtgctatgatgccctggtgcactttgccctggagcgggtgggcaagaccaccaaccaggagagcgctggggtgctgggcagcacagagtggaacttcaagaacacagacaagctgctgtag

SEQ ID NO: 98851 - DNA, 261 bp, Artificial Sequence
  derived and/or modified sequence
atgggcgccgagtgggagctgggcgccgaggccggcggcagcctgctgctctgtgctgcactcctggccgcaggctgtgccctcggactccgtctggggcgcggacagggagcggccgacaggggagcattgatatggctgtgttacgacgccctagttcacttcgccctcgagcgagtcggcaagacaaccaaccaggaatctgcgggtgtgctggggagcacagagtggaacttcaagaacacagacaagctgttgtag

SEQ ID NO: 98852 - DNA, 261 bp, Artificial Sequence
  derived and/or modified sequence
atgggcgctgaatgggaactgggggcagaggccggaggctccctgcttctttgcgcggcattgcttgccgcagggtgcgctctgggtttaagactgggacgcggtcagggggcagccgaccgcggagccctcatttggctgtgttacgacgcactggtgcacttcgcactggaacgcgtggggaaaacgaccaaccaggaatcagcgggagttctgggctcaacagaatggaattttaagaataccgacaagttgttgtag

SEQ ID NO: 98853 - DNA, 309 bp, Artificial Sequence
  derived and/or modified sequence
atgggcgccgagtgggagctgggcgccgaggccggcggcagcctgctgctgtgcgccgccctgctggccgccggctgcgccctgggcctgagactgggcagaggccagggcgccgccgacagaggcgccctgatctggctgtgctacgacgccctggtgcacttcgccctggccttccccgccgaccaccccgtgagagtgagagccgtgtggctgctggacgacctgccccccagagtggcccaccagaagccccagccccagcaccagcagctggccgtgctgctggccctgcccgtgttcttctag

SEQ ID NO: 98854 - DNA, 387 bp, Artificial Sequence
  derived and/or modified sequence
atgggcgccgagtgggagctgggcgccgaggccggcggcagcctgctgctgtgcgccgccctgctggccgccggctgcgccctgggcctgagactgggcagaggccagggcgccgccgacagaggcgccctgatctggctgtgctacgacgccctggtgcacttcgccctggagggccccttcgtgtacctgagcctggtgggcaacgtggccaacagcgacggcctgatcgccagcctgagcgacgccagatgggtgtacttcgaccccaccatcgtgagcgtggagatcctgaccgtggccctggacggcagcctggccctgttcctgatctacgccatcgtgaaggagaagtactacagagacagagtggcctggggcgagtag

SEQ ID NO: 98855 - DNA, 309 bp, Artificial Sequence
  derived and/or modified sequence
atgggcgctgagtgggaactgggcgcagaggctggagggtccctgcttctttgcgcagccttgcttgcggccgggtgcgccctcggcctaagattgggccgcggccagggggcagcagatcgcggtgccttgatttggctgtgctatgacgcgctcgttcacttcgccttggcttttcccgccgatcatcccgtgagagtgagagccgtctggctcctagatgacttgcccccacgagtggcacaccagaaaccacagcctcagcaccagcaattagccgtgctcctggccctccccgttttcttctag

SEQ ID NO: 98856 - DNA, 387 bp, Artificial Sequence
  derived and/or modified sequence
atgggagctgaatgggaactgggagcggaggccggtggctcccttctgttgtgtgccgcactgctcgccgctggctgcgccctagggctacgtcttgggcggggccaaggcgcagccgaccggggggctctcatctggctttgctacgatgccctggtgcacttcgctctggaagggccgtttgtctacctgtccctcgtgggaaacgtagccaactccgacggcctcatagcctcactctcggatgcgcgatgggtatatttcgacccaacaatcgtgtccgtggagatccttaccgtggcattggacggttcgctggctctgttccttatctacgccatcgtgaaagagaagtattatcgcgatcgcgtggcatggggcgaatag

SEQ ID NO: 98857 - DNA, 438 bp, Artificial Sequence
  derived and/or modified sequence
tgctttcctctgccgcatggtcctgggccgttggcgtcggaagcctgaagcatgggcgctgagtgggagctgggggccgaggctggcggttcgctgctgctgtgcgccgcgctgctggcggcgggctgcgccctgggcctgcgcctgggccgcgggcagggggcggcggaccgcggggcgctcatctggctctgctacgacgcgctggtgcacttcgcgctggaaggcccttttgtctacttgtctttagtaggaaacgttgcaaattccgatggcttgattgcttctttatctgatgcaagatgggtttattttgatccaaccattgtgtctgtggaaattctgaccgtcgccctggatgggtctctggcattgttcctcatttatgccatagtcaaagaaaaatattaccgggacagagtggcctggggtgaatag

SEQ ID NO: 98858 - DNA, 309 bp, Artificial Sequence
  derived and/or modified sequence
atgggcgctgagtgggagctgggcgctgaggccggcggcagcctgctgctgtgtgccgccctgctggccgccggctgtgccctgggcctgcggctgggccggggccagggcgctgctgacagaggagccctgatctggctgtgctatgatgccctggtgcactttgccctggccttccctgctgaccaccctgtgcgggtgcgggctgtgtggctgctggatgacctgcccccccgggtggcccaccagaagccccagccccagcaccagcagctggccgtgctgctggccctgcctgtgttcttctag

SEQ ID NO: 98859 - DNA, 387 bp, Artificial Sequence
  derived and/or modified sequence
atgggcgctgagtgggagctgggcgctgaggccggcggcagcctgctgctgtgtgccgccctgctggccgccggctgtgccctgggcctgcggctgggccggggccagggcgctgctgacagaggagccctgatctggctgtgctatgatgccctggtgcactttgccctggagggcccctttgtgtacctgagcctggtgggcaatgtggccaacagtgatggcctgattgccagcctgagtgatgcccgctgggtgtactttgaccccaccatcgtgtctgtggagatcctgactgtggccctggatggcagcctggccctcttcctgatctatgccatcgtgaaggagaagtactacagagacagagtggcctggggcgagtag

SEQ ID NO: 98860 - DNA, 309 bp, Artificial Sequence
  derived and/or modified sequence
atgggcgccgagtgggagctgggcgccgaggccggcggcagcctgctactgtgtgcagcactcctggccgctggatgcgctttaggtctgagattagggaggggacaaggagccgctgacaggggagctctgatttggctttgctacgatgcactggtgcactttgccctcgcatttcctgctgatcacccagtaagggtaagagccgtgtggctactcgatgatttgccacccagggttgcccaccaaaagccgcagccccagcaccaacagctcgccgtgttactcgctcttcccgtctttttttag

SEQ ID NO: 98861 - DNA, 387 bp, Artificial Sequence
  derived and/or modified sequence
atgggcgccgagtgggagctgggcgccgaggccggcggcagcctgctgctgtgcgccgctctgttagccgcaggctgcgccttgggcctgaggttaggcagaggacagggggcagcagaccggggagctctgatttggctgtgctatgatgccttagtgcacttcgccctggagggacccttcgtttacctctctctcgtgggcaacgtggccaattctgatgggctcattgcttcgctttctgatgcccggtgggtctatttcgaccccactatcgtgtcagtcgagatactgacagtcgctctggacggatcccttgctctatttctaatctatgctatcgtcaaggaaaaatactaccgcgacagagtggcctggggcgagtag

SEQ ID NO: 98862 - DNA, 309 bp, Artificial Sequence
  derived and/or modified sequence
atgggtgccgagtgggagctgggggctgaggctggaggtagcctgctgctgtgtgcggctctgctggcagccggttgtgctcttggtcttagactgggacgcggacaaggggcagccgatcgcggagccctaatatggctatgttacgatgcactggttcacttcgctctggcctttcctgccgaccatccagtaagggtgcgggctgtatggctgttggatgacctcccaccgagggttgcccaccagaagccacagccccagcatcagcagcttgcagtgctactggccttacccgtgtttttttag

SEQ ID NO: 98863 - DNA, 387 bp, Artificial Sequence
  derived and/or modified sequence
atgggcgcagaatgggaactcggcgcagaagccggaggatccctcctcttgtgcgccgctctgctggcggcaggatgcgctctcggactaaggctcgggagaggccagggcgcagcagaccgtggggcattaatttggctctgttatgacgctctcgtgcatttcgcgcttgagggaccatttgtctacttatctcttgtgggaaacgttgctaattccgacggtcttattgccagcctctcggatgcccgatgggtatattttgatcctacaattgtctcagttgaaattcttaccgtcgctctcgatggttcccttgcgctgttcctgatttacgcaattgtcaaggagaagtattatcgtgatcgtgtagcctggggtgaatag

SEQ ID NO: 98864 - protein, 470 aa, Artificial Sequence
  derived and/or modified sequence
MKRSVAVWLLVGLSLGVPQFGKGDICDPNPCENGGICLPGLADGSFSCECPDGFTDPNCSSVVEVGPCTPNPCHNGGTCEISEAYRGDTFIGYVCKCPRGFNGIHCQHNINECEVEPCKNGGICTDLVANYSCECPGEFMGRNCQYKCSGPLGIEGGIISNQQITASSTHRALFGLQKWYPYYARLNKKGLINAWTAAENDRWPWIQINLQRKMRVTGVITQGAKRIGSPEYIKSYKIAYSNDGKTWAMYKVKGTNEDMVFRGNIDNNTPYANSFTPPIKAQYVRLYPQVCRRHCTLRMELLGCELSGCSEPLGMKSGHIQDYQITASSIFRTLNMDMFTWEPRKARLDKQGKVNAWTSGHNDQSQWLQVDLLVPTKVTGIITQGAKDFGHVQFVGSYKLAYSNDGEHWTVYQDEKQRKDKVFQGNFDNDTHRKNVIDPPIYARHIRILPWSWYGRITLRSELLGCTEEE

SEQ ID NO: 98865 - DNA, 1413 bp, Artificial Sequence
  derived and/or modified sequence
atgaaacgtagcgtggctgtgtggttattggttggcctgtccttaggcgtaccccaattcgggaaaggagacatatgcgatcccaatccttgtgagaacggtggtatctgcctgccagggctggctgacggctctttttcctgtgagtgccctgatggtttcactgatcctaattgtagctctgtggttgaggtggggccatgcacaccaaatccctgccataatggcggaacatgcgaaatctcagaggcttaccgaggagatacgttcattggttatgtgtgtaagtgcccccgaggttttaatggcatccattgccaacataatattaacgaatgtgaagtcgaaccgtgtaagaatggcggtatctgcaccgacctagttgctaactacagctgtgagtgtcctggcgaattcatggggaggaattgccagtataagtgcagtggccctctagggattgagggcggaattatcagtaatcaacagattacagcatcctccacccatcgcgcactgtttggactccagaagtggtacccttactatgcgcgactgaacaaaaaaggtctcatcaacgcatggaccgccgcagagaacgaccgctggccatggatccagatcaatctccagagaaagatgcgagtgactggtgtcattacccagggggcaaaacgcattggcagcccggagtacataaaatcctacaaaatcgcttacagtaacgatgggaagacttgggccatgtacaaagtcaaagggaccaatgaggacatggtgttccgaggcaacatcgataacaatacaccctacgcgaactcttttacacccccaatcaaggcacaatatgttaggttgtatccacaggtctgccgtcggcactgtaccctgcgcatggaactcttgggatgcgagctaagcgggtgttccgagcccctgggtatgaagtccggccacatccaggattaccagattacggctagcagcatattccgcactctgaatatggacatgtttacctgggagcctaggaaggccagacttgacaagcaagggaaagtcaatgcttggacgtctgggcacaacgatcaatcacagtggttgcaggtggacctgttagtgcctaccaaagtcacgggaattatcactcagggagctaaggacttcggccacgtacagttcgtcgggagttataagctcgcctactccaacgacggggagcattggactgtgtaccaggatgaaaagcagaggaaagataaagtgttccagggcaattttgataatgacactcaccgcaaaaacgtcatagatccgccaatctacgcgcgacacattcgcatcctgccttggagttggtatggcagaatcacgctgcggtcggaactcttgggttgcacagaagaggagtag

SEQ ID NO: 98866 - DNA, 1413 bp, Artificial Sequence
  derived and/or modified sequence
atgaagagatcggtcgcagtctggctgctggtgggcctgagtctgggtgtgcctcagtttggtaagggagacatatgcgacccaaatccttgcgagaatggcggcatatgtttgccgggtcttgccgatggatccttttcttgcgaatgcccagatggttttactgatccaaactgtagctccgttgtcgaagtgggcccctgcactcccaacccttgtcataatggaggcacatgcgaaattagcgaagcttacagaggggacacatttattggctacgtctgcaagtgtccccgaggtttcaatggaatccattgtcagcacaatatcaacgaatgcgaagtcgaaccctgtaaaaatggtggcatatgtacggatctagtagctaattattcgtgtgagtgccctggagaatttatgggccgaaattgccaatacaaatgtagtggccctctgggcatagagggcggtattataagcaaccaacaaattacagcttcgagcacacacagggcactgttcggtttgcagaagtggtatccctactacgcaagactcaacaaaaaaggcctgataaatgcttggacagccgccgagaatgacaggtggccttggatacaaataaatctgcagaggaaaatgagggtaactggagtcattacccagggagctaagcgcataggaagccccgaatacatcaaatcttataagatagcctacagcaacgatgggaaaacttgggctatgtacaaagtgaagggcacaaatgaggatatggtctttcgagggaatatcgataataacactccatatgccaatagctttaccccccctattaaggcccagtatgtgcggttgtatcctcaggtttgtagacggcattgtactctgcgtatggagctgttggggtgtgagttatccggctgtagcgagcctcttggcatgaaatctggtcacatccaagattaccaaattaccgcatcttccatattccggaccctgaacatggatatgtttacctgggagccccgtaaggcaagactcgacaaacaagggaaagtaaatgcatggaccagtgggcacaatgaccaatctcaatggctacaggttgatctattggtccccaccaaggttacggggattattacacagggggcaaaagactttgggcacgtgcagtttgtgggtagctataagctggcatactcaaatgacggcgaacattggactgtctaccaagatgaaaagcagcgcaaggataaagtgttccaagggaattttgataatgatacacacagaaagaatgttatcgatccaccaatttatgcccgacatattagaattctgccttggagctggtatgggagaattacgctacgctccgaactgctgggttgcaccgaggaggaatag

SEQ ID NO: 98867 - DNA, 1413 bp, Artificial Sequence
  derived and/or modified sequence
atgaagcgttcagtggcagtatggttattagttggcctgtctctaggtgtgcctcagtttggtaaaggcgacatatgtgatcccaacccttgtgaaaatggtggtatatgcctgcccggcctggctgacggaagcttctcctgcgagtgcccggatggatttaccgatcctaactgcagcagcgttgtggaggtcggaccatgcactccaaacccttgtcacaacggcggtacttgcgaaatatcagaggcgtaccgcggcgatactttcattggctatgtctgcaagtgcccaagggggttcaatggaatccattgccagcataacatcaacgaatgtgaggtcgaaccttgtaagaatgggggaatttgcacagacctcgtcgctaattactcctgcgaatgcccaggagagtttatgggaaggaattgtcagtacaaatgcagcggacctctgggaattgaaggcggcatcattagtaaccagcagatcacagccagcagcacacacagggcacttttcggcttgcagaaatggtatccctactatgctaggctgaacaaaaagggactgattaacgcatggacagctgccgaaaacgacagatggccatggattcagatcaatttgcagcggaagatgcgcgtgaccggtgttatcacacaaggtgcgaagagaataggatcaccagagtacatcaaatcttataaaattgcctatagtaatgatggcaaaacctgggctatgtacaaagtcaaggggaccaatgaggacatggtgtttagaggaaatatcgacaacaatacgccatacgccaattcctttacacctcccattaaggcacaatacgtccgcctgtacccacaagtctgtagacgacattgcactctccggatggagctcttgggctgtgaactgtctggatgctcagaacctcttgggatgaaaagcggtcacattcaagattatcagataaccgctagttccatttttaggaccctcaatatggacatgtttacatgggaaccgcgaaaagcacgcttggacaagcaggggaaagtcaacgcttggacctctggccacaatgatcagagtcagtggttacaggtggacctgttagtgcctactaaagtcaccgggatcattactcaaggggcaaaagactttggacacgtacagttcgtcggcagctataagttggcctactcaaatgacggcgagcattggactgtgtaccaggatgaaaagcagcgaaaggataaagtgttccaaggtaattttgacaacgatactcatagaaagaacgttatcgacccacctatctacgctagacacatacgaattttaccctggtcttggtacgggagaataacactgcggagtgagttactggggtgtacagaggaggaatag

SEQ ID NO: 98868 - DNA, 1413 bp, Artificial Sequence
  derived and/or modified sequence
atgaagagaagcgtggccgtgtggctgctggtgggcctgagcctgggcgtgccccagttcggcaagggcgacatctgcgaccccaacccctgcgagaacggcggcatctgcctgcccggcctggccgacggcagcttcagctgcgagtgccccgacggcttcaccgaccccaactgcagcagcgtggtggaggtgggcccctgcacccccaacccctgccacaacggcggcacctgcgagatcagcgaggcctacagaggcgacaccttcatcggctacgtgtgcaagtgccccagaggcttcaacggcatccactgccagcacaacatcaacgagtgcgaggtggagccctgcaagaacggcggcatctgcaccgacctggtggccaactacagctgcgagtgccccggcgagttcatgggcagaaactgccagtacaagtgcagcggccccctgggcatcgagggcggcatcatcagcaaccagcagatcaccgccagcagcacccacagagccctgttcggcctgcagaagtggtacccctactacgccagactgaacaagaagggcctgatcaacgcctggaccgccgccgagaacgacagatggccctggatccagatcaacctgcagagaaagatgagagtgaccggcgtgatcacccagggcgccaagagaatcggcagccccgagtacatcaagagctacaagatcgcctacagcaacgacggcaagacctgggccatgtacaaggtgaagggcaccaacgaggacatggtgttcagaggcaacatcgacaacaacaccccctacgccaacagcttcaccccccccatcaaggcccagtacgtgagactgtacccccaggtgtgcagaagacactgcaccctgagaatggagctgctgggctgcgagctgagcggctgcagcgagcccctgggcatgaagagcggccacatccaggactaccagatcaccgccagcagcatcttcagaaccctgaacatggacatgttcacctgggagcccagaaaggccagactggacaagcagggcaaggtgaacgcctggaccagcggccacaacgaccagagccagtggctgcaggtggacctgctggtgcccaccaaggtgaccggcatcatcacccagggcgccaaggacttcggccacgtgcagttcgtgggcagctacaagctggcctacagcaacgacggcgagcactggaccgtgtaccaggacgagaagcagagaaaggacaaggtgttccagggcaacttcgacaacgacacccacagaaagaacgtgatcgacccccccatctacgccagacacatcagaatcctgccctggagctggtacggcagaatcaccctgagaagcgagctgctgggctgcaccgaggaggagtag

SEQ ID NO: 98869 - DNA, 1413 bp, Artificial Sequence
  derived and/or modified sequence
atgaaacgaagcgtggctgtctggctcctggtggggttatccctcggagtgccccaattcggaaagggcgatatctgcgaccctaatccttgcgagaatggggggatctgtctgccaggtctggcagatgggtcgttctcttgtgaatgtcctgatggtttcaccgatcccaattgctccagcgtggtggaggtggggccgtgcacaccgaatccatgtcacaacggcgggacttgtgagatctccgaagcgtatcgcggtgatacttttatagggtatgtctgtaaatgccctaggggatttaatgggatccactgccagcacaatatcaatgagtgtgaagtggaaccttgtaaaaatggcggcatctgcactgacctggtggcaaactatagttgcgagtgcccaggagagttcatgggcaggaattgtcagtataagtgtagcggccccctgggaattgagggaggtatcatcagcaaccaacaaataactgcttctagcactcaccgggctttatttggcctgcagaagtggtatccctactacgcccggttaaacaagaaaggactaatcaatgcttggactgcggcagagaacgacaggtggccgtggatccagatcaatctacagcgcaagatgcgggtgaccggggtcattacccaaggagcaaaacggattgggagtccagaatatatcaagtcctataagatagcttactccaacgacggaaaaacatgggcaatgtacaaagtcaaaggcaccaacgaggatatggtgtttcgcggcaacattgataataacaccccttacgcgaatagtttcacacccccaattaaggcacaatacgtccggctttaccctcaggtgtgtaggcggcattgtactctgcgcatggaactgttagggtgcgaactttctgggtgctcagagccattgggaatgaaatcaggccacattcaagattaccagataacagcctcttccatattccggactctcaacatggatatgttcacttgggagccaagaaaggccaggcttgacaagcagggaaaggttaacgcatggacctcgggccacaacgatcagtcacagtggctacaagtagacctccttgtgcccactaaggtaacgggtatcatcacgcagggtgctaaggatttcggtcacgttcagtttgttgggagctacaagctggcctactctaacgacggggaacattggactgtctatcaggatgagaagcagcgcaaggataaggtgtttcaggggaattttgacaatgacacacaccgcaagaatgtcatcgatccccccatatatgccaggcacatcagaatccttccttggagttggtacggtcgtatcacgctgagatccgaactactcgggtgcacggaagaggaatag

SEQ ID NO: 98870 - DNA, 1413 bp, Artificial Sequence
  derived and/or modified sequence
atgaagaggtctgtggccgtgtggctgctggtgggcctgagcctgggcgtgccccagtttgggaagggggacatctgtgaccccaacccctgtgaaaatggaggcatctgcctgcccggcctggctgatggcagcttcagctgtgaatgtccagatggcttcacagaccccaactgcagctctgtggtggaggtgggcccctgcacccccaacccctgccacaatggaggcacctgtgagatcagcgaggcctacagaggagacaccttcatcggctacgtgtgcaagtgcccccggggcttcaacggcatccactgccagcacaacatcaatgaatgtgaggtggagccctgcaagaatggaggcatctgcacagacctggtggccaactacagctgtgagtgccctggagagttcatgggcaggaactgccagtacaagtgcagcggccccctgggcatcgagggcggcatcatcagcaaccagcagatcacagccagcagcacccaccgggccctgtttggcctgcagaagtggtacccctactatgcccggctgaacaagaagggcctcatcaatgcctggacagctgctgaaaatgaccgctggccctggatccagatcaacctgcagaggaagatgagggtgactggagtcatcacccagggcgccaagagaattggcagccctgagtacatcaagagctacaagatcgcctacagcaatgatggcaagacctgggccatgtacaaggtgaagggcaccaatgaagacatggtgttccggggcaacatcgacaacaacaccccctatgccaacagcttcaccccacccatcaaggcccagtatgtgcggctgtacccccaggtgtgccgccgccactgcaccctgaggatggagctgctgggctgtgagctgagcggctgcagcgagcccctgggcatgaagagcggccacatccaggactaccagatcacagccagcagcatcttccgcaccctgaacatggacatgttcacctgggagcccaggaaggcccggctggacaagcagggcaaggtgaatgcctggaccagcggccacaatgaccagagccagtggctgcaggtggacctgctggtgcccaccaaggtgacaggcatcatcacccagggcgccaaggactttggacatgtgcagtttgtgggcagctacaagctggcctacagcaatgatggagagcactggacagtgtaccaggatgagaagcagaggaaggacaaggtgttccagggcaactttgacaatgacacccacaggaagaatgtgattgatcctcccatctatgcccggcacatccgcatcctgccctggagctggtacggccgcatcaccctgcggtctgagctgctgggctgcacagaggaggagtag

SEQ ID NO: 98871 - DNA, 4244 bp, Artificial Sequence
  derived and/or modified sequence
ggagacgggatcatgaagcgctcggtagccgtctggctcttggtcgggctcagcctcggtgtcccccagttcggcaaaggtgatatttgtgatcccaatccatgtgaaaatggaggtatctgtttgccaggattggctgatggttccttttcctgtgagtgtccagatggcttcacagaccccaactgttctagtgttgtggaggttggtccctgcactcctaatccatgccataatggaggaacctgtgaaataagtgaagcataccgaggggatacattcataggctatgtttgtaaatgtccccgaggatttaatgggattcactgtcagcacaacataaatgaatgcgaagttgagccttgcaaaaatggtggaatatgtacagatcttgttgctaactattcctgtgagtgcccaggcgaatttatgggaagaaattgtcaatacaaatgctcaggcccactgggaattgaaggtggaattatatcaaaccagcaaatcacagcttcctctactcaccgagctctttttggactccaaaaatggtatccctactatgcacgtcttaataagaaggggcttataaatgcgtggacagctgcagaaaatgacagatggccgtggattcagataaatttgcaaaggaaaatgagagttactggtgtgattacccaaggagccaagaggattggaagcccagagtatataaaatcctacaaaattgcctacagtaatgatggaaagacttgggcaatgtacaaagtgaaaggcaccaatgaagacatggtgtttcgtggaaacattgataacaacactccatatgctaactctttcacaccccccataaaagctcagtatgtaagactctatccccaagtttgtcgaagacattgcactttgcgaatggaacttcttggctgtgaactgtcgggttgttctgagcctctgggtatgaaatcaggacatatacaagactatcagatcactgcctccagcatcttcagaacgctcaacatggacatgttcacttgggaaccaaggaaagctcggctggacaagcaaggcaaagtgaatgcctggacctctggccacaatgaccagtcacaatggttacaggtggatcttcttgttccaaccaaagtgactggcatcattacacaaggagctaaagattttggtcatgtacagtttgttggctcctacaaactggcttacagcaatgatggagaacactggactgtataccaggatgaaaagcaaagaaaagataaggttttccagggaaattttgacaatgacactcacagaaaaaatgtcatcgaccctcccatctatgcacgacacataagaatccttccttggtcctggtacgggaggatcacattgcggtcagagctgctgggctgcacagaggaggaatgaggggaggctacatttcacaaccctcttccctatttccctaaaagtatctccatggaatgaactgtgcaaaatctgtaggaaactgaatggtttttttttttttttcatgaaaaagtgctcaaattatggtaggcaactaacggtgtttttaagggggtctaagcctgccttttcaatgatttaatttgattttattttatccgtcaaatctcttaagtaacaacacattaagtgtgaattacttttctctcattgtttcctgaattattcgcattggtagaaatatattagggaaagaaagtagccttctttttatagcaagagtaaaaaagtctcaaagtcatcaaataagagcaagagttgatagagcttttacaatcaatactcacctaattctgataaaaggaatactgcaatgttagcaataagtttttttcttctgtaatgactctacgttatcctgtttccctgtgcctaccaaacactgtcaatgtttattacaaaattttaaagaagaatatgtaacatgcagtactgatattataattctcattttactttcattatttctaataagagattatgtgacttctttttcttttagttctattctacattcttaatattgtatattacctgaataattcaatttttttctaattgaatttcctattagttgactaaaagaagtgtcatgtttactcatatatgtagaacatgactgcctatcagtagattgatctgtatttaatattcgttaattaaatctgcagttttatttttgaaggaagccataactatttaatttccaaataattgcttcataaagaatcccatactctcagtttgcacaaaagaacaaaaaatatatatgtctctttaaatttaaatcttcatttagatggtaattacatatccttatatttactttaaaaaatcggcttatttgtttattttataaaaaatttagcaaagaaatattaatatagtgctgcatagtttggccaagcatactcatcatttctttgttcagctccacatttcctgtgaaactaacatcttattgagatttgaaactggtggtagtttcccaggaaggcacaggtggagttatttgtgagaagcaaagtgtttactaatgacaaagtagtaaaccattttcaagatgaaaactgatttctatttattttgcttcaaaggtcctgaaaaaataagcaattatcataacaatttgttattgatactggaggtttcattgacatgtctctcaaattaaagctcacactgcctccataaaagtcttcaacatctaatttataagctttacaagtatttattttataaggcttagacagaattattggagttttaaattaagtgtattggaaaagaaaggatggtatgtgtatgaaatgttaagatcctacgcaacactgctatttttttcctttaatatttgtgctgcataacaaaagccactagactgttactgtcttgtctgtccatgtgttaacagcatttcttaatgatgtatatatggagtggtcttcaatcatagtgaagaatttaaagagaaagtcaattgtattggcatttttaataagaacaaaattagttcgtctaaggggactggctggccacatatttgttccttgcccatatgctttctacttcttgttcttattatgaaattatgaatttgaagcctctgaaatggtgatcagttttcaacatctttcaaaaacaaaattactatttcctccatattgccttttttagataactttaaagttaggattttaaaatatttgtaactggctaaattttaaagtcgtgacaaataattacttaggttcagaaatatacacacacttactctttagccagtttctttcaaggtttactgtcccatcagatatctagccattttcctttgcaaattacataccttcttaagagtgtatttttaagattattacttacgctttatgatgatatagtttttcaaaattatttatagcttcatatgatgttttgtaattttttctattgatacctgttttaaaaatattttccaaggaagttgattaaaattatatttgttaccttttagaaaaagcattgaaatgagtttctcttgctttttcattttccctctgctttatatgctcttcgcaatacatcatgtccaacgggatacctattgttctcatgacacccaaaattgatgagagcaaaggggtcgcaccatatggaaatgttgaaaactattgtaaagtagtattatgaagtagcttttgtgtcattcatgtcgatgacatgaaagtgaagtaaatttattctatgtaaattcacactaaaaccagtacagtaccataagtagaatacatgtaagaatcacctagtcttcactatattgagtaaatataacatgctaattttacaattaatgaaactaaacttttaaacatctccattatatctacatccttttgaaggtatttatcatagttgccaattttaattttaggattgactttctctttctgaatgacttcataaagtttggtgtgaattttgaagacttgggttactaatgattgtatctttgctagtcaacaacttatgaaatatactcaatgcgtctgatgtgtcattaagtgcagaaataactaagacacaaataacctttgcaaaccttcaagctgtgtaatattccaatgttgtttttttctttgtatatatacttatatcacgtaggatgtaaaaccagtatgaccttgtctagtctccaaacttaaaataaacttttgaaaagc

SEQ ID NO: 98872 - DNA, 1413 bp, Artificial Sequence
  derived and/or modified sequence
atgaagcggagcgtggccgtgtggctgctggtgggcctgagcctgggagtgccccagtttggcaagggagatatctgcgatcctaacccatgtgaaaatggaggaatatgtctcccagggctcgccgatgggagtttctcttgcgagtgtcctgacggctttacggatcctaattgctcctctgtcgtagaagtgggcccttgcactccaaatccgtgccacaacggcggcacatgcgaaatctctgaagcctacaggggtgacaccttcatcggatatgtatgtaagtgcccccgggggttcaatgggatacactgccaacacaatatcaatgaatgtgaggttgagccctgcaaaaacggaggaatttgcaccgaccttgtcgcgaactattcttgtgagtgccctggcgagttcatgggccggaactgtcagtacaagtgctctgggccattgggaatcgaagggggaataatatctaatcagcagataacggcgtcctcaacacacagagccctgtttggtctgcagaagtggtacccttactatgctagactaaacaaaaaaggcttgatcaacgcctggacagccgctgagaacgatagatggccctggatacaaattaaccttcagcgtaagatgagggtgactggcgtaatcacccagggcgccaaacggatcgggagccccgagtacataaagagctacaagattgcctactctaacgatgggaagacatgggcaatgtacaaagtaaaaggcacgaacgaagacatggtgttccgaggcaacattgataataatacaccgtacgcaaacagctttacaccccctataaaggcccagtacgtccggctctatccacaggtgtgtcgtcgtcactgtacactcaggatggaactgctggggtgcgagctctctggctgctcagagccattaggcatgaagagtgggcacattcaggactaccaaattaccgcaagttccatatttagaaccctcaatatggatatgtttacttgggagccccgcaaggccaggctcgacaaacagggcaaggtaaacgcctggacgagcgggcataacgatcagtctcagtggctgcaggtagatctgctggtacctaccaaggttacaggcattatcactcaaggggcgaaggattttggccatgtgcagtttgtgggcagttacaagttagcctacagcaatgacggagagcattggaccgtctaccaagatgagaaacagcgcaaagataaggtgtttcaggggaacttcgacaacgacacccatcgaaagaacgtgattgacccgcctatatatgcacgacatatacgcattctgccttggtcctggtacgggcggatcactctcagatctgagctgctgggttgtacggaggaggagtag

SEQ ID NO: 98873 - RNA, 1413 nt, Artificial Sequence
  derived and/or modified sequence
augaagagaucggucgcagucuggcugcuggugggccugagucugggugugccucaguuugguaagggagacauaugcgacccaaauccuugcgagaauggcggcauauguuugccgggucuugccgauggauccuuuucuugcgaaugcccagaugguuuuacugauccaaacuguagcuccguugucgaagugggccccugcacucccaacccuugucauaauggaggcacaugcgaaauuagcgaagcuuacagaggggacacauuuauuggcuacgucugcaaguguccccgagguuucaauggaauccauugucagcacaauaucaacgaaugcgaagucgaacccuguaaaaaugguggcauauguacggaucuaguagcuaauuauucgugugagugcccuggagaauuuaugggccgaaauugccaauacaaauguaguggcccucugggcauagagggcgguauuauaagcaaccaacaaauuacagcuucgagcacacacagggcacuguucgguuugcagaagugguaucccuacuacgcaagacucaacaaaaaaggccugauaaaugcuuggacagccgccgagaaugacagguggccuuggauacaaauaaaucugcagaggaaaaugaggguaacuggagucauuacccagggagcuaagcgcauaggaagccccgaauacaucaaaucuuauaagauagccuacagcaacgaugggaaaacuugggcuauguacaaagugaagggcacaaaugaggauauggucuuucgagggaauaucgauaauaacacuccauaugccaauagcuuuacccccccuauuaaggcccaguaugugcgguuguauccucagguuuguagacggcauuguacucugcguauggagcuguuggggugugaguuauccggcuguagcgagccucuuggcaugaaaucuggucacauccaagauuaccaaauuaccgcaucuuccauauuccggacccugaacauggauauguuuaccugggagccccguaaggcaagacucgacaaacaagggaaaguaaaugcauggaccagugggcacaaugaccaaucucaauggcuacagguugaucuauugguccccaccaagguuacggggauuauuacacagggggcaaaagacuuugggcacgugcaguuuguggguagcuauaagcuggcauacucaaaugacggcgaacauuggacugucuaccaagaugaaaagcagcgcaaggauaaaguguuccaagggaauuuugauaaugauacacacagaaagaauguuaucgauccaccaauuuaugcccgacauauuagaauucugccuuggagcugguaugggagaauuacgcuacgcuccgaacugcuggguugcaccgaggaggaauag

SEQ ID NO: 98874 - RNA, 1413 nt, Artificial Sequence
  derived and/or modified sequence
augaagcguucaguggcaguaugguuauuaguuggccugucucuaggugugccucaguuugguaaaggcgacauaugugaucccaacccuugugaaaauggugguauaugccugcccggccuggcugacggaagcuucuccugcgagugcccggauggauuuaccgauccuaacugcagcagcguuguggaggucggaccaugcacuccaaacccuugucacaacggcgguacuugcgaaauaucagaggcguaccgcggcgauacuuucauuggcuaugucugcaagugcccaaggggguucaauggaauccauugccagcauaacaucaacgaaugugaggucgaaccuuguaagaaugggggaauuugcacagaccucgucgcuaauuacuccugcgaaugcccaggagaguuuaugggaaggaauugucaguacaaaugcagcggaccucugggaauugaaggcggcaucauuaguaaccagcagaucacagccagcagcacacacagggcacuuuucggcuugcagaaaugguaucccuacuaugcuaggcugaacaaaaagggacugauuaacgcauggacagcugccgaaaacgacagauggccauggauucagaucaauuugcagcggaagaugcgcgugaccgguguuaucacacaaggugcgaagagaauaggaucaccagaguacaucaaaucuuauaaaauugccuauaguaaugauggcaaaaccugggcuauguacaaagucaaggggaccaaugaggacaugguguuuagaggaaauaucgacaacaauacgccauacgccaauuccuuuacaccucccauuaaggcacaauacguccgccuguacccacaagucuguagacgacauugcacucuccggauggagcucuugggcugugaacugucuggaugcucagaaccucuugggaugaaaagcggucacauucaagauuaucagauaaccgcuaguuccauuuuuaggacccucaauauggacauguuuacaugggaaccgcgaaaagcacgcuuggacaagcaggggaaagucaacgcuuggaccucuggccacaaugaucagagucagugguuacagguggaccuguuagugccuacuaaagucaccgggaucauuacucaaggggcaaaagacuuuggacacguacaguucgucggcagcuauaaguuggccuacucaaaugacggcgagcauuggacuguguaccaggaugaaaagcagcgaaaggauaaaguguuccaagguaauuuugacaacgauacucauagaaagaacguuaucgacccaccuaucuacgcuagacacauacgaauuuuacccuggucuugguacgggagaauaacacugcggagugaguuacugggguguacagaggaggaauag

SEQ ID NO: 98875 - protein, 370 aa, Artificial Sequence
  derived and/or modified sequence
MPIAFNEPLSFLQRITEYMEHVYLIHRASCQPQPLERMQSVAAFAVSAVASQWERTGKPFNPLLGETYELIREDLGFRFISEQVSHHPPISAFHSEGLNHDFLFHGSIYPKLKFWGKSVEAEPRGTITLELLKHNEAYTWTNPTCCVHNVIIGKLWIEQYGTVEILNHRTGHKCVLHFKPCGLFGKELHKVEGHIQDKNKKKLFMIYGKWTECLWGIDPVSYESFKKQERRGDHLRKAKLDEDSGKADSDVADDVPVAQETVQVIPGSKLLWRINTRPPNSAQIWPARRRSGWRRSREKHGGSGPRRRQSGRRGGSTQAITPTLGPPTGCMQGITLSGISPTAQISTEGLEGPGARDRRLTRLDFLEWPL

SEQ ID NO: 98876 - DNA, 345 bp, Artificial Sequence
  derived and/or modified sequence
atgcagtccgtggccgcattcgcagtgagcgccgtggcatctcagtgggagcggactggcaagccattcaacccccttctgggcgagacctacgagcttatcagggaagacctcggctttagattcatatcggagcaggtgagtcatcacccgcccatctccgcatttcactcagagggcctcaaccacgactttctgtttcacggcagtatctatcctaaactgaagttttggggcaaaagtgtggaggctgagccccggggcacaataacgctggaactcctcaacgtgaaccagaggcatctgagagccaagcacaaaagtccgaccaacgctggaaggtag

SEQ ID NO: 98877 - DNA, 1113 bp, Artificial Sequence
  derived and/or modified sequence
atgcccattgcattcaatgaacccctgagcttcctgcagcgtatcaccgaatacatggagcatgtgtatcttattcatcgcgcttcgtgccagccacagcctcttgagcgcatgcaaagtgtcgccgcattcgccgtcagtgctgtggcttcacagtgggaacgcaccggtaagccctttaacccattactgggagaaacatatgaactgatccgcgaggatctcgggtttcggtttatatccgagcaggtcagccatcatccccccatcagcgcctttcactccgaggggctgaaccacgattttttgtttcatgggtctatatatcccaagctcaaattctgggggaaaagtgtagaggccgagcctcgtggaacgattactctggaactgctgaagcacaacgaggcttatacatggacaaatcccacttgttgcgtccacaatgtcatcatcggcaagctgtggatcgaacagtatggcactgtcgagatcttgaatcacaggaccggccacaagtgcgtgctacacttcaagccttgcggactcttcggtaaggagcttcacaaagttgagggacacattcaagataagaacaagaaaaagctcttcatgatttatggcaaatggaccgagtgtctctggggcatcgatcccgtcagctacgaatctttcaagaagcaggaacgacgcggcgaccacctgcgaaaggcaaagctggatgaggactctggtaaggccgactctgacgtagctgacgacgtgccagtagcccaggagactgtgcaggtaatcccgggatctaaacttctgtggcggataaacaccagaccaccaaatagcgctcagatttggcccgcaaggcgtagaagcggatggaggcgttcacgggaaaagcacggcgggtccggtcctaggcgtagacagtccggtaggcgcggcggatccactcaggccatcacccccactttgggccctcccacagggtgtatgcaggggattaccctcagcggcatctcaccaaccgcccagataagtactgaaggtcttgagggccctggcgctcgggatcgccgtctcacacgcctggacttcctagaatggcctctttag

SEQ ID NO: 98878 - DNA, 339 bp, Artificial Sequence
  derived and/or modified sequence
agcgtagcagcttttgcggtgtccgctgtggcatcacagtgggagcgtaccggtaagccatttaaccccctcctcggagagacctatgagttgatccgcgaggatctgggcttccggtttatctcagagcaggtcagccatcatcctccgatcagcgcgttccatagcgagggtctgaaccacgatttcctgtttcacggcagcatttatcccaaattaaagttctgggggaagagcgtggaggctgagccaaggggtacaatcactttagaacttctgaacgtcaaccaaaggcacttgcgagcgaagcacaagtctccaacgaacgctgggaggtag

SEQ ID NO: 98879 - DNA, 345 bp, Artificial Sequence
  derived and/or modified sequence
atgcagagcgtggccgcctttgctgtgtctgctgtggccagccagtgggagaggacaggcaagcccttcaaccccctgctgggggagacctatgagctgatccgggaggacctgggcttccgcttcatcagcgagcaggtgagccaccacccccccatcagcgccttccacagcgagggcctgaaccacgacttcctgttccacggcagcatctaccccaagctgaagttctggggcaagtctgtggaggccgagccccggggcaccatcaccctggagctgctgaatgtgaaccagaggcacctgcgggccaagcacaagagccccaccaatgccggccgctag

SEQ ID NO: 98880 - DNA, 1113 bp, Artificial Sequence
  derived and/or modified sequence
atgcccatcgccttcaatgagcccctgtccttcctgcagaggatcacagagtacatggagcacgtgtacctgatccaccgggccagctgccagccccagcccctggagaggatgcagagcgtggccgcctttgctgtgtctgctgtggccagccagtgggagaggacaggcaagcccttcaaccccctgctgggggagacctatgagctgatccgggaggacctgggcttccgcttcatcagcgagcaggtgagccaccacccccccatcagcgccttccacagcgagggcctgaaccacgacttcctgttccacggcagcatctaccccaagctgaagttctggggcaagtctgtggaggccgagccccggggcaccatcaccctggagctgctgaagcacaatgaggcctacacctggaccaaccccacctgctgcgtgcacaacgtcatcatcggcaagctgtggattgagcagtatggcaccgtggagatcctgaaccacaggacaggccacaagtgtgtgctgcacttcaagccctgtggcctgtttgggaaggagctgcacaaggtggagggccacatccaggacaagaacaagaagaagctgttcatgatctacggcaagtggacagagtgcctgtggggcattgatcctgtgtcctatgagagcttcaagaagcaggagcggcggggggaccacctgaggaaggccaagctggatgaggacagcggcaaggctgacagtgatgtggctgatgatgtgcctgtggcccaggagaccgtgcaggtgattcctggcagcaagctgctgtggaggatcaacacccggccccccaacagcgcccagatctggccagccaggagaagaagtggctggaggaggagccgggagaagcacggcggcagcggcccccggcggcggcagagcggccggcggggcggcagcacccaggccatcacccccaccctgggcccccccaccggctgcatgcagggcatcaccctgagcggcatcagccccacagcccagatcagcacagagggcctggagggccctggggcccgggaccggcggctgacccggctggacttcctggagtggcccctgtag

SEQ ID NO: 98881 - DNA, 339 bp, Artificial Sequence
  derived and/or modified sequence
tctgtggccgcctttgctgtgtctgctgtggccagccagtgggagaggacaggcaagcccttcaaccccctgctgggggagacctatgagctgatccgggaggacctgggcttccgcttcatcagcgagcaggtgagccaccacccccccatcagcgccttccacagcgagggcctgaaccacgacttcctgttccacggcagcatctaccccaagctgaagttctggggcaagtctgtggaggccgagccccggggcaccatcaccctggagctgctgaatgtgaaccagaggcacctgcgggccaagcacaagagccccaccaatgccggccgctag

SEQ ID NO: 98882 - DNA, 345 bp, Artificial Sequence
  derived and/or modified sequence
atgcagagcgtggccgccttcgccgtgagcgccgtggccagccagtgggaacgtacaggtaaacctttcaacccactgctgggtgagacgtacgaactcattagggaggacttgggtttccgttttattagtgaacaagtgtctcatcatcctcctatcagtgccttccacagcgaagggctaaatcacgattttctattccatggttctatatacccaaaactgaaattctggggaaaatccgtcgaggctgagcccagaggaaccatcaccctcgaattactgaacgtgaaccagcgtcatctaagagcaaagcacaaaagcccaacaaatgctgggcgatag

SEQ ID NO: 98883 - DNA, 1113 bp, Artificial Sequence
  derived and/or modified sequence
atgcccatcgccttcaacgagcccctgagcttcctgcagcggatcaccgagtatatggaacatgtgtaccttatccacagggcttcatgccaacctcagcctctggaaaggatgcagtctgtggcagcctttgctgtgtctgccgtcgcctcccagtgggaaagaacaggaaagccttttaaccccctgctgggtgagacttatgaactaattcgtgaggacttaggctttcgctttatctcagaacaggttagccaccacccccccatctcagcctttcattctgagggcttgaatcacgactttctcttccacggctctatttaccccaaactcaaattctggggcaagtctgtcgaggctgagccccgaggtactatcacacttgaacttctgaagcacaacgaagcgtacacttggacgaaccccacctgctgcgtccacaacgtgattattggaaagctttggattgagcagtatggaaccgtggagatcctaaaccacagaaccggtcacaagtgcgttctgcattttaaaccatgcggtttattcggcaaagagctgcacaaggtggagggccatattcaagacaaaaacaagaaaaagttgtttatgatttatgggaagtggaccgagtgcctctggggcatcgaccccgtatcctatgaatctttcaagaagcaggagaggcgtggcgaccacttgcggaaagccaaacttgatgaagatagtggaaaggcagattccgatgtcgccgacgatgtaccagtggctcaggagacagtgcaggtcatccccggctccaagctgctgtggcgtattaacaccaggccccccaactccgcacagatctggcctgccaggcgcagatccgggtggaggagaagtcgagagaagcatgggggctccggacctcggcggagacaatcaggacgcaggggcggcagtactcaagcaatcacgcctaccttaggacccccaacaggctgtatgcagggcatcaccttgagtggtatctctccaaccgcccagattagcaccgaaggtctggaagggcccggagccagagaccggaggctaacacggctcgacttcttagagtggcctctgtag

SEQ ID NO: 98884 - DNA, 339 bp, Artificial Sequence
  derived and/or modified sequence
agcgtggccgccttcgccgtgagcgccgtggccagccagtgggagagaaccggtaagccttttaaccccctcctcggagaaacatatgaacttatcagagaagacctgggctttagatttattagtgaacaagtctctcaccatccaccaatttcagcattccacagcgaagggctgaatcacgatttccttttccacggttcaatctaccctaagctgaagttttggggaaagagtgtggaggcagagcctcgcggcactattacactggagttgctcaacgtgaaccagagacacctgcgggcaaaacacaagagcccgaccaacgccgggagatag

SEQ ID NO: 98885 - DNA, 1780 bp, Artificial Sequence
  derived and/or modified sequence
agtgggtcgcgggcctacggggcgggggcggggcggcagtgagctcggccggcaaccgagggacccgcgtccagatcttcagtgtctattggatttttccaagagaaagtttgtaaaattccttacactgtagatgtggatcagatacgatgattcagtagaagagcacatgtcaggggcagtggaggctggctgctgaaggatgaacggagaggaagaattctttgatgccgtcacaggacatcgctgccggctcccatgttcagcagaagcgacttcagcgtgtggaccatcctgaagaagtgtgttggcctgacttacggaaaatcacaaaatagcacagagcattcctgtagacccaccacccagctcccctgatgccggcatctctcggaataaccataggagctgtccaagatcacgatgccaatcgccttcaacgagcctctgagcttcttgcagcggatcacggagtacatggagcacgtgtacctcatccacagggcctcctgccagccccagcccctggagaggatgcagtctgtggctgcttttgctgtttcggctgtggcttcccagtgggagaggaccggcaaaccatttaatccactcttgggagaaacgtatgaattaatcagggaagatttaggattcagatttatatcggaacaggtcagtcaccacccccccatcagtgcgttccactcggaaggtctcaaccatgacttcctgttccatggctccatctaccccaagctcaagttctggggcaaaagcgtggaggcggagccccgaggcaccatcaccctggagctgctcaaacataatgaagcctacacctggaccaaccccacctgctgcgtccacaacgtcatcatcgggaagctgtggatagagcagtatgggacagtggagattttaaaccacagaactggacataagtgtgtgcttcactttaaaccgtgtggattatttggaaaagaacttcacaaggtggaaggacacattcaagacaaaaacaaaaagaagctctttatgatctatggcaaatggacggaatgtttgtggggcatagatcctgtttcgtatgaatccttcaagaagcaggagaggagaggtgaccacctgagaaaggccaagctggatgaagactccgggaaggctgacagcgacgtggctgacgacgtgcctgtggcccaggagaccgtgcaggtcattcctggcagcaagctgctctggaggatcaacacccggccccccaactctgcccagatctggccagccaggagaaggagcggctggaggagaagcagagagaagcacggagggagcgggccaaggaggaggcagagtggcagacgaggtggttctacccaggcaataacccctacactgggacccccgactggttgtatgcaggggattactttgagcggaatttctccgactgcccagatatctactgagggcctggaggggcctggggcccgggaccggaggctgacgaggctggacttcctcgagtggccactgtgagcctcgtcacagcagaaaccaacttttctaacgactgagttcgcggagatagcatcatccctgatcaaggatgtaattctaattaactgttgattgccaaacatttcactctgctgtgccgtctcttcataaagcttcacttgggatcatcgtcttcattaaggtttcaacagggaaattcttcacggcgcccttttatgtggcagaaatcagctggggcttgtttagcttccagcacactctc

SEQ ID NO: 98886 - DNA, 494 bp, Artificial Sequence
  derived and/or modified sequence
tctgtggctgcttttgctgtttcggctgtggcttcccagtgggagaggaccggcaaaccatttaatccactcttgggagaaacgtatgaattaatcagggaagatttaggattcagatttatatcggaacaggtcagtcaccacccccccatcagtgcgttccactcggaaggtctcaaccatgacttcctgttccatggctccatctaccccaagctcaagttctggggcaaaagcgtggaggcggagccccgaggcaccatcaccctggagctgctcaatgtcaaccaaagacacctcagagcaaaacacaagtctccaacaaatgccggccgctaagacccgacagacacagaccggatgctggcgtcctcctgggccaccagttctgagacgtgagtcttgccaagccactgcctgcagtcttgttgtaggcagcaggtcctaacaaatacatacagaaataagtaataaacgacaccttgcctgatgaa

SEQ ID NO: 98887 - DNA, 345 bp, Artificial Sequence
  derived and/or modified sequence
atgcagagcgtcgcagcttttgcagtatctgccgtagctagccagtgggagcgaaccggaaagccgtttaacccactcctcggggagacctacgagctgattagagaggacctggggtttagattcatcagcgagcaagtatcacatcaccccccaatctcggctttccactctgagggactcaatcacgactttctgtttcacggcagtatctatcctaagttaaaattctggggcaagtctgtcgaggcagagccgagagggacaattacgctagaactgcttaacgtgaatcagaggcatctaagagcaaaacataagtctccaacaaatgccggtaggtag

SEQ ID NO: 98888 - DNA, 1113 bp, Artificial Sequence
  derived and/or modified sequence
atgccaattgcatttaacgagcctttaagcttccttcagagaatcactgaatatatggaacatgtttatctcatccatagagcttcctgccagccccagccgctggaaaggatgcaaagcgtggccgctttcgctgtttcagctgtagcgtcccaatgggaaaggacaggcaagccattcaaccccctgttgggcgaaacttatgagctcattcgggaggacctgggcttcagatttatcagcgaacaggtgagccaccacccgccaatatcagccttccattcagaagggttgaaccacgacttccttttccacggaagcatatacccgaagcttaaattttgggggaagtctgtcgaggccgagccccgaggaactattaccctggaattactgaaacacaatgaagcctacacctggacaaatcccacctgctgcgtgcataatgttatcatcggaaagctgtggattgagcaatacgggaccgtcgagatcctcaatcacagaaccggccataagtgcgtactgcattttaagccctgtgggttgtttggtaaagagctccacaaagtagaaggccatatccaggataaaaacaagaaaaagctatttatgatatacggaaagtggacagagtgcctatggggaattgaccccgtatcatatgaatcgtttaaaaagcaggagaggagaggggaccacttgcgcaaggcaaagctggacgaggattctggcaaagcggattctgacgtcgccgatgacgtccctgttgcccaggagactgtccaggttatccccggtagcaagttactgtggcgcatcaatacccggcctcccaatagcgcccaaatctggcctgctaggaggcgatccggatggagacgttcacgagagaaacacggcggttctggacccaggcggagacaaagtggtcgaagagggggatctacacaggccataactccgacactgggccctcctacaggctgcatgcagggcatcaccttgtctggaatttccccaacagcacaaatctcaactgaaggtttagagggcccaggggctcgtgataggaggctgaccagactggattttttggaatggccactgtag

SEQ ID NO: 98889 - DNA, 339 bp, Artificial Sequence
  derived and/or modified sequence
tccgttgccgctttcgccgtatccgcagtcgcctcccagtgggagcggaccggaaagccgttcaaccccttactgggggaaacttatgaactcatcagagaagacttggggtttagatttattagcgagcaggttagtcatcacccgcctattagtgcctttcactccgagggccttaatcatgactttctgttccacggcagtatatatcccaaactgaaattttgggggaaaagcgttgaagcggaacctcgcggaactatcacgctcgagcttctcaatgtgaatcaacgccatctgagggcaaaacataagtcccctaccaacgcaggacgctag

SEQ ID NO: 98890 - DNA, 345 bp, Artificial Sequence
  derived and/or modified sequence
atgcagagcgtggccgccttcgccgtgagcgccgtggccagccagtgggagagaaccggcaagcccttcaaccccctgctgggcgagacctacgagctgatcagagaggacctgggcttcagattcatcagcgagcaggtgagccaccacccccccatcagcgccttccacagcgagggcctgaaccacgacttcctgttccacggcagcatctaccccaagctgaagttctggggcaagagcgtggaggccgagcccagaggcaccatcaccctggagctgctgaacgtgaaccagagacacctgagagccaagcacaagagccccaccaacgccggcagatag

SEQ ID NO: 98891 - DNA, 1113 bp, Artificial Sequence
  derived and/or modified sequence
atgcccatcgccttcaacgagcccctgagcttcctgcagagaatcaccgagtacatggagcacgtgtacctgatccacagagccagctgccagccccagcccctggagagaatgcagagcgtggccgccttcgccgtgagcgccgtggccagccagtgggagagaaccggcaagcccttcaaccccctgctgggcgagacctacgagctgatcagagaggacctgggcttcagattcatcagcgagcaggtgagccaccacccccccatcagcgccttccacagcgagggcctgaaccacgacttcctgttccacggcagcatctaccccaagctgaagttctggggcaagagcgtggaggccgagcccagaggcaccatcaccctggagctgctgaagcacaacgaggcctacacctggaccaaccccacctgctgcgtgcacaacgtgatcatcggcaagctgtggatcgagcagtacggcaccgtggagatcctgaaccacagaaccggccacaagtgcgtgctgcacttcaagccctgcggcctgttcggcaaggagctgcacaaggtggagggccacatccaggacaagaacaagaagaagctgttcatgatctacggcaagtggaccgagtgcctgtggggcatcgaccccgtgagctacgagagcttcaagaagcaggagagaagaggcgaccacctgagaaaggccaagctggacgaggacagcggcaaggccgacagcgacgtggccgacgacgtgcccgtggcccaggagaccgtgcaggtgatccccggcagcaagctgctgtggagaatcaacaccagaccccccaacagcgcccagatctggcccgccagaagaagaagcggctggagaagaagcagagagaagcacggcggcagcggccccagaagaagacagagcggcagaagaggcggcagcacccaggccatcacccccaccctgggcccccccaccggctgcatgcagggcatcaccctgagcggcatcagccccaccgcccagatcagcaccgagggcctggagggccccggcgccagagacagaagactgaccagactggacttcctggagtggcccctgtag

SEQ ID NO: 98892 - DNA, 339 bp, Artificial Sequence
  derived and/or modified sequence
agcgtggccgccttcgccgtgagcgccgtggccagccagtgggagagaaccggcaagcccttcaaccccctgctgggcgagacctacgagctgatcagagaggacctgggcttcagattcatcagcgagcaggtgagccaccacccccccatcagcgccttccacagcgagggcctgaaccacgacttcctgttccacggcagcatctaccccaagctgaagttctggggcaagagcgtggaggccgagcccagaggcaccatcaccctggagctgctgaacgtgaaccagagacacctgagagccaagcacaagagccccaccaacgccggcagatag

SEQ ID NO: 98893 - protein, 587 aa, Artificial Sequence
  derived and/or modified sequence
MASEDIAKLAETLAKTQVAGGQLSFKGKSLKLNTAEDAKDVIKEIEDFDSLEALRLEGNTVGVEAARVIAKALEKKSELKRCHWSDMFTGRLRTEIPPALISLGEGLITAGAQLVELDLSDNAFGPDGVQGFEALLKSSACFTLQELKLNNCGMGIGGGKILAAALTECHRKSSAQGKPLALKVFVAGRNRLENDGATALAEAFRVIGTLEEVHMPQNGINHPGITALAQAFAVNPLLRVINLNDNTFTEKGAVAMAETLKTLRQVEVINFGDCLVRSKGAVAIADAIRGGLPKLKELNLSFCEIKRDAALAVAEAMADKAELEKLDLNGNTLGEEGCEQLQEVLEGFNMAKVLASLSDDEDEEEEEEGEEEEEEAEEEEEEDEEEEEEEEEEEEEEPQQRGQGEKSATPSRKILDPNTGEPAPVLSSPPPADVSTFLAFPSPEKLLRLGPKSSVLIAQQTDTSDPEKVVSAFLKVSSVFKDEATVRMAVQDAVDALMQKAFNSSSFNSNTFLTRLLVHMGLLKSEDKVKAIANLYGPLMALNHMVQQDYFPKALAPLLLAFVTKPNSALESCSFARHSLLQTLYKV

SEQ ID NO: 98894 - protein, 100 aa, Artificial Sequence
  derived and/or modified sequence
MASEDIAKLAETLAKTQVAGGQLSFKGKSLKLNTAEDAKDVIKEIEDFDSLEALRLEGNTVGVEAARVIAKALEKKSELKRCHWSDMFTGRLRTEIPPAL

SEQ ID NO: 98895 - protein, 133 aa, Artificial Sequence
  derived and/or modified sequence
MASEDIAKLAETLAKTQVAGGQLSFKGKSLKLNTAEDAKDVIKEIEDFDSLEALRLEGNTVGVEAARVIAKALEKKSELKRCHWSDMFTGRLRTEIPPALISLGEGLITAGAQLVELDLSDNAFGPDGVQGFE

SEQ ID NO: 98896 - DNA, 1764 bp, Artificial Sequence
  derived and/or modified sequence
atggccagcgaggacatcgccaagctggccgagaccctggccaagacccaggtggccggcggccagctgagcttcaagggcaagagcctgaagctgaacaccgccgaggacgccaaggacgtgatcaaggagatcgaggacttcgacagcctggaggccctgagactggagggcaacaccgtgggcgtggaggccgccagagtgatcgccaaggccctggagaagaagagcgagctgaagagatgccactggagcgacatgttcaccggcagactgagaaccgagatcccccccgccctgatcagcctgggcgagggcctgatcaccgccggcgcccagctggtggagctggacctgagcgacaacgccttcggccccgacggcgtgcagggcttcgaggccctgctgaagagcagcgcctgcttcaccctgcaggagctgaagctgaacaactgcggcatgggcatcggcggcggcaagatcctggccgccgccctgaccgagtgccacagaaagagcagcgcccagggcaagcccctggccctgaaggtgttcgtggccggcagaaacagactggagaacgacggcgccaccgccctggccgaggccttcagagtgatcggcaccctggaggaggtgcacatgccccagaacggcatcaaccaccccggcatcaccgccctggcccaggccttcgccgtgaaccccctgctgagagtgatcaacctgaacgacaacaccttcaccgagaagggcgccgtggccatggccgagaccctgaagaccctgagacaggtggaggtgatcaacttcggcgactgcctggtgagaagcaagggcgccgtggccatcgccgacgccatcagaggcggcctgcccaagctgaaggagctgaacctgagcttctgcgagatcaagagagacgccgccctggccgtggccgaggccatggccgacaaggccgagctggagaagctggacctgaacggcaacaccctgggcgaggagggctgcgagcagctgcaggaggtgctggagggcttcaacatggccaaggtgctggccagcctgagcgacgacgaggacgaggaggaggaggaggagggcgaggaggaggaggaggaggccgaggaggaggaggaggaggacgaggaggaggaggaggaggaggaggaggaggaggaggaggagccccagcagagaggccagggcgagaagagcgccacccccagcagaaagatcctggaccccaacaccggcgagcccgcccccgtgctgagcagccccccccccgccgacgtgagcaccttcctggccttccccagccccgagaagctgctgagactgggccccaagagcagcgtgctgatcgcccagcagaccgacaccagcgaccccgagaaggtggtgagcgccttcctgaaggtgagcagcgtgttcaaggacgaggccaccgtgagaatggccgtgcaggacgccgtggacgccctgatgcagaaggccttcaacagcagcagcttcaacagcaacaccttcctgaccagactgctggtgcacatgggcctgctgaagagcgaggacaaggtgaaggccatcgccaacctgtacggccccctgatggccctgaaccacatggtgcagcaggactacttccccaaggccctggcccccctgctgctggccttcgtgaccaagcccaacagcgccctggagagctgcagcttcgccagacacagcctgctgcagaccctgtacaaggtgtag

SEQ ID NO: 98897 - DNA, 1764 bp, Artificial Sequence
  derived and/or modified sequence
atggcctcggaagatatcgcgaagttggctgagaccttggcaaagactcaggtagctggcggccaattaagcttcaaagggaaatcccttaagttgaacaccgctgaggacgcaaaagatgttatcaaagaaatcgaagattttgactccctggaggcactcaggctcgaaggtaacacggtaggcgtagaagctgcaagagtgatcgccaaggcattagagaaaaaaagcgaattaaaacggtgccactggtctgatatgttcaccggtcgcctgcggaccgagatccccccagccctgatctcacttggggagggattgatcactgcaggggcacagctggtcgagctggatttgtctgataatgctttcggccctgatggggtgcaggggttcgaggctctgctgaagtcaagcgcatgttttacccttcaggaattaaagctcaacaactgcggaatgggaatcggaggcggtaaaattctggccgctgcgctaactgagtgtcatcgtaagtcttccgcacaggggaaacctctggctctgaaagtcttcgttgcaggccggaacagacttgagaacgatggggccacagcactggccgaggcgttccgcgtcatcggaaccctcgaggaggttcatatgcctcagaacggtatcaaccatccgggaatcaccgccctggcccaggcctttgctgtcaatccccttttgagagttattaacctcaacgataatactttcactgagaagggagccgtggccatggcggagaccctgaagacacttagacaagtagaggtaatcaacttcggcgactgcctcgtgcgaagcaagggtgcggtcgctatcgcggacgctatacggggtggcttgcccaagctcaaagaattgaacttgtcattttgtgagatcaagcgcgacgcagcactggccgtcgccgaggctatggctgacaaggctgagctagagaagctggatttaaacggtaacaccttaggcgaagagggctgtgagcagctccaggaagtgctagagggattcaacatggctaaggtgctcgcttccctctccgatgacgaagatgaggaggaagaagaagaaggcgaagaagaggaggaagaagctgaggaagaagaggaggaggacgaagaagaggaagaagaggaggaagaggaggaggaggaagagcctcaacagagagggcagggcgaaaagtccgccaccccctctaggaaaatccttgatccgaacacaggtgaacccgcccctgtcctgagtagtcccccccccgccgacgtgagcacctttctagccttcccgtcgcccgaaaagctgttacgcctgggccctaaaagctccgttctgattgcacagcaaactgacacatcggaccccgagaaagttgtgagtgccttccttaaagtgtcgtccgtttttaaggatgaggccacagtgaggatggccgtgcaggacgccgttgacgccctcatgcagaaggctttcaatagctcctccttcaattcgaacacattcctcaccaggctgctggtgcacatggggctgctgaaaagtgaggacaaagttaaagccatcgcaaatctctacgggcccctcatggctctgaaccacatggtgcagcaggattatttccccaaggctctcgctccactgctgttagccttcgtgacaaaacccaacagcgcgttggagagttgcagctttgcaaggcattctcttcttcagactctgtacaaggtctag

SEQ ID NO: 98898 - DNA, 1764 bp, Artificial Sequence
  derived and/or modified sequence
atggccagtgaggatatagccaagctggccgagacacttgctaagacgcaagtggccggcgggcaacttagtttcaagggcaaatccctgaaattaaacactgcagaagatgccaaggatgtgataaaggaaatcgaggatttcgatagcttagaagccctccgcctggaaggtaacacagtgggcgtggaagccgccagagtcatcgccaaggcattggagaagaaaagtgaactgaagaggtgtcattggagcgatatgttcacaggcaggctcagaactgagatcccccccgcactcatttcgctgggcgaaggcctgatcactgctggcgcgcaactggtggagttggatctttcagataacgcctttggaccagatggtgtgcagggattcgaagccctcctaaagagttctgcatgttttaccctgcaggaactgaaactgaataactgtggcatggggattggaggaggcaagatcttagctgccgccctcaccgagtgccatcggaaatccagcgcccagggaaaacctctggccctgaaggtattcgtcgcgggccggaaccgcctggagaacgacggagccactgccctagccgaggcctttcgagttataggaactcttgaagaggtgcatatgccacagaacgggatcaatcacccaggaatcacagccctcgcccaggcttttgccgtgaaccccctcctccgcgtaattaatcttaacgataacacctttaccgaaaagggggccgtggccatggcagaaaccctgaaaacgctgcggcaggtcgaggtcattaatttcggtgattgtttggtgcgatcgaagggtgctgttgccatcgcagatgcaatccgaggtggtttgcctaagctgaaagaactaaacctctcattctgtgagattaagcgggatgccgcccttgcggtcgcagaagctatggccgacaaagctgagttggagaagctggacctcaacgggaacaccctgggcgaggagggatgcgaacaattgcaagaggtactggagggattcaacatggccaaggtgttagcctctctgtccgatgatgaggatgaggaagaggaagaggaaggggaagaagaggaggaagaggccgaagaggaggaggaggaagatgaagaggaagaggaggaggaagaagaagaggaagaagaggaaccccagcagcgtggacagggcgaaaagagcgcaaccccgagccgtaagatcttagacccgaatacaggcgagcctgctcctgttctgtcctcaccgccccccgccgacgtgtcaacttttctggcctttccgtctccagaaaagctgctgagacttgggcctaagtcaagcgtgttaatcgctcagcaaactgatacatctgatcccgaaaaagttgtcagtgctttcctgaaggtcagcagcgtcttcaaggacgaggcaaccgtgcgcatggcagtgcaggacgctgtggacgcattgatgcagaaagcatttaactcgtctagctttaactccaatacatttctgacccgactgctggtgcatatgggattgctgaaaagtgaggacaaggtaaaagcgattgcaaacctgtatggcccgctgatggctttaaaccatatggtgcagcaagattatttcccaaaggccctggccccactcctactggcttttgtgacaaagcccaactccgcgctcgagtcttgctctttcgccagacattcactgttacagaccttgtataaggtgtag

SEQ ID NO: 98899 - DNA, 1764 bp, Artificial Sequence
  derived and/or modified sequence
atggcttccgaagacatagccaaacttgccgaaacactggcgaagacacaagtggcaggtggccaacttagcttcaaaggcaaatctctgaagctcaatacagccgaagacgctaaggacgttattaaggaaattgaagatttcgacagcctggaggccttgcggttggaaggcaacacggttggcgtcgaggccgcgagagtgatcgccaaagcactagaaaaaaagagcgagctaaagcgctgccattggtcggacatgttcaccggtcgcctgcggacagagattcctcccgccctgatctctctcggcgagggactaattactgcaggagctcagttagtggaacttgacctttcggacaacgcgttcgggccagacggagtacaggggttcgaggccctccttaaatcttccgcatgctttactctgcaggaactgaagctcaataactgcggaatgggtatcgggggcgggaaaattcttgcagcggccttgactgaatgccaccgcaagtcttccgcacagggtaagcctcttgccttaaaggtgttcgtcgctggccggaacaggcttgagaacgatggggcaaccgcactggccgaggctttcagggttattggcaccttggaagaagttcatatgccccaaaatgggatcaaccacccaggtatcacggctctggcccaggcattcgccgtcaatcctctcctgcgcgtaattaatctgaacgacaacacgtttacagagaagggagcagtagcgatggctgagactctgaagactcttcggcaggtagaagttatcaacttcggcgattgtcttgtaaggtctaaaggcgccgtagctatcgccgatgcaatcagaggtggactgcccaaactcaaagaactcaatctttccttttgcgagatcaagcgggacgccgccctggctgtagctgaagccatggccgataaagctgaactggagaagctggacctcaacggcaacacactgggcgaggaagggtgtgaacaactgcaagaggtactggagggttttaatatggcaaaggttctggcttctctctctgacgatgaggatgaagaggaagaggaggagggcgaagaagaagaggaagaggccgaggaggaggaggaggaggatgaggaagaagaagaggaagaggaagaagaagaagaggaagaaccacaacagcgagggcagggggagaagagcgccaccccctcccgtaagattctagacccaaatacaggtgaaccggcaccagtattgtcaagtccaccaccggcggacgtctctactttcctggccttccccagtcccgaaaagctgctgcgtctgggacctaagtccagcgttctgatagcacagcagacggatacatcagaccctgagaaggtcgtctcagcttttctgaaggtgagcagcgtttttaaagatgaagcgacagtacggatggccgtccaggatgcagtagacgcgctcatgcagaaggcattcaattctagcagcttcaattcgaacacattccttactaggctgctcgttcatatggggctgctcaagtctgaggataaagtaaaagcaatagcgaacctctacggaccgcttatggctctcaaccacatggtgcagcaggactactttcccaaagccctggcgcctctgttgctggcattcgtgactaagccaaacagcgccctggagtcctgctctttcgcacggcatagcttgcttcagaccctgtacaaggtgtag

SEQ ID NO: 98900 - DNA, 1764 bp, Artificial Sequence
  derived and/or modified sequence
atggcgtctgaggacatcgcgaagttggctgaaacacttgcaaaaacccaggtcgccggagggcagctgtccttcaaagggaagtcccttaaacttaataccgctgaggatgccaaggatgtgataaaggagatagaagatttcgactccttagaagccttgaggctcgaggggaatacggtaggagtggaggccgctagggtgatcgccaaggccctcgagaagaaaagcgagctgaaaagatgtcattggtctgatatgttcaccggcaggcttaggaccgaaatcccaccagccctcattagcctgggggagggcctgattacagccggggcccaattagtagagctcgacctgtctgacaacgcttttggtcccgatggtgtgcaaggattcgaggctctcctgaaatcctcagcctgtttcactctgcaggaactcaaactgaacaattgcggaatgggcatcggtgggggcaagatcttggccgctgcactgactgagtgccataggaaatcatccgctcagggcaagcccctagcattgaaggtgttcgtcgccggcaggaaccgactcgagaatgacggcgccacagcattagctgaggcctttagggttattggcacccttgaagaggttcacatgcctcagaatgggatcaatcatcccggcattaccgctctggcccaagcatttgccgttaatccacttctgagagtcatcaatctgaacgataatacatttaccgagaaaggcgccgtggcaatggctgagaccctcaagaccctgcgtcaggtggaggtcatcaacttcggggactgtttagtgcgatcaaaaggggcagtggctattgcggacgccatccgtggggggctgcccaaattaaaggaactaaacctctccttttgtgaaataaagagagacgccgcccttgctgtggctgaagcgatggctgataaagccgagctcgagaagctggaccttaatggcaatactctcggtgaggagggatgcgagcagctccaggaagtcttggaagggttcaatatggctaaagtgttggcaagcttgtcagacgacgaagacgaggaggaagaagaggagggcgaggaggaggaagaagaggccgaggaggaggaggaggaggacgaagaagaggaggaggaagaggaggaagaggaggaggaggagcctcagcagcgtgggcagggagagaagagcgccaccccaagcagaaaaatcctcgaccctaatactggcgaacccgccccagttctttcaagcccacctcctgctgacgtcagtactttcctcgcttttccttcccctgagaaactgctccgactcggtcctaaaagctctgtgctgatcgcgcagcaaactgacacctctgaccctgaaaaggtagtgtccgctttcctgaaggtgtcaagcgtcttcaaggacgaggcgaccgtgcgaatggccgtccaggatgccgtcgacgctttaatgcagaaggcctttaactcctcttcctttaattcaaatacattcctgacacgcttgttggtgcatatggggctgctgaaaagcgaggacaaggtcaaagctattgctaacctctacggcccactgatggcacttaaccacatggtgcaacaggactacttccccaaagccctagccccactgctgttggccttcgttactaagcctaacagcgcactggaatcgtgttcctttgctaggcactctctcctccaaacactgtacaaggtgtag

SEQ ID NO: 98901 - DNA, 1764 bp, Artificial Sequence
  derived and/or modified sequence
atggccagcgaggacatcgccaagctggccgagaccctggccaagacccaggtggccggcggccagctgtccttcaagggcaagagcctgaagctgaacacagcagaagatgccaaggatgtgatcaaggagattgaggactttgacagcctggaggccctgcggctggagggcaacacagtgggcgtggaggccgcccgggtgattgccaaggccctggagaagaagtctgagctgaagcgctgccactggagcgacatgttcaccggccgcctgaggacagagatccccccagccctgatcagcctgggggagggcctcatcacagctggggcccagctggtggagctggacctgagtgacaatgccttcggcccagatggagtgcagggctttgaggccctgctgaagagcagcgcctgcttcaccctgcaggagctgaagctgaacaactgtggcatgggcatcggcggcggcaagatcctggccgccgccctgacagagtgccacaggaagagcagcgcccagggcaagcccctggccctgaaggtgtttgtggccggcaggaaccggctggagaatgatggagccacagccctggccgaggccttccgggtgattggcaccctggaggaggtgcacatgccccagaatggcatcaaccaccctggcatcacagccctggcccaggcctttgctgtgaaccccctgctgcgggtcatcaacctgaatgacaacaccttcacagagaagggagctgtggccatggccgagaccctgaagaccctgcggcaggtggaggtgatcaactttggagactgcctggtgcgcagcaaaggagctgtggccatcgcagatgccatccggggcggcctgcccaagctgaaggagctgaacctgtccttctgtgagatcaagagagatgctgccctggccgtggccgaggccatggctgacaaggccgagctggagaagctggacctgaatggaaacaccctgggggaggagggctgtgagcagctgcaggaggtgctggagggcttcaacatggccaaggtgctggccagcctgagtgatgatgaagatgaggaggaggaggaggagggggaggaggaggaggaggaggccgaggaggaggaggaggaggatgaggaggaggaggaggaggaggaggaggaggaggaggaggagccccagcagaggggccagggcgagaagagcgccacccccagcaggaagatcctggaccccaacacaggagagcccgcccctgtgctgagcagccccccaccagcagatgtgtccaccttcctggccttccccagccctgagaagctgctgcggctgggccccaagagctctgtgctgattgcccagcagacagacaccagtgaccctgagaaggtggtgtctgccttcctgaaggtgagcagcgtcttcaaggatgaggccaccgtgaggatggctgtgcaggatgctgtggatgccctgatgcagaaggccttcaacagcagcagcttcaacagcaacaccttcctgacccggctgctggtgcacatgggcctgctgaagtctgaggacaaggtgaaggccatcgccaacctgtatggccccctgatggccctgaaccacatggtgcagcaggactacttccccaaggccctggcccccctgctgctggcctttgtgaccaagcccaacagcgccctggagagctgcagctttgcccggcacagcctgctgcagaccctgtacaaggtgtag

SEQ ID NO: 98902 - DNA, 1764 bp, Artificial Sequence
  derived and/or modified sequence
atggccagcgaggacatcgccaagctggccgagaccctggccaagacccaggtggccggcggtcagttgagctttaaaggaaaatctttgaagctcaataccgcagaggatgccaaggatgtgatcaaagaaatcgaggattttgacagcctggaggccttgcgtttggagggcaacaccgtgggggtcgaagcagcgcgagtgatagcgaaggcgctcgagaagaaatctgagttgaagagatgtcattggtccgacatgtttactggcagactgcgaactgagattccccccgcactgatttcactgggggaaggacttattactgccggcgcccagctcgttgaactggatctgagcgataatgcattcggtcccgacggcgtccagggatttgaagccctgttgaagagctccgcatgtttcaccctccaggagctgaagcttaacaattgtgggatgggcatcgggggcgggaaaatcctggccgcagccctcacagagtgccaccgaaaaagttctgctcaagggaagccattagctctgaaagtctttgtcgcaggcaggaaccggttggagaacgacggcgccacagccctggctgaggcattccgagttattgggacacttgaggaggtacacatgccgcagaacggtatcaaccatcccgggatcaccgccctggcccaggcattcgcagttaatcccctactgcgcgtcattaacctgaacgacaatacgttcacagagaagggcgccgtggccatggctgaaaccttgaagacactgcggcaagtagaagtcatcaacttcggcgactgtctagtgcgatccaagggagcagttgcaatcgcagacgctatccggggcggcctgccgaagctgaaggagttgaatctttctttctgtgagatcaagcgcgacgctgctttggccgtggctgaagccatggcagacaaggcagagttggagaaactggatttaaacggaaatactctgggcgaggaaggatgcgaacagctacaggaggtcctggagggattcaatatggcaaaggtgctcgctagtctatctgacgatgaagatgaggaagaagaagaggaaggagaggaagaggaggaagaagcggaggaggaagaagaggaggatgaggaagaagaggaggaggaggaggaggaagaggaagaagagccacagcagcgaggacaaggtgagaaaagcgctacaccgtcgcggaaaattctcgatccaaacaccggtgaacccgctccagtcctcagttcccctccaccagccgatgttagcacattcctggcctttcctagtcctgagaagttgctccggttgggtcctaaatcatcagtcctgattgcccagcagacagatacatctgatccagaaaaagttgtgtccgcgtttctcaaggttagctccgttttcaaggatgaggctacagtgcgaatggcagtccaagacgcggtagatgccctgatgcagaaggccttcaattcatctagctttaacagcaacacgttcctgacccgcctgctagtgcatatgggacttttgaaaagtgaggataaggttaaggccattgctaacctgtatggccctttaatggctttaaaccacatggtgcaacaggactattttccaaaggctctggcaccccttctgctggcttttgtgaccaagcccaactctgcactcgaatcctgttctttcgctagacatagtcttctgcagactctttataaggtgtag

SEQ ID NO: 98903 - DNA, 1764 bp, Artificial Sequence
  derived and/or modified sequence
atggccagcgaggacatcgccaagctggccgagaccctggccaagactcaggttgccgggggccaactctcttttaaagggaagagcctcaagcttaatacagccgaagacgccaaagacgtaatcaaggagattgaagactttgattccctagaggctcttcggctcgagggaaacacagtgggggtggaagccgcccgagtcattgcgaaagccttggaaaaaaaatcggagctgaagagatgccattggtcagacatgttcacaggtcgcctccggaccgaaatcccgccagccctcatcagcctaggcgagggcctaatcactgcgggagcacaacttgttgaactggacctctctgataacgctttcgggcctgacggagtgcagggatttgaggcgttacttaagtcgtccgcctgctttactctgcaggagctgaagctcaacaattgtggtatgggcatcgggggcgggaaaatcttggccgcagccctgacagagtgccaccgaaaaagctccgctcagggaaagcctttggcgctcaaggtgtttgtcgccggccgaaacaggctggaaaatgatggtgctacggctcttgccgaggcatttcgggtgatcggcacgctcgaagaggttcacatgccccagaatggaatcaaccacccagggattaccgctctcgcgcaagcattcgcggtaaaccccctcctgcgggtgataaacctgaacgacaacacattcaccgagaagggagctgtcgcgatggcagagaccttgaagaccctgcgccaggtggaggtgataaacttcggcgactgtctggttaggagtaaaggcgctgtggccattgcagatgcgatcagaggtggcttgccaaagttaaaggaactgaacctatcattctgtgaaattaagcgagacgctgcactagcagttgcggaagctatggccgataaggccgaattggaaaaattggacttgaacggcaacaccctgggcgaggagggttgtgagcaactacaagaggtcctggagggtttcaatatggcaaaggtgcttgcttctctctcggacgatgaagatgaggaagaagaggaagaaggggaggaagaggaggaagaggcagaggaggaggaggaggaagacgaagaggaggaggaggaggaagaagaggaggaagaagaggagccgcagcagcggggacagggagaaaaatccgccaccccatctagaaaaatacttgatccaaacacaggcgaacctgcacctgtgcttagttcccctcctccggcagacgtttccactttcctagcctttcctagtcccgaaaagctcctgcgcctaggacctaaaagctcagtgctaatcgcacaacagaccgatacatccgaccccgaaaaggtggtctctgctttcctgaaagtgtcctcagtgtttaaggatgaagccaccgttcgaatggctgttcaggacgcggtggatgccctgatgcagaaggctttcaattccagctcttttaactccaatactttcttgacacggttactcgtccacatgggtctccttaagagcgaggacaaggtgaaagccattgccaatctgtatgggccattgatggcgctcaatcacatggttcagcaggactatttcccaaaggctcttgcgccactgttgttagccttcgtcaccaagcctaactccgcccttgaatcttgctcattcgcacggcacagtcttcttcagacgctgtataaagtatag

SEQ ID NO: 98904 - DNA, 1764 bp, Artificial Sequence
  derived and/or modified sequence
atggccagcgaggacatcgccaagctggccgagaccctggccaagactcaggtggcaggtggtcagctctcttttaagggaaagagtcttaagcttaatacagccgaagacgccaaagatgtcattaaagaaattgaggattttgattcactggaggcccttcggctggaaggcaacaccgtgggagtcgaggcagccagggtgatcgcgaaagctctcgaaaagaaatctgagctgaagcgttgtcactggagcgacatgttcactggaaggctgcgtaccgagattccgcccgcgctgatatcgctcggggaagggctgattacggccggagcgcagctggttgaactcgatcttagcgacaatgccttcgggccagatggcgttcaaggtttcgaggcactcttgaaaagctccgcatgcttcacactgcaggagctcaagctgaacaactgcggcatgggtatcggcgggggaaagatactggccgcagccctgactgagtgtcacaggaaaagctccgcacagggaaagcccctggccttgaaagtgtttgtggctgggaggaacagactggagaacgacggggctaccgccttggccgaggccttccgggtcatcggaacgctcgaggaagtgcacatgcctcagaacggcatcaatcatccaggaattaccgctctcgcccaagccttcgccgtgaaccccctcttacgcgtgatcaatctaaacgataatacatttacagaaaagggggcggtcgctatggcagaaacgctgaagaccctaaggcaggtggaagtcatcaatttcggcgactgtctcgtgcgttcaaaaggcgctgtcgccatcgccgacgcaattagaggggggctaccgaaactaaaagagctgaacctcagtttctgcgaaattaagagggatgctgcactggccgtcgctgaagctatggcagataaggcggagctagagaagctggatcttaacgggaacacattgggtgaagagggatgtgagcagctgcaagaggtactcgaaggattcaacatggccaaagttctggcatctctctcagacgacgaagacgaggaggaagaggaagaaggtgaggaggaagaagaggaggccgaagaagaggaggaggaagacgaggaggaagaggaagaagaggaggaggaggaagaggaagaaccgcagcagcgagggcaaggcgagaagagtgccaccccgtcccgaaaaatcctcgacccaaatacaggtgagccagcaccggtcctgtcaagcccaccgcctgctgacgttagcacattccttgccttcccttcccctgagaagctgctccgtctgggcccaaaatcctctgtgctgattgcccaacagacagatactagcgacccagaaaaagtggtgtctgctttcctgaaggtctcttctgtcttcaaggacgaggctactgttagaatggctgttcaggacgcagtggacgctttgatgcaaaaagccttcaatagttcttcctttaacagcaacacatttcttaccaggcttctcgtgcacatgggcctgctgaagtctgaggataaagtcaaagccatagcgaacctttatggaccactcatggctctgaatcacatggtgcagcaagactacttccctaaggcactagcacctttactccttgccttcgtcacgaagcctaatagtgcattagaatcatgttctttcgcacgacattccctgctgcagacactttacaaggtgtag

SEQ ID NO: 98905 - DNA, 1764 bp, Artificial Sequence
  derived and/or modified sequence
atggccagcgaggacatcgccaagctggccgagaccctggccaagacacaggtcgccggcggccagctctcctttaaaggaaagagcctaaagttgaacacagcagaggatgccaaggacgtcatcaaggagatcgaggacttcgacagccttgaggctttacggcttgagggaaacacagtgggagtcgaagccgcccgggtcattgctaaggcccttgagaaaaagtctgagctcaagaggtgtcactggtcagacatgtttacaggtaggctccgcaccgagattccacccgcgttgatcagtttgggagaaggtttgatcacagctggagctcagcttgtggagcttgacctgtcagacaacgcgtttggcccagatggcgtgcaggggtttgaggctttacttaaatcatcagcgtgcttcacactacaggagctgaagctgaataattgcggcatgggaatcggcgggggcaaaatcttggcagcagcactaacggagtgccataggaaatctagtgctcaaggcaagccactcgctctgaaagtgtttgtggcagggagaaatagacttgagaacgatggtgctaccgcactcgccgaagctttcagagtaatcggtacactcgaagaagtgcatatgcctcagaacgggataaaccacccagggatcacagccctggcccaggcattcgcagtgaaccccctactaagagttatcaacctgaacgacaacacatttaccgagaagggggccgtggcaatggcagaaaccttaaaaacattgaggcaggtggaagtgatcaattttggggactgtctggtgaggtccaaaggggccgtcgccatcgcagacgcaattagaggaggccttcccaagctcaaagagttgaacttgtctttttgtgagataaagcgagatgccgccctggctgtggccgaagctatggcagataaagccgaattagagaaattggaccttaacggcaataccctgggcgaggagggatgcgagcagctgcaagaggtgctcgagggcttcaacatggccaaggtgctggcctccctgtctgacgatgaggatgaggaagaggaggaagaaggcgaggaggaagaagaagaagccgaagaggaggaagaggaggacgaggaggaagaagaggaagaagaagaagaagaggaggaagagcctcaacagcgcggacagggggaaaagtctgcaactccttccagaaagattttagacccaaataccggcgagccagcgccagtgctgagctcaccacctccagccgatgtgtcaacttttctggcttttccttcacccgaaaaactgctacgacttggacctaaatcttccgtactcattgcacagcagacagatactagcgatccggagaaggtggtttccgcctttctcaaggtgagctccgtattcaaggacgaagcaacggtccgcatggcggttcaggatgctgtagatgccctgatgcaaaaggcttttaatagcagcagtttcaattcgaatacctttttaacgcgtctgctcgtgcatatgggactcctcaaatcagaggacaaagtgaaggctattgccaacctctatggacccctgatggcgctgaatcacatggtgcaacaggactatttcccaaaagccctcgctcccttgctactagccttcgtgactaagccaaactcagcactcgagtcctgttcattcgctaggcactcactgctccaaacactctataaggtgtag

SEQ ID NO: 98906 - DNA, 1764 bp, Artificial Sequence
  derived and/or modified sequence
atggcatccgaggatatagcaaagctcgccgagacgctcgccaaaacacaagttgcagggggacagctttcttttaaggggaagtctctgaagttaaacacagctgaagatgccaaagacgtgatcaaggagatcgaagattttgattccctggaggctctgagactcgaggggaatactgtgggagtcgaggcggctagggtgatcgcaaaggcgctggagaagaagtccgagctgaaaaggtgtcactggtccgacatgtttactgggcgtctgaggaccgaaatccctcccgcattgatctctttgggcgagggcctcatcactgctggagcacagctagtcgaactggatttaagtgataacgcctttggacctgacggcgtgcaggggttcgaggctctgctgaagagctcagcctgttttacattgcaggaactgaagttgaataactgtggtatgggcataggcggaggaaagattctcgcagctgctttgactgaatgtcacaggaagtcaagcgctcaggggaagcctctggccctgaaagtgttcgtagccggtaggaaccgtctggagaacgatggtgcaacagcactcgcagaggctttccgggtaatcggcacgcttgaagaagtgcacatgccacaaaatggcataaaccatcctgggattaccgcgttagcccaggccttcgctgtgaacccattgctaagggtgataaacttaaacgataatacttttactgagaagggcgctgttgccatggctgagacccttaaaacgctgcggcaggtggaagttatcaactttggggactgcctggtgcgatcaaaaggcgctgtcgccatagcagatgcaattcggggaggtcttccaaagttgaaagagcttaatttgagcttctgcgaaattaagagggacgctgccctggcggtggcggaggccatggctgataaagcagagttagagaaacttgacctgaatggaaacaccctcggcgaggaagggtgcgagcagctgcaggaggttcttgagggtttcaacatggccaaagtgctggcatctttgtccgacgacgaggatgaggaagaggaagaggaaggggaggaagaggaagaagaggccgaggaggaggaggaggaggacgaagaggaagaggaagaggaggaggaagaggaggaggaagaaccgcaacagcggggacaaggagaaaaaagcgcaacacctagtaggaagattttagacccaaacacaggggagccagctccagttctctcttcacctccaccagctgatgtgagcacatttttagcctttccaagtcccgagaagctccttcgcttgggtcccaagtcatctgtgctgattgcacagcagacagatacttccgacccagaaaaggtggtgagcgcctttctgaaagtgagctcagtgttcaaagatgaagcgacagtgagaatggccgtccaggacgccgttgacgcgcttatgcagaaagctttcaactctagttctttcaatagtaacacttttctaaccaggctgctggtacacatgggcctgttgaaaagtgaggacaaggtgaaagccattgcaaacctctacggacctctgatggccttaaaccacatggtccagcaggactacttccccaaagccttggcaccactcctgttggccttcgtgaccaagcccaactcagcacttgagtcgtgctcttttgctcggcattcgctactacagaccctgtacaaagtgtag

SEQ ID NO: 98907 - DNA, 1764 bp, Artificial Sequence
  derived and/or modified sequence
atggccagcgaggatatagctaagctggctgagacactggccaaaacccaagtcgcgggtggccagctcagcttcaaagggaaatctctgaaattaaacactgccgaggacgcaaaagatgtcataaaggaaattgaggacttcgactctcttgaggcacttaggctggagggcaacaccgtgggagttgaagcggcaagagtcatcgccaaagctctggagaaaaagtctgagcttaaacgctgccattggtccgacatgtttaccggcaggttacgcacggaaatccctccagctctgataagcctcggcgagggactgatcaccgccggagcccagctggtcgagttagatttaagtgataatgcgttcggacccgatggtgttcagggcttcgaggcgctgctgaagtcatcagcttgtttcacattgcaggagcttaaactgaataattgcggaatgggaattggtgggggaaagattcttgcagccgcattgactgagtgtcatcgtaagagttctgcccagggaaagcccttagctcttaaggtatttgtcgcagggagaaacagactcgaaaatgacggggcaactgcccttgcagaggccttccgggtgattggaacactggaggaggtgcacatgccccagaacggaattaaccacccaggcattacagcactggcacaggctttcgccgtgaaccctttacttcgggttattaatttgaacgacaatacgttcactgagaaaggcgcagtggcaatggccgaaacgctgaagaccctgcgccaggttgaggtgatcaattttggagattgtttggtacggtccaagggggctgtggctatagccgatgcgattagagggggattgcccaaattaaaggagctaaatctgagcttctgcgagattaagagggatgctgccctggcagtagcagaagctatggcagataaggcggagctggagaagcttgatttgaatggcaatactctgggcgaagaaggctgtgagcaattgcaggaggtcctcgagggtttcaacatggcaaaggtcttggcgtcattgagtgatgatgaggatgaagaagaggaggaggaaggtgaggaagaagaggaggaagcagaagaggaagaggaggaggacgaggaggaagaggaggaggaggaagaagaagaggaggaagagccacaacaaaggggacaaggagagaagtctgccaccccctcgagaaagatcctggaccccaacaccggcgaacccgctccagtcctttcctccccacctcccgcagatgtgagtacattcctcgccttcccgtcgcccgagaaactactccggctcggcccaaaaagctccgtgcttatagcgcagcaaacagacaccagtgaccctgagaaggtggtgtcggccttcctgaaagtgtccagcgtgtttaaggacgaagcaaccgtgcgaatggccgttcaagacgctgtcgacgccttaatgcaaaaggcgtttaatagcagttcctttaactccaacactttcctcactaggttactggtccatatgggcctgctgaagtccgaggataaagtgaaagctattgccaatttatatggacccctcatggccttgaaccatatggtgcaacaagactatttcccgaaagcccttgccccactgctgcttgcctttgtgaccaaacccaattctgccttggaaagctgtagcttcgcaagacactcccttctacagacactctataaggtatag

SEQ ID NO: 98908 - DNA, 1764 bp, Artificial Sequence
  derived and/or modified sequence
atggcaagcgaagacattgcaaagcttgcagagaccctcgccaaaacccaggttgcaggcggtcagctaagttttaagggcaaatctctgaagctgaataccgccgaagacgccaaagacgtgataaaggaaattgaggatttcgattctctggaagcactgaggttggagggcaatacagtaggagtggaggcagcacgggtcatagccaaggccctggagaagaagtctgagctcaaacggtgtcattggtctgacatgttcaccgggaggctgcggacagaaatccctcccgctttaatcagcctcggcgaaggtttgattaccgccggagcccagctggttgaacttgatttgtccgacaacgccttcggacccgacggtgtgcagggcttcgaagcgctgctaaaaagttccgcctgtttcaccctgcaggaattgaagctaaataactgcggtatgggtatcgggggtgggaaaatcctcgcagccgcacttacagaatgtcatcggaaaagctccgcgcaggggaaacctctggccctgaaagttttcgttgctgggcgaaatagacttgagaacgatggggctaccgccctggccgaggccttccgggtgattggcacgctcgaagaagttcacatgccacagaacggcatcaatcaccctggtattacagccctggcccaggcatttgcagtaaacccattactgcgtgttataaacctcaacgacaatacattcactgaaaaaggagcagtagcaatggcagagacacttaagaccctccgccaagtggaggtgatcaatttcggcgactgtctcgtgaggtctaaaggggctgtggccatcgcagatgccattcgcggagggctcccgaagctcaaggagctgaatctttctttctgcgaaattaaacgggacgccgctttagctgtggccgaagctatggcagacaaagcagaactggagaagttggatctgaacggaaataccctgggcgaggaggggtgtgagcagctgcaggaagtgctggaaggcttcaatatggctaaggtactagctagtctctctgatgatgaggacgaagaggaagaagaggagggagaggaagaagaagaagaggctgaagaggaggaggaggaggacgaagaagaagaagaggaagaggaggaagaggaggaggaagaaccccagcagaggggccaaggcgaaaagtccgctactccctctcgaaaaatcctggatcccaacactggagaacccgcaccagttcttagtagcccgcctcctgccgacgtgagcacattcctcgctttccctagccccgagaagttgctccgcctgggtcccaagtcctccgttctgattgcacagcagacggatacctctgaccctgagaaggtggtgtcagcattcttgaaagtctcctccgtatttaaagacgaggccacagttaggatggctgtccaagatgccgtggacgcactaatgcagaaggcgttcaactctagctcctttaactcaaataccttccttacacgccttctcgtgcacatgggactgcttaagtctgaggataaggtgaaggccatcgccaacctgtatggtcctcttatggccctgaaccatatggtgcagcaggattacttccctaaagctctcgccccactactgctggcctttgtaactaagcctaacagtgcgctggaaagttgcagtttcgctagacactcccttttacaaaccttgtataaagtctag

SEQ ID NO: 98909 - DNA, 1764 bp, Artificial Sequence
  derived and/or modified sequence
atggcctcggaagacatcgctaagctggcagagaccctggccaaaacacaggtggccggaggacaattaagctttaagggtaaaagtctcaaattgaacactgccgaagacgctaaggatgtcattaaagaaatcgaggatttcgatagcctcgaagccctgagactggaggggaataccgtgggggtagaggccgctcgagtgatagccaaagctcttgagaaaaagagcgagctgaagcgttgccattggtcggatatgttcacagggcgactgcgtacagagatccctccagctctgatctccttaggcgaaggtctgatcaccgccggtgctcagttggtggagctcgacttgtcagataacgccttcgggcctgatggagtacagggctttgaggccctactgaagtcttctgcctgcttcacactgcaagaattaaaactgaacaattgcggcatggggattggcggtggaaagatcctggcagcagcgctcacggagtgccacagaaaatcatcagcacaaggcaaacccttagctctaaaggttttcgtcgccggtcgtaacagattggagaacgatggtgctacagccctggctgaagcatttcgcgtgatcggaaccctagaagaagtacacatgccccagaatggtatcaatcatcctgggattaccgccctcgcacaagccttcgccgtgaaccccttacttcgcgtgatcaatctcaacgataacacattcaccgaaaagggagctgtagctatggccgagactctgaagaccctgcggcaggttgaagtaattaactttggagattgcctggtcagatccaaaggagcagtagccattgctgacgccatccgcggtggacttccaaagcttaaagagttgaatctctccttctgcgagattaaaagggatgcagcgctcgccgtggcggaggcaatggctgacaaggcagagctggagaaactagacctgaatggaaacactttaggtgaggaaggctgcgaacaactgcaggaggtgctcgaggggttcaatatggctaaggtgctggcaagtttaagcgatgacgaggacgaagaagaagaggaggagggggaagaagaggaggaagaggccgaggaggaagaggaggaagacgaagaggaggaagaggaggaggaggaggaggaagaagaggagccacaacagcgaggacaaggtgaaaaaagcgccactccgtcaaggaaaatactcgaccctaatactggggaacccgctcccgtcctatccagtcctccacccgcagatgtctcaacctttttagccttcccttcacctgagaaacttctgcggttgggcccaaaatccagtgtcttaattgcccagcagacggacacaagtgatcccgagaaagtagtgtcagcctttttaaaagtcagcagtgtgttcaaagacgaggcgaccgttagaatggcagtccaggatgccgttgacgccctgatgcagaaggcctttaacagttcttcttttaattcgaatactttcttgaccaggctgttggtgcacatgggccttctgaaatctgaggacaaggttaaggcaatcgccaacttatatgggccattaatggccctgaaccacatggtccagcaggactactttcctaaagccttggcaccacttctcctggcattcgtcactaaacccaactcggcactggagagctgctccttcgccaggcacagcctgctgcagaccctgtacaaagtttag

SEQ ID NO: 98910 - DNA, 1351 bp, Artificial Sequence
  derived and/or modified sequence
ttcgaatcaaagggaaagtgcaggatgccagagagatgttgaactctcgcaagcagcagaccacggtgccccagaagccccgccaggttgctgatgcccgggagaagatcagcttgaagaggagttcccctgctgccttcataaacccacccattgggacagtgacccctgctctgaagctcaccaaaaccatccagagaatgcatgtggaccctgtggggtggattctgaccactgagtgtttccaggttccacagcagaaagccatggcaccacttcatccccatcctgccggaatgagaatcaatgttgtcaataaccaccaggccaaacagaatttatatgacctggatgaagatgatgatggtatagcttccgttcctactaaacagatgaagtttgcagcctcaggcggctttctccaccacatggctgggctaagcagttccaagctttccatgtccaaggccctccctctcaccaaagtggttcagaatgatgcatacacagctcctgctctcccttcctctattcgaacaaaagccttgaccaacatgtcccggacactggtgaacaaggaagaaccccccaaagagctgccagctgctgagcctgttctcagcccattggaaggcaccaagatgactgtgaataatctgcaccctcgagtcactgaggaggacattgttgagcttttctgtgtgtgtggggccctcaagcgagctcgactggtccatcctggggtagcggaggtggtgtttgtgaaaaaggacgatgccatcaccgcatataagaagtacaacaaccggtgtctggacggcggctgagtgacagcccatcaatgaaaaaggagagcgagctgcctcgcagggtgaactctgcctcctcctccaacccccctgccgaagtggaccctgacaccatcctgaaggcactcttcaagtcctcaggggcctctgtgaccacgcagcccacagaattcaaaatcaagctttgagcaggggagtgaggcagccagaagtgggggcagaggagggtggctctgtttccccaaggcaaagcttatgaccaatgggccatcggactggagacccctgattgtgggaagggttgccagggataaagagcttcctcactggatgggacccgcctttctgtgttgtgttctgccctgtgctcttctctctacgttaacgtttcctgtagtatgtttcttcatctcatcgccaaggtaggcttgtgtttttcagtgtgtgcctccccgagcctcagccccaagctgatttcttatctggaaatggtacactgaattctctgggtggctttcttgtggccccatgggatgcagcgt

SEQ ID NO: 98911 - protein, 405 aa, Artificial Sequence
  derived and/or modified sequence
MHLNRIKAMLVANILSLVGALLMGFSKLGPSHILIIAGRSISGLYCGLISGLVPMYIGEIAPTALRGALGTFHQLAIVTGILISQIIGLEFILGNYDLWHILLGLSGVRAILQSLLLFFCPESPRYLYIKLDEEVKAKQSLKRLRGYDDVTKDINEMRKEREEASSEQKVSIIQLFTNSSYRQPILVALMLHVAQQFSGINGIFYYSTSIFQTAGISKPVYATIGVGAVNMVFTAVSVFLVEKAGRRSLFLIGMSGMFVCAIFMSVGLVLLNKFSWMSYVSMIAIFLFVSFFEIGPGPIPWFMVAEFFSQGPRPAALAIAAFSNWTCNFIVALCFQYIADFCGPYVFFLFAGVLLAFTLFTFFKVPETKGKSFEEIAAEFQKKSGSAHRPKAAVEMKFLGATETV

SEQ ID NO: 98912 - DNA, 1215 bp, Artificial Sequence
  derived and/or modified sequence
atgcacctgaaccgcatcaaggccatgctggtggccaacatcctgagcctggtgggcgccctgctgatgggcttcagcaagctgggccccagccacatcctgatcatcgccggccgcagcatcagcggcctgtactgcggcctgatcagcggcctggtgcccatgtacatcggcgagatcgcccccaccgccctgcgcggcgccctgggcaccttccaccagctggccatcgtgaccggcatcctgatcagccagatcatcggcctggagttcatcctgggcaactacgacctgtggcacatcctgctgggcctgagcggcgtgcgcgccatcctgcagagcctgctgctgttcttctgccccgagagcccccgctacctgtacatcaagctggacgaggaggtgaaggccaagcagagcctgaagcgcctgcgcggctacgacgacgtgaccaaggacatcaacgagatgcgcaaggagcgcgaggaggccagcagcgagcagaaggtgagcatcatccagctgttcaccaacagcagctaccgccagcccatcctggtggccctgatgctgcacgtggcccagcagttcagcggcatcaacggcatcttctactacagcaccagcatcttccagaccgccggcatcagcaagcccgtgtacgccaccatcggcgtgggcgccgtgaacatggtgttcaccgccgtgagcgtgttcctggtggagaaggccggccgccgcagcctgttcctgatcggcatgagcggcatgttcgtgtgcgccatcttcatgagcgtgggcctggtgctgctgaacaagttcagctggatgagctacgtgagcatgatcgccatcttcctgttcgtgagcttcttcgagatcggccccggccccatcccctggttcatggtggccgagttcttcagccagggcccccgccccgccgccctggccatcgccgccttcagcaactggacctgcaacttcatcgtggccctgtgcttccagtacatcgccgacttctgcggcccctacgtgttcttcctgttcgccggcgtgctgctggccttcaccctgttcaccttcttcaaggtgcccgagaccaagggcaagagcttcgaggagatcgccgccgagttccagaagaagagcggcagcgcccaccgccccaaggccgccgtggagatgaagttcctgggcgccaccgagaccgtg

SEQ ID NO: 98913 - DNA, 1218 bp, Artificial Sequence
  derived and/or modified sequence
atgcacctgaacagaatcaaggccatgctggtggccaacatcctgagcctggtgggcgccctgctgatgggcttcagcaagctgggccccagccacatcctgatcatcgccggcagaagcatcagcggcctgtactgcggcctgatcagcggcctggtgcccatgtacatcggcgagatcgcccccaccgccctgagaggcgccctgggcaccttccaccagctggccatcgtgaccggcatcctgatcagccagatcatcggcctggagttcatcctgggcaactacgacctgtggcacatcctgctgggcctgagcggcgtgagagccatcctgcagagcctgctgctgttcttctgccccgagagccccagatacctgtacatcaagctggacgaggaggtgaaggccaagcagagcctgaagagactgagaggctacgacgacgtgaccaaggacatcaacgagatgagaaaggagagagaggaggccagcagcgagcagaaggtgagcatcatccagctgttcaccaacagcagctacagacagcccatcctggtggccctgatgctgcacgtggcccagcagttcagcggcatcaacggcatcttctactacagcaccagcatcttccagaccgccggcatcagcaagcccgtgtacgccaccatcggcgtgggcgccgtgaacatggtgttcaccgccgtgagcgtgttcctggtggagaaggccggcagaagaagcctgttcctgatcggcatgagcggcatgttcgtgtgcgccatcttcatgagcgtgggcctggtgctgctgaacaagttcagctggatgagctacgtgagcatgatcgccatcttcctgttcgtgagcttcttcgagatcggccccggccccatcccctggttcatggtggccgagttcttcagccagggccccagacccgccgccctggccatcgccgccttcagcaactggacctgcaacttcatcgtggccctgtgcttccagtacatcgccgacttctgcggcccctacgtgttcttcctgttcgccggcgtgctgctggccttcaccctgttcaccttcttcaaggtgcccgagaccaagggcaagagcttcgaggagatcgccgccgagttccagaagaagagcggcagcgcccacagacccaaggccgccgtggagatgaagttcctgggcgccaccgagaccgtgtag

SEQ ID NO: 98914 - DNA, 1218 bp, Artificial Sequence
  derived and/or modified sequence
atgcacctcaatcggatcaaggccatgctcgtcgccaatattctgagcctcgtgggtgccctactcatggggttttccaaactggggcctagccacatcctcattattgcaggccgctcaatttccggactctattgcggattgatttctggacttgtcccgatgtatatcggtgaaatcgctcccacagcattacgaggtgctctcggtaccttccatcagctggccatcgtaaccggaatcttgatcagccaaattatcggtttagagttcatcctgggaaactatgacctttggcacattctgctggggttgagtggggttagagctatcctgcaaagtttactgctcttcttttgtcccgaatcccccaggtatctgtacataaagctggacgaagaggtgaaggctaaacagtcactgaagcggctcaggggctatgatgacgttaccaaggatatcaatgagatgcggaaggagagagaagaagcatcatctgagcagaaggtgagcatcatccagttattcactaactcaagttaccgacaaccaatcctggtggcactgatgctccacgtcgcgcaacagttctcagggattaacggtattttctattacagtaccagcatattccagactgccggtatctccaaaccagtgtacgccaccattggtgtcggcgcagtgaatatggtgtttacggccgtgagcgttttcttggtggaaaaggccgggcgtcgatccctcttcttaatcggaatgtccggtatgttcgtttgcgccatattcatgtctgtgggactggtcctgctgaataagtttagttggatgtcatacgtatctatgattgctatctttttatttgtgtcgtttttcgaaatcggccccggacctataccctggtttatggtcgccgaattcttcagccaaggacctagacccgcggcgctcgcaatagccgccttcagtaactggacgtgcaacttcattgtggctctgtgctttcagtacatcgctgatttctgtggaccttacgtgttcttcctgttcgccggcgtgctgctcgctttcacacttttcacatttttcaaagtgcccgagactaaagggaaatcattcgaggagatcgccgccgagtttcagaagaaatccggttctgcacatcggcctaaggctgccgtcgaaatgaaattcctcggcgctacggaaacagtgtag

SEQ ID NO: 98915 - DNA, 1218 bp, Artificial Sequence
  derived and/or modified sequence
atgcacctgaaccgcatcaaggccatgctggtggccaacatcctgagcctggtgggcgccctgctgatgggcttcagcaagctgggccccagccacatcctgatcatcgccggccgcagcatcagcggcctgtactgcggcctcatcagcggcctggtgcccatgtacatcggggagatcgcccccacagccctgcggggggccctgggcaccttccaccagctggccatcgtgacaggcatcctgatcagccagatcatcggcctggagttcatcctgggcaactatgacctgtggcacatcctgctgggcctgagcggcgtgcgggccatcctgcagagcctgctgctcttcttctgcccagagagcccccgctacctgtacatcaagctggatgaggaggtgaaggccaagcagagcctgaagaggctgcggggctatgatgatgtgaccaaggacatcaatgagatgaggaaggagcgggaggaggccagcagcgagcagaaggtgtccatcatccagctgttcaccaacagcagctaccggcagcccatcctggtggccctgatgctgcacgtggcccagcagttcagcggcatcaatggcatcttctactacagcaccagcatcttccagacagctggcatcagcaagcctgtgtatgccaccatcggcgtgggcgctgtgaacatggtgttcaccgctgtgtctgtgttcctggtggagaaggccggccgccgcagcctcttcctgattggcatgagcggcatgtttgtgtgtgccatcttcatgtctgtgggcctggtgctgctgaacaagttctcctggatgtcctatgtgtccatgattgccatcttcctgtttgtgtccttctttgagatcggccctggccccatcccctggttcatggtggccgagttcttcagccagggccccaggcctgctgccctggccatcgccgccttcagcaactggacctgcaacttcatcgtggccctgtgcttccagtacatcgctgacttctgtggcccctacgtgttcttcctgtttgctggggtgctgctggccttcaccctcttcaccttcttcaaggtgcctgagaccaagggcaagagctttgaggagattgctgctgagttccagaagaagagcggcagcgcccaccggcccaaggctgctgtggagatgaagttcctgggcgccacagagaccgtgtag

SEQ ID NO: 98916 - DNA, 1218 bp, Artificial Sequence
  derived and/or modified sequence
atgcacctgaaccggatcaaggccatgctggtggccaacatcctgagcttggtgggcgccctcctcatgggattttctaaactgggtccttcccatatccttataattgcgggtcggagcatctctggactctattgcggtctgatcagcggcctggtacccatgtacatcggcgaaatcgctcccacggcgctccggggggctttaggcaccttccatcagctggcaatagttacaggaatactcattagtcagataatcggtctcgaatttatccttggtaattatgacctttggcatatactcctgggactgtcgggtgttcgcgctatcctccagagcctgttgctgtttttctgccctgaatcaccccggtacctctacatcaaattggacgaggaagtgaaggcaaagcagagcctaaagaggctgcgcggatacgatgatgtgaccaaggatattaacgaaatgaggaaagaaagagaggaggctagcagtgagcagaaagtcagcatcattcagctgtttactaacagcagttatcgccagcctatcttagtggcactgatgctgcacgttgcacagcagttctccggcatcaatggaatattttattacagcacgtctattttccaaaccgcgggtatcagcaagcccgtttatgccacaattggagtaggcgctgttaatatggtgtttacagcagtgagcgtgttcctggtagaaaaggctggtagacggtcgctttttctgatcggcatgagtggcatgttcgtgtgcgctattttcatgtccgttggccttgtactacttaataagttcagttggatgtcttatgtttccatgatagccatcttcctattcgtcagcttcttcgagattgggccaggccccattccttggtttatggtggcggaatttttcagccaaggtccgagacccgctgctctggcgattgcagcattcagcaactggacttgtaactttatcgtggccttgtgctttcaatacatagctgatttctgcggaccctacgttttctttctgtttgctggagtgttactggcattcacgctcttcacctttttcaaagtgccagagacaaagggcaagagtttcgaggaaatagccgccgagttccagaaaaaaagcggatcagcccaccgcccaaaggcagccgtggaaatgaagtttctgggagcaaccgagaccgtgtag

SEQ ID NO: 98917 - DNA, 1218 bp, Artificial Sequence
  derived and/or modified sequence
atgcatctgaaccgcattaaagcgatgctggtggcaaacattttgtcgctggtgggcgcactgctgatgggattctccaaactcgggccatctcatatcttgatcatcgccggacgtagtatttccggattgtactgtggacttatcagcggtctggtccccatgtatatcggcgagatcgccccaacggccctccgaggcgctcttgggacgtttcatcagctggcaatcgtaactggaatcctgatctcacagattatcggcctagagtttatattgggaaactatgatctgtggcatatcctgctcggtcttagcggagtgcgtgccatcctccagtccctcttgttgtttttttgccccgagtcgcctcggtacctctatattaagttagacgaggaagtgaaagctaaacagagcctgaagagactccggggatacgacgatgttaccaaggacattaatgagatgcgcaaggaacgcgaggaagcatccagcgaacagaaggtgagcatcatccagctattcaccaactcgtcgtacagacagcctattctggttgcactcatgctccacgtagcccagcagtttagtggtattaatgggatattctattactccacgagcatcttccagactgctggcatatctaaacccgtgtatgcaaccataggcgtgggagctgttaacatggtgttcacggccgtttctgtattcctggtagagaaggccggtcgacgatcattattcctcattgggatgtcagggatgttcgtatgcgctatcttcatgtctgtgggtcttgtattgctgaataaattcagctggatgtcctatgtaagtatgatagctatttttctatttgtcagcttttttgagattggtccaggaccaattccatggttcatggtcgctgaatttttttcccaggggccacgccctgcagccctcgcaattgccgctttcagcaattggacttgcaacttcatcgtggcactctgtttccaatatatcgccgatttttgcggtccctacgtgttcttcctattcgctggagtcttattggcctttactctgttcacatttttcaaggtgcctgaaacaaaggggaagtcgtttgaagaaatcgctgcagagtttcagaagaaaagcgggtcagcacaccgacctaaggccgcagttgagatgaagtttctgggcgctacagagacagtttag

SEQ ID NO: 98918 - DNA, 1533 bp, Artificial Sequence
  derived and/or modified sequence
aggcaggagctagtcaggtgcatgtgccacactcacacaagacctggaattgacaggactcccaactagtacaatgacagaagataaggtcactgggaccctggttttcactgtcatcactgctgtgctgggttccttccagtttggatatgacattggtgtgatcaatgcacctcaacagaatcaaagccatgttagtagcaaacattctgtcattagttggagctctcttgatggggttttcaaaattgggaccatctcatatacttataattgctggaagaagcatatcaggactatattgtgggctaatttcaggcctggttcctatgtatatcggtgaaattgctccaaccgctctcaggggagcacttggcacttttcatcagctggccatcgtcacgggcattcttattagtcagattattggtcttgaatttatcttgggcaattatgatctgtggcacatcctgcttggcctgtctggtgtgcgagccatccttcagtctctgctactctttttctgtccagaaagccccagatacctttacatcaagttagatgaggaagtcaaagcaaaacaaagcttgaaaagactcagaggatatgatgatgtcaccaaagatattaatgaaatgagaaaagaaagagaagaagcatcgagtgagcagaaagtctctataattcagctcttcaccaattccagctaccgacagcctattctagtggcactgatgctgcatgtggctcagcaattttccggaatcaatggcattttttactactcaaccagcatttttcagacggctggtatcagcaaacctgtttatgcaaccattggagttggcgctgtaaacatggttttcactgctgtctctgtattccttgtggagaaggcagggcgacgttctctctttctaattggaatgagtgggatgtttgtttgtgccatcttcatgtcagtgggacttgtgctgctgaataagttctcttggatgagttatgtgagcatgatagccatcttcctctttgtcagcttctttgaaattgggccaggcccgatcccctggttcatggtggctgagtttttcagtcaaggaccacgtcctgctgctttagcaatagctgcattcagcaattggacctgcaatttcattgtagctctgtgtttccagtacattgcggacttctgtggaccttatgtgtttttcctctttgctggagtgctcctggcctttaccctgttcacattttttaaagttccagaaaccaaaggaaagtcttttgaggaaattgctgcagaattccaaaagaagagtggctcagcccacaggccaaaagctgctgtagaaatgaaattcctaggagctacagagactgtgtaaaaaaaaaaccctgctttttgacatgaacagaaacaataagggaaccgtctgtttttaaatgatgattccttgagcattttatatccacatctttaagtattgttttatttttatgtgctctcatcagaaatgtcatcaaatattacca

SEQ ID NO: 98919 - protein, 237 aa, Artificial Sequence
  derived and/or modified sequence
MLEEDMEVAIKMVVVGNGAVGKSSMIQRYCKGIFTKDYKKTIGVDFLERQIQVNDEDVRLMLWDTAGQEEFDAITKAYYRGAQACVLVFSTTDRESFEAVSSWREKVVAEVGDIPTVLVQNKIDLLDDSCIKNEEAEALAKRLKLRFYRTSVKEDLNVNEVFKYLAEKYLQKLKQQIAEDPELTHSSSNKIGVFNTSGGSHSGQNSGTLNGGDVINLRPNKQRTKKNRNPFSSCSIP

SEQ ID NO: 98920 - DNA, 714 bp, Artificial Sequence
  derived and/or modified sequence
atgctggaggaggacatggaggttgcgattaagatggttgtcgtgggcaatggcgcagtgggcaaatctagtatgatccagcgttactgtaagggtatctttactaaggactataagaagacaataggagtggacttcctggagcgacaaatacaggtcaacgatgaagatgtcaggcttatgctgtgggataccgcaggacaggaagagttcgatgcgataactaaagcatattacagaggggctcaggcatgcgtcttggtattctccaccacagaccgcgagtcttttgaagcagtgtcatcctggcgtgagaaagtggtggccgaggtcggggatatccccacagtgcttgtgcaaaacaaaattgatctgctcgacgactcctgcatcaaaaacgaagaagcagaggccttggcgaaacgactgaagttgcgattctaccggacaagtgtgaaggaagatctgaacgtgaatgaggtctttaagtatttagctgaaaagtatctacagaagctgaaacagcagattgctgaggatcctgaactaacacattctagttctaataaaattggagtgtttaatacctccggaggcagccacagcggacagaacagcggaactctaaacggaggagatgtcattaacctgcgccccaacaagcagagaactaaaaagaatagaaatcccttcagttcatgctctattccatag

SEQ ID NO: 98921 - DNA, 714 bp, Artificial Sequence
  derived and/or modified sequence
atgctggaggaagatatggaggtggcaattaagatggtggttgtggggaatggcgccgttggcaagagctctatgatccagaggtattgcaaggggatctttaccaaggactataagaagaccattggagtggatttccttgagagacagatccaggtgaatgatgaagatgttcgcctgatgctgtgggacactgccggacaggaggaatttgacgctattactaaagcctactaccgaggtgcgcaggcctgcgtcctggtcttctctactacagacagggaaagttttgaggccgtgtcgagttggagagagaaagttgttgcagaagttggagatatacccacggtgctggtacagaacaagattgacttgctggacgattcatgcatcaaaaacgaagaagccgaggctctggctaaacgactcaagctcagattctatcgaacctctgtaaaagaggatctgaatgtgaatgaggtgttcaaatatctggcggagaaatacctgcaaaagctcaaacagcagattgctgaggaccccgaactcacccactcttcttccaataaaatcggcgtttttaacacctctggaggaagccactccgggcagaattctggcacactaaatggcggcgacgtaatcaacctccgcccaaacaaacagagaactaaaaagaataggaatcccttctctagctgcagcatcccctag

SEQ ID NO: 98922 - DNA, 714 bp, Artificial Sequence
  derived and/or modified sequence
atgctggaggaggacatggaggtggccatcaagatggtggtggtgggcaatggagctgtgggcaagagctccatgatccagcgctactgcaagggcatcttcaccaaggactacaagaagaccatcggcgtggacttcctggagcggcagatccaggtgaatgatgaagatgtgcggctgatgctgtgggacacagctggccaggaggagtttgatgccatcaccaaggcctactacagaggagcccaggcctgtgtgctggtgttcagcaccacagaccgggagagctttgaagctgtgtcctcctggagggagaaggtggtggccgaggtgggggacatccccaccgtgctggtgcagaacaagattgacctgctggatgacagctgcatcaagaatgaggaggccgaggccctggccaagaggctgaagctgcgcttctaccgcacctctgtgaaggaggacctgaatgtgaatgaggtgttcaagtacctggccgagaagtacctgcagaagctgaagcagcagattgctgaagatcctgagctgacccacagcagcagcaacaagattggagtcttcaacaccagcggcggcagccacagcggccagaacagcggcaccctgaatggaggagatgtgatcaacctgcggcccaacaagcagaggaccaagaagaacagaaaccccttcagcagctgcagcatcccctag

SEQ ID NO: 98923 - DNA, 714 bp, Artificial Sequence
  derived and/or modified sequence
atgctggaggaggacatggaggtggccatcaagatggtggtggtgggcaacggagccgtcggcaaaagcagtatgatccagagatattgtaaaggcatcttcacaaaagactataaaaaaacaattggagttgatttcctggaaaggcaaatacaggtgaacgatgaagacgttagactgatgctttgggataccgccggacaggaagaatttgatgcaataacgaaggcgtactaccgcggagctcaagcatgcgtcctggtgttctccaccaccgaccgggagagttttgaagcagtaagcagctggagggaaaaagtggttgctgaagtcggtgacattccaacagtactcgtccagaacaagatagatctgttagacgattcctgtattaaaaacgaagaagccgaggctcttgctaaaaggctgaaactgcgtttctataggacctcagtgaaagaggacctgaacgtcaacgaggtgttcaagtatctggcggaaaaatatctgcaaaagcttaagcagcaaatagcagaagaccctgagctgacccacagcagctccaataaaataggtgtcttcaatacaagtggtgggtcacactccgggcagaattccgggacgctaaacggaggagatgtgataaatctacgccctaataagcagaggacaaaaaagaaccggaacccatttagttcatgttccatcccttag

SEQ ID NO: 98924 - DNA, 714 bp, Artificial Sequence
  derived and/or modified sequence
atgctggaggaggacatggaggtggccatcaagatggtggtggtgggcaatggcgccgtggggaaatcgagtatgatccaacgctattgtaaaggcatctttacaaaggactataaaaaaacaattggggtggatttcctggaaagacagatccaggtgaacgatgaggacgtgaggctaatgctctgggatacagccgggcaagaagagttcgatgcgatcacaaaagcatactatcggggggcccaagcatgtgtcttagtgttctccacaacagacagagagtcatttgaggctgtgtctagctggcgggagaaggttgtagctgaggttggagacatccctacagttttagtccagaataagattgatctgctcgatgacagctgcatcaaaaatgaagaagcagaggctttagcgaaacggctaaagcttcgcttctacagaacatcagtaaaagaggatctcaatgttaatgaagtgtttaaatatctagctgagaagtacctccagaaactaaagcagcagatcgcagaagatcctgagttaactcactcctcaagcaataagatcggggtattcaataccagcggcggctctcatagtggccaaaacagtgggaccctgaatggtggtgacgttattaacttgcggcctaacaagcagcgaactaaaaagaataggaacccattcagctcctgcagcatcccatag

SEQ ID NO: 98925 - DNA, 714 bp, Artificial Sequence
  derived and/or modified sequence
atgctggaggaggacatggaggtggccatcaagatggtggtagtgggtaatggcgcagttggaaaatcatctatgattcagaggtactgtaaaggcatcttcactaaagactacaagaaaaccattggtgtggattttcttgagagacagatccaggtgaatgacgaggatgtgagactcatgctctgggataccgccggacaagaggaatttgacgctatcaccaaggcgtattatagaggagcacaggcatgcgtgcttgtgttttctacgactgatcgcgaatcgtttgaagccgtaagctcttggagagagaaagttgtcgctgaagttggcgacatcccaacagttctggtgcagaacaagatcgatctcctcgacgactcttgcattaaaaacgaggaggccgaggccctggccaagagactgaagttacgcttctataggacctccgtgaaggaggacctgaacgtaaacgaagtgttcaaatacctggcagaaaaatacctgcagaagcttaaacaacagatcgcagaagatccagaactcacacattcctcctccaataagatcggggtttttaataccagcggcggttcgcactcaggacaaaacagtggcactctgaacgggggtgacgttatcaatcttagaccaaataagcagcggaccaaaaagaaccggaacccattctctagctgcagcatcccctag

SEQ ID NO: 98926 - DNA, 714 bp, Artificial Sequence
  derived and/or modified sequence
atgctggaagaggatatggaagtggccatcaagatggttgtggtggggaacggagcggttggaaaatcatcaatgatccagcggtattgcaaagggattttcacaaaagattataagaagaccataggtgttgactttctagagcgtcaaatacaggtgaacgatgaggacgttcgtctcatgctatgggatactgctggtcaagaagagttcgacgctattacaaaggcttattataggggagcacaggcgtgcgtcctcgtgttctccacaactgacagagagtctttcgaggcggtatccagttggcgagagaaggtggtcgctgaagtgggcgatatccccacagtcttggtgcaaaacaaaattgatctcctggacgatagttgcattaagaacgaagaagctgaagctctggctaaacgtctcaaattaaggttttatcggacatcggtgaaggaggacctgaatgtgaacgaagtattcaaatatctggcagagaagtacctgcaaaaactgaagcagcaaatcgccgaggacccggaattaacccattccagctcaaataaaattggggtattcaacaccagcggtggaagccactctggtcagaatagcggcaccctgaacgggggagatgtgataaaccttcgcccaaacaaacaacgaactaaaaaaaaccgcaaccctttctcctcttgctcaattccttag

SEQ ID NO: 98927 - DNA, 2986 bp, Artificial Sequence
  derived and/or modified sequence
atgaggggagtcgagactcccgcgccccaccacccccggcggagctgctgctgagccactcaatctgagccctggctactaataaagttcgtttaaaaatcataatcattcttaagagagcgaaagagggtgcgaactagccgctcggccccgcagggagagctggcgcgtcgggaggagacagcggcggcagcggttgcgccgcgaccaggaggagccggtggcgccgggcggcgggtccgcggccggtgggggacggtgagtagcggctcgcgctgcggtgcagcggcgctgcactcactcgccctctccaggggctgggggttcgtccggctccactggggaagactcagcttctccccggggtcccgggttgtgccttactctccggagtgggcaggggtatcgagggcaggggcctcccggcccggctcccccatcccccggttcggaccgccgagcgccggctctcccctccctgagcaccgatcccaagttccagctagagaaggtgggcggcagcgccagcccggcgccccctcccagctcccagcgatttgagagggaagatctgatctcctagaattagagttggtacagaaaccatttcagctccaaaaatgttggaggaagatatggaagtcgccataaagatggtggttgtagggaatggagcagttggaaaatcaagtatgattcagcgatattgcaaaggcatttttacaaaagactacaagaaaaccattggagttgattttttggagcgacaaattcaagttaatgatgaagatgtcagactaatgttatgggacactgcaggtcaggaggaatttgatgcaattacaaaggcctactatcgaggagcccaggcttgtgtgctcgtgttctctaccacagatagggaatcttttgaagcagtttccagttggagagagaaagtagtagccgaagtgggagatataccaactgtacttgtgcaaaacaagattgatcttctggatgattcttgtataaagaatgaggaagctgaggcactggcaaaaaggttaaagttaagattctacagaacatcagtgaaagaagatctaaatgtgaatgaagtttttaagtatttggctgaaaaataccttcagaaactcaaacaacaaatagctgaggatccagaactaacgcattcaagtagtaacaagattggtgtctttaatacatctggtggaagtcactccggtcagaattcaggtaccctcaatggtggagatgtcatcaatcttagacccaacaaacaaaggaccaagaaaaacagaaatccttttagcagctgtagcataccctaagatgttttgggaggaaaacaattgaattacattgtgcaatgcattaagaaacccatccagctgtcatggtatgttacaaggttttcagcagactttgctcctaatggctctctgaaagtgacagacttaaatattgctctgcagtgcttttcagaatgtagagtgagacctctggtggaaaaattattgccctgtggactcctttaattttttttacattagacgaagcttctcctgtttgtaaaggaatgctataagaaatttcaaacacaggttttgcggaattttaaatgctggaaaacataaatgaaatgcctaaatatattgttacagattttaatactgtggatcaaggaaagatagcaagcattcttttcctgaaattggtcatgtagcttttctgcgaaatagtattgaatctgaatactttcacaaaataatactgaaaggtaaaccctaaatcttgccagactgcattagtattttggcattgaaacttgtgcaatatctgtgtaatgtagaatgtggggtgtgcatgcagatgtctggtactggagtaagctgaaggtatgtgcagtatttaagaaaatgtacattctaattaattcacttataaaaccatttacatattgtgtatatgtttttattttcaaatgataaactctagacatatattttgcaaaatgagcttgggtttaaaaagtgctttgtgccaaaaatatcatacctaatttttatagtgctttactatcagaatttatattgtttattatatcttttaaaagcagtaagcagttttcatctgacagcgtagataaaagaggagtataggaatttgaatgctagagcatctcccaggtgagccttattgcagatctttttgatatagtcacccataagcatggtgagctcctgctctcataaggtcagccaaagccccttaagaaggtacacagcacatctgcagtcattcaggaggtcctgtgaagtgtggtgatgcatctaacaccttttgctgctcactgagaacccagctttgaacttacaagattacactaaccatttttaaagtgcacaaaaatattattattagtcttaactaaaattacatattttataatgccctgcaactctaaaccatccttttgtttacacatttttgtatggtattttaagattatcaatcacttcaacatttctataaccttgtttgtatagcactttctcaagagctgtcagtcccacatacagaatcatttcttttacaaaatgatttaatatgtaatcatgtgtcaggacataaattttgtcacttgggacagtagctttccagctaagataattgcgtgaactctgttaaaactgattatcactcatcaatggctttatttttaacctataaataacccctttcaatatacctggtttttacagcattgcaaaatctgtaaaaataacttttattggaaaatgtcatgaagtcatttttcattatttgtactaaacaatgttttatgtactccttttgtgttttatcttttgtttttccatctgtactcccctcatcctcctaatgttgagaaaatcaaatttcctgggtgtgtccttgttaagtgatcaaaagtaaatgttctctttgccattttagatgg

SEQ ID NO: 98928 - DNA, 1530 bp, Artificial Sequence
  derived and/or modified sequence
tgacactggttgctacagaattaactttactcggagatccgaggagccatcggcagttcccaggagtaagaacctgagagcgtgtgagaatttgagagggaagatctgatctcctagaattagagttggtacagaaaccatttcagctccaaaaatgttggaggaagatatggaagtcgccataaagatggtggttgtagggaatggagcagttggaaaatcaagtatgattcagcgatattgcaaaggcatttttacaaaagactacaagaaaaccattggagttgattttttggagcgacaaattcaagttaatgatgaagatgtcagactaatgttatgggacactgcaggtcaggaggaatttgatgcaattacaaaggcctactatcgaggagcccaggcttgtgtgctcgtgttctctaccacagatagggaatcttttgaagcagtttccagttggagagagaaagtagtagccgaagtgggagatataccaactgtacttgtgcaaaacaagattgatcttctggatgattcttgtataaagaatgaggaagctgaggcactggcaaaaaggttaaagttaagattctacagaacatcagtgaaagaagatctaaatgtgaatgaagtttttaagtatttggctgaaaaataccttcagaaactcaaacaacaaatagctgaggatccagaactaacgcattcaagtagtaacaagattggtgtctttaatacatctggtggaagtcactccggtcagaattcaggtaccctcaatggtggagatgtcatcaatcttagacccaacaaacaaaggaccaagaaaaacagaaatccttttagcagctgtagcataccctaagatgttttgggaggaaaacaattgaattacattgtgcaatgcattaagaaacccatccagctgtcatggtatgttacaaggttttcagcagactttgctcctaatggctctctgaaagtgacagacttaaatattgctctgcagtgcttttcagaatgtagagtgagacctctggtggaaaaattattgccctgtggactcctttaattttttttacattagacgaagcttctcctgtttgtaaaggaatgctataagaaatttcaaacacaggttttgcggaattttaaatgctggaaaacataaatgaaatgcctaaatatattgttacagattttaatactgtggatcaaggaaagatagcaagcattcttttcctgaaattggtcatgtagcttttctgcgaaatagtattgaatctgaatactttcacaaaataatactgaaaggtaaaccctaaatcttgccagactgcattagtattttggcattgaaacttgtgcaatatctgtgtaatgtagaatgtggggtgtgcatgcagatgtctggtactggagtaagctgaaggtatgtgcagtatttaagaaaatgtacattctaattaattcacttataaaaccatttacatattgtgtatatgtttttattttcaaatgataaac

SEQ ID NO: 98929 - DNA, 714 bp, Artificial Sequence
  derived and/or modified sequence
atgctggaggaggacatggaggtggccatcaagatggtggtggtgggcaacggcgccgtgggcaagagcagcatgatccagagatactgcaagggcatcttcaccaaggactacaagaagaccatcggcgtggacttcctggagagacagatccaggtgaacgacgaggacgtgagactgatgctgtgggacaccgccggccaggaggagttcgacgccatcaccaaggcctactacagaggcgcccaggcctgcgtgctggtgttcagcaccaccgacagagagagcttcgaggccgtgagcagctggagagagaaggtggtggccgaggtgggcgacatccccaccgtgctggtgcagaacaagatcgacctgctggacgacagctgcatcaagaacgaggaggccgaggccctggccaagagactgaagctgagattctacagaaccagcgtgaaggaggacctgaacgtgaacgaggtgttcaagtacctggccgagaagtacctgcagaagctgaagcagcagatcgccgaggaccccgagctgacccacagcagcagcaacaagatcggcgtgttcaacaccagcggcggcagccacagcggccagaacagcggcaccctgaacggcggcgacgtgatcaacctgagacccaacaagcagagaaccaagaagaacagaaaccccttcagcagctgcagcatcccctag

SEQ ID NO: 98930 - protein, 943 aa, Artificial Sequence
  derived and/or modified sequence
MPSTSFPVPSKFPLGPAAAVFGRGETLGPAPRAGGTMKSAEEEHYGYASSNVSPALPLPTAHSTLPAPCHNLQTSTPGIIPPADHPSGYGAALDGGPAGYFLSSGHTRPDGAPALESPRIEITSCLGLYHNNNQFFHDVEVEDVLPSSKRSPSTATLSLPSLEAYRDPSCLSPASSLSSRSCNSEASSYESNYSYPYASPQTSPWQSPCVSPKTTDPEEGFPRGLGACTLLGSPRHSPSTSPRASVTEESWLGARSSRPASPCNKRKYSLNGRQPPYSPHHSPTPSPHGSPRVSVTDDSWLGNTTQYTSSAIVAAINALTTDSSLDLGDGVPVKSRKTTLEQPPSVALKVEPVGEDLGSPPPPADFAPEDYSSFQHIRKGGFCDQYLAVPQHPYQWAKPKPLSPTSYMSPTLPALDWQLPSHSGPYELRIEVQPKSHHRAHYETEGSRGAVKASAGGHPIVQLHGYLENEPLMLQLFIGTADDRLLRPHAFYQVHRITGKTVSTTSHEAILSNTKVLEIPLLPENSMRAVIDCAGILKLRNSDIELRKGETDIGRKNTRVRLVFRVHVPQPSGRTLSLQVASNPIECSQRSAQELPLVEKQSTDSYPVVGGKKMVLSGHNFLQDSKVIFVEKAPDGHHVWEMEAKTDRDLCKPNSLVVEIPPFRNQRITSPVHVSFYVCNGKRKRSQYQRFTYLPANVPIIKTEPTDDYEPAPTCGPVSQGLSPLPRPYYSQQLAMPPDPSSCLVAGFPPCPQRSTLMPAAPGVSPKLHDLSPAAYTKGVASPGHCHLGLPQPAGEAPAVQDVPRPVATHPGSPGQPPPALLPQQVSAPPSSSCPPGLEHSLCPSSPSPPLPPATQEPTCLQPCSPACPPATGRPQHLPSTVRRDESPTAGPRLLPEVHEDGSPNLAPIPVTVKREPEELDQLYLDDVNEIIRNDLSSTSTHS

SEQ ID NO: 98931 - protein, 907 aa, Artificial Sequence
  derived and/or modified sequence
MKSGTLEHYGYASSNVSPALPLPTAHSTLPAPCHNLQTSTPGIIPPADHPSGYGAALDGGPAGYFLSSGHTRPDGAPALESPRIEITSCLGLYHNNNQFFHDVEVEDVLPSSKRSPSTATLSLPSLEAYRDPSCLSPASSLSSRSCNSEASSYESNYSYPYASPQTSPWQSPCVSPKTTDPEEGFPRGLGACTLLGSPRHSPSTSPRASVTEESWLGARSSRPASPCNKRKYSLNGRQPPYSPHHSPTPSPHGSPRVSVTDDSWLGNTTQYTSSAIVAAINALTTDSSLDLGDGVPVKSRKTTLEQPPSVALKVEPVGEDLGSPPPPADFAPEDYSSFQHIRKGGFCDQYLAVPQHPYQWAKPKPLSPTSYMSPTLPALDWQLPSHSGPYELRIEVQPKSHHRAHYETEGSRGAVKASAGGHPIVQLHGYLENEPLMLQLFIGTADDRLLRPHAFYQVHRITGKTVSTTSHEAILSNTKVLEIPLLPENSMRAVIDCAGILKLRNSDIELRKGETDIGRKNTRVRLVFRVHVPQPSGRTLSLQVASNPIECSQRSAQELPLVEKQSTDSYPVVGGKKMVLSGHNFLQDSKVIFVEKAPDGHHVWEMEAKTDRDLCKPNSLVVEIPPFRNQRITSPVHVSFYVCNGKRKRSQYQRFTYLPANVPIIKTEPTDDYEPAPTCGPVSQGLSPLPRPYYSQQLAMPPDPSSCLVAGFPPCPQRSTLMPAAPGVSPKLHDLSPAAYTKGVASPGHCHLGLPQPAGEAPAVQDVPRPVATHPGSPGQPPPALLPQQVSAPPSSSCPPGLEHSLCPSSPSPPLPPATQEPTCLQPCSPACPPATGRPQHLPSTVRRDESPTAGPRLLPEVHEDGSPNLAPIPVTVKREPEELDQLYLDDVNEIIRNDLSSTSTHS

SEQ ID NO: 98932 - protein, 471 aa, Artificial Sequence
  derived and/or modified sequence
MLQLFIGTADDRLLRPHAFYQVHRITGKTVSTTSHEAILSNTKVLEIPLLPENSMRAVIDCAGILKLRNSDIELRKGETDIGRKNTRVRLVFRVHVPQPSGRTLSLQVASNPIECSQRSAQELPLVEKQSTDSYPVVGGKKMVLSGHNFLQDSKVIFVEKAPDGHHVWEMEAKTDRDLCKPNSLVVEIPPFRNQRITSPVHVSFYVCNGKRKRSQYQRFTYLPANVPIIKTEPTDDYEPAPTCGPVSQGLSPLPRPYYSQQLAMPPDPSSCLVAGFPPCPQRSTLMPAAPGVSPKLHDLSPAAYTKGVASPGHCHLGLPQPAGEAPAVQDVPRPVATHPGSPGQPPPALLPQQVSAPPSSSCPPGLEHSLCPSSPSPPLPPATQEPTCLQPCSPACPPATGRPQHLPSTVRRDESPTAGPRLLPEVHEDGSPNLAPIPVTVKREPEELDQLYLDDVNEIIRNDLSSTSTHS

SEQ ID NO: 98933 - DNA, 4762 bp, Artificial Sequence
  derived and/or modified sequence
ggcgggcgctcggcgactcgtccccggggccccgcgcgggcccgggcagcaggggcgtgatgtcacggcagggagggggcgcgggagccgccgggccggcggggaggcgggggaggtgttttccagctttaaaaaggcaggaggcagagcgcggccctgcgtcagagcgagactcagaggctccgaactcgccggcggagtcgccgcgccagatcccagcagcagggcgcgggcaccggggcgcgggcagggctcggagccaccgcgcaggtcctagggccgcggccgggccccgccacgcgcgcacacgcccctcgatgactttcctccggggcgcgcggcgctgagcccggggcgagggctgtcttcccggagacccgaccccggcagcgcggggcggccgcttctcctgtgcctccgcccgccgctccactccccgccgccgccgcgcggatgccaagcaccagctttccagtcccttccaagtttccacttggccctgcggctgcggtcttcgggagaggagaaactttggggcccgcgccgcgcgccggcggcaccatgaagtcagcggaggaagaacactatggctatgcatcctccaacgtcagccccgccctgccgctccccacggcgcactccaccctgccggccccgtgccacaaccttcagacctccacaccgggcatcatcccgccggcggatcacccctcggggtacggagcagctttggacggtgggcccgcgggctacttcctctcctccggccacaccaggcctgatggggcccctgccctggagagtcctcgcatcgagataacctcgtgcttgggcctgtaccacaacaataaccagtttttccacgatgtggaggtggaagacgtcctccctagctccaaacggtccccctccacggccacgctgagtctgcccagcctggaggcctacagagacccctcgtgcctgagcccggccagcagcctgtcctcccggagctgcaactcagaggcctcctcctacgagtccaactactcgtacccgtacgcgtccccccagacgtcgccatggcagtctccctgcgtgtctcccaagaccacggaccccgaggagggctttccccgcgggctgggggcctgcacactgctgggttccccgcggcactccccctccacctcgccccgcgccagcgtcactgaggagagctggctgggtgcccgctcctccagacccgcgtccccttgcaacaagaggaagtacagcctcaacggccggcagccgccctactcaccccaccactcgcccacgccgtccccgcacggctccccgcgggtcagcgtgaccgacgactcgtggttgggcaacaccacccagtacaccagctcggccatcgtggccgccatcaacgcgctgaccaccgacagcagcctggacctgggagatggcgtccctgtcaagtcccgcaagaccaccctggagcagccgccctcagtggcgctcaaggtggagcccgtcggggaggacctgggcagccccccgcccccggccgacttcgcgcccgaagactactcctctttccagcacatcaggaagggcggcttctgcgaccagtacctggcggtgccgcagcacccctaccagtgggcgaagcccaagcccctgtcccctacgtcctacatgagcccgaccctgcccgccctggactggcagctgccgtcccactcaggcccgtatgagcttcggattgaggtgcagcccaagtcccaccaccgagcccactacgagacggagggcagccggggggccgtgaaggcgtcggccggaggacaccccatcgtgcagctgcatggctacttggagaatgagccgctgatgctgcagcttttcattgggacggcggacgaccgcctgctgcgcccgcacgccttctaccaggtgcaccgcatcacagggaagaccgtgtccaccaccagccacgaggccatcctctccaacaccaaagtcctggagatcccactcctgccggagaacagcatgcgagccgtcattgactgtgccggaatcctgaaactcagaaactccgacattgaacttcggaaaggagagacggacatcgggaggaagaacacacgggtacggctggtgttccgcgttcacgtcccgcaacccagcggccgcacgctgtccctgcaggtggcctccaaccccatcgaatgctcccagcgctcagctcaggagctgcctctggtggagaagcagagcacggacagctatccggtcgtgggcgggaagaagatggtcctgtctggccacaacttcctgcaggactccaaggtcattttcgtggagaaagccccagatggccaccatgtctgggagatggaagcgaaaactgaccgggacctgtgcaagccgaattctctggtggttgagatcccgccatttcggaatcagaggataaccagccccgttcacgtcagtttctacgtctgcaacgggaagagaaagcgaagccagtaccagcgtttcacctaccttcccgccaacgttccaattataaaaacagaacccactgatgattatgagcctgctccaacctgtggaccggtgagccaggggttaagtcctctcccaagaccatactacagccagcagctcgcgatgccacccgaccccagctcctgcctcgtggccggcttcccgccctgtccgcagagaagcaccctgatgccagcggcccctggcgtgagccccaagctccacgacctttctcccgctgcctacaccaagggcgttgccagcccgggccactgtcacctcggactcccgcagccggccggagaggcccccgccgtccaggacgtgcccaggccagtggccacgcaccccggctcgcccgggcagccacccccggccctgctgccacagcagtaaatgaaataatacgaaatgacctctccagcacgagcacccactcctagttgccacattggagcactcagttcagcaggggtatgctgacttcagcagacaaagacttttgaataaataaactgaactcacacctggtaccactcagaacctccaactgactgaatgccaggagctgaacattaatatgtgcaaagattggctctccaacaagaaggaaagcagggaggaagggagaccactgtgtcacctggaggagaagtcatctcatgacaacagaagggaggtggccgggctgagcacgggagacccaccgtgcaggggcctttcatgggaacggcccacacgcagtttgaccccacgcccagcccttctggcacccctggggttcaatactggaagtgccttatttaaccagaccatcagggcatcatagaattgagcattgaatttgctactgtaggagtatttttaggagcagaaactgcaaacacatttcattgtgaggttttaccctctgtatgaatgaagagaacgctggaaggctgcgagaggactctagtatgagtctccaacatttggaacgtttcctgggctgtcacgtacactcctgctgccttacacagtgcattttagaatcttccagtctgtcatctcagctcttttgtaacatgcttcccttgtctgcgcggttgaaaccgtaggcttgttcatagtcgcatgctcgcatctttgtttttaatctggcttcgaacatagcacaagtaacttgaatagcacatcaataggttactggacaaaagcagaaaaacctgttacaggatagcctgcatttgcatgtgtgtacatatctaggcatctatttatgtataaataataacagagccgacgtgtcctcgcccaggagggcttccctgtcagcaataaccggcatccgttttggaacctgcgtctggggctccagtcgctgctcttgctggcgtccatcgccgcctcggacggccgtgcattttctcgtctcacgcagttcgaggaggaccctagaaagccaggagctgtgattgacagtagctgtaggttaccagacggcaacattagaaagtgattgtaaataacatgcaacctaagtgtaatatatttgttcagttataagatgattgtttcacagaagccttaccactctctgcttcatctaagaaaaccaataccaaaaacgccactttaatgctcagccctgcgttgtgtgttttcagatgagttactgttaacaggtaggtttgtgtaggccttgctgggcactctgtacaattagttgcttattacgtatgattactcacagcgatctattgttccatataaccaaaaagcatggtttattcattgaaacacggttgacctgaactcgtgccttaggaattaatgcccccttatggaacctgcctgaattgcacctgcgggtggaggctccggctgtgaagtcactgaacagaacgtcgctgatggagaaagggctcccgcagaaggaacggcctgtaccgtgcgctccggcacaatcgcgtctcttgtgtctcactcacggaaagaaacaacctgaaggccatcccgtcggtctgcacgtaaccgtgaagacgtgtggccgcgtcccacctgcggctgggtaccctgcacccggcactgtaggagtcacgtgcagcctttctcaggggactgtcattgaaaaggaaacgtttgatgtctgtgtcagctgtctttgtagttaggaaatagatccaataaagccgtatttttttgctggaaaaaaaaaaaaaaaaaaaaaaaaaaaaaaaaaaaaaaa

SEQ ID NO: 98934 - DNA, 2478 bp, Artificial Sequence
  derived and/or modified sequence
atgcccagcaccagcttccccgtgcccagcaagttccccctgggccccgccgccgccgtgttcggcagaggcgagaccctgggccccgcccccagagccggcggcaccatgaagagcgccgaggaggagcactacggctacgccagcagcaacgtgagccccgccctgcccctgcccaccgcccacagcaccctgcccgccccctgccacaacctgcagaccagcacccccggcatcatcccccccgccgaccaccccagcggctacggcgccgccctggacggcggccccgccggctacttcctgagcagcggccacaccagacccgacggcgcccccgccctggagagccccagaatcgagatcaccagctgcctgggcctgtaccacaacaacaaccagttcttccacgacgtggaggtggaggacgtgctgcccagcagcaagagaagccccagcaccgccaccctgagcctgcccagcctggaggcctacagagaccccagctgcctgagccccgccagcagcctgagcagcagaagctgcaacagcgaggccagcagctacgagagcaactacagctacccctacgccagcccccagaccagcccctggcagagcccctgcgtgagccccaagaccaccgaccccgaggagggcttccccagaggcctgggcgcctgcaccctgctgggcagccccagacacagccccagcaccagccccagagccagcgtgaccgaggagagctggctgggcgccagaagcagcagacccgccagcccctgcaacaagagaaagtacagcctgaacggcagacagcccccctacagcccccaccacagccccacccccagcccccacggcagccccagagtgagcgtgaccgacgacagctggctgggcaacaccacccagtacaccagcagcgccatcgtggccgccatcaacgccctgaccaccgacagcagcctggacctgggcgacggcgtgcccgtgaagagcagaaagaccaccctggagcagccccccagcgtggccctgaaggtggagcccgtgggcgaggacctgggcagcccccccccccccgccgacttcgcccccgaggactacagcagcttccagcacatcagaaagggcggcttctgcgaccagtacctggccgtgccccagcacccctaccagtgggccaagcccaagcccctgagccccaccagctacatgagccccaccctgcccgccctggactggcagctgcccagccacagcggcccctacgagctgagaatcgaggtgcagcccaagagccaccacagagcccactacgagaccgagggcagcagaggcgccgtgaaggccagcgccggcggccaccccatcgtgcagctgcacggctacctggagaacgagcccctgatgctgcagctgttcatcggcaccgccgacgacagactgctgagaccccacgccttctaccaggtgcacagaatcaccggcaagaccgtgagcaccaccagccacgaggccatcctgagcaacaccaaggtgctggagatccccctgctgcccgagaacagcatgagagccgtgatcgactgcgccggcatcctgaagctgagaaacagcgacatcgagctgagaaagggcgagaccgacatcggcagaaagaacaccagagtgagactggtgttcagagtgcacgtgccccagcccagcggcagaaccctgagcctgcaggtggccagcaaccccatcgagtgcagccagagaagcgcccaggagctgcccctggtggagaagcagagcaccgacagctaccccgtggtgggcggcaagaagatggtgctgagcggccacaacttcctgcaggacagcaaggtgatcttcgtggagaaggcccccgacggccaccacgtgtgggagatggaggccaagaccgacagagacctgtgcaagcccaacagcctggtggtggagatcccccccttcagaaaccagagaatcaccagccccgtgcacgtgagcttctacgtgtgcaacggcaagagaaagagaagccagtaccagagattcacctacctgcccgccaacgtgcccatcatcaagaccgagcccaccgacgactacgagcccgcccccacctgcggccccgtgagccagggcctgagccccctgcccagaccctactacagccagcagctggccatgccccccgaccccagcagctgcctggtggccggcttccccccctgcccccagagaagcaccctgatgcccgccgcccccggcgtgagccccaagctgcacgacctgagccccgccgcctacaccaagggcgtggccagccccggccactgccacctgggcctgccccagcccgccggcgaggcccccgccgtgcaggacgtgcccagacccgtggccacccaccccggcagccccggccagcccccccccgccctgctgccccagcagtag

SEQ ID NO: 98935 - DNA, 2832 bp, Artificial Sequence
  derived and/or modified sequence
atgcccagcaccagcttccccgtgcccagcaagttccccctgggccccgccgccgccgtgttcggcagaggcgagaccctgggccccgcccccagagccggcggcaccatgaagagcgccgaggaggagcactacggctacgccagcagcaacgtgagccccgccctgcccctgcccaccgcccacagcaccctgcccgccccctgccacaacctgcagaccagcacccccggcatcatcccccccgccgaccaccccagcggctacggcgccgccctggacggcggccccgccggctacttcctgagcagcggccacaccagacccgacggcgcccccgccctggagagccccagaatcgagatcaccagctgcctgggcctgtaccacaacaacaaccagttcttccacgacgtggaggtggaggacgtgctgcccagcagcaagagaagccccagcaccgccaccctgagcctgcccagcctggaggcctacagagaccccagctgcctgagccccgccagcagcctgagcagcagaagctgcaacagcgaggccagcagctacgagagcaactacagctacccctacgccagcccccagaccagcccctggcagagcccctgcgtgagccccaagaccaccgaccccgaggagggcttccccagaggcctgggcgcctgcaccctgctgggcagccccagacacagccccagcaccagccccagagccagcgtgaccgaggagagctggctgggcgccagaagcagcagacccgccagcccctgcaacaagagaaagtacagcctgaacggcagacagcccccctacagcccccaccacagccccacccccagcccccacggcagccccagagtgagcgtgaccgacgacagctggctgggcaacaccacccagtacaccagcagcgccatcgtggccgccatcaacgccctgaccaccgacagcagcctggacctgggcgacggcgtgcccgtgaagagcagaaagaccaccctggagcagccccccagcgtggccctgaaggtggagcccgtgggcgaggacctgggcagcccccccccccccgccgacttcgcccccgaggactacagcagcttccagcacatcagaaagggcggcttctgcgaccagtacctggccgtgccccagcacccctaccagtgggccaagcccaagcccctgagccccaccagctacatgagccccaccctgcccgccctggactggcagctgcccagccacagcggcccctacgagctgagaatcgaggtgcagcccaagagccaccacagagcccactacgagaccgagggcagcagaggcgccgtgaaggccagcgccggcggccaccccatcgtgcagctgcacggctacctggagaacgagcccctgatgctgcagctgttcatcggcaccgccgacgacagactgctgagaccccacgccttctaccaggtgcacagaatcaccggcaagaccgtgagcaccaccagccacgaggccatcctgagcaacaccaaggtgctggagatccccctgctgcccgagaacagcatgagagccgtgatcgactgcgccggcatcctgaagctgagaaacagcgacatcgagctgagaaagggcgagaccgacatcggcagaaagaacaccagagtgagactggtgttcagagtgcacgtgccccagcccagcggcagaaccctgagcctgcaggtggccagcaaccccatcgagtgcagccagagaagcgcccaggagctgcccctggtggagaagcagagcaccgacagctaccccgtggtgggcggcaagaagatggtgctgagcggccacaacttcctgcaggacagcaaggtgatcttcgtggagaaggcccccgacggccaccacgtgtgggagatggaggccaagaccgacagagacctgtgcaagcccaacagcctggtggtggagatcccccccttcagaaaccagagaatcaccagccccgtgcacgtgagcttctacgtgtgcaacggcaagagaaagagaagccagtaccagagattcacctacctgcccgccaacgtgcccatcatcaagaccgagcccaccgacgactacgagcccgcccccacctgcggccccgtgagccagggcctgagccccctgcccagaccctactacagccagcagctggccatgccccccgaccccagcagctgcctggtggccggcttccccccctgcccccagagaagcaccctgatgcccgccgcccccggcgtgagccccaagctgcacgacctgagccccgccgcctacaccaagggcgtggccagccccggccactgccacctgggcctgccccagcccgccggcgaggcccccgccgtgcaggacgtgcccagacccgtggccacccaccccggcagccccggccagcccccccccgccctgctgccccagcaggtgagcgccccccccagcagcagctgcccccccggcctggagcacagcctgtgccccagcagccccagcccccccctgccccccgccacccaggagcccacctgcctgcagccctgcagccccgcctgcccccccgccaccggcagaccccagcacctgcccagcaccgtgagaagagacgagagccccaccgccggccccagactgctgcccgaggtgcacgaggacggcagccccaacctggcccccatccccgtgaccgtgaagagagagcccgaggagctggaccagctgtacctggacgacgtgaacgagatcatcagaaacgacctgagcagcaccagcacccacagctag

SEQ ID NO: 98936 - DNA, 2724 bp, Artificial Sequence
  derived and/or modified sequence
atgaagagcggcaccctggagcactacggctacgccagcagcaacgtgagccccgccctgcccctgcccaccgcccacagcaccctgcccgccccctgccacaacctgcagaccagcacccccggcatcatcccccccgccgaccaccccagcggctacggcgccgccctggacggcggccccgccggctacttcctgagcagcggccacaccagacccgacggcgcccccgccctggagagccccagaatcgagatcaccagctgcctgggcctgtaccacaacaacaaccagttcttccacgacgtggaggtggaggacgtgctgcccagcagcaagagaagccccagcaccgccaccctgagcctgcccagcctggaggcctacagagaccccagctgcctgagccccgccagcagcctgagcagcagaagctgcaacagcgaggccagcagctacgagagcaactacagctacccctacgccagcccccagaccagcccctggcagagcccctgcgtgagccccaagaccaccgaccccgaggagggcttccccagaggcctgggcgcctgcaccctgctgggcagccccagacacagccccagcaccagccccagagccagcgtgaccgaggagagctggctgggcgccagaagcagcagacccgccagcccctgcaacaagagaaagtacagcctgaacggcagacagcccccctacagcccccaccacagccccacccccagcccccacggcagccccagagtgagcgtgaccgacgacagctggctgggcaacaccacccagtacaccagcagcgccatcgtggccgccatcaacgccctgaccaccgacagcagcctggacctgggcgacggcgtgcccgtgaagagcagaaagaccaccctggagcagccccccagcgtggccctgaaggtggagcccgtgggcgaggacctgggcagcccccccccccccgccgacttcgcccccgaggactacagcagcttccagcacatcagaaagggcggcttctgcgaccagtacctggccgtgccccagcacccctaccagtgggccaagcccaagcccctgagccccaccagctacatgagccccaccctgcccgccctggactggcagctgcccagccacagcggcccctacgagctgagaatcgaggtgcagcccaagagccaccacagagcccactacgagaccgagggcagcagaggcgccgtgaaggccagcgccggcggccaccccatcgtgcagctgcacggctacctggagaacgagcccctgatgctgcagctgttcatcggcaccgccgacgacagactgctgagaccccacgccttctaccaggtgcacagaatcaccggcaagaccgtgagcaccaccagccacgaggccatcctgagcaacaccaaggtgctggagatccccctgctgcccgagaacagcatgagagccgtgatcgactgcgccggcatcctgaagctgagaaacagcgacatcgagctgagaaagggcgagaccgacatcggcagaaagaacaccagagtgagactggtgttcagagtgcacgtgccccagcccagcggcagaaccctgagcctgcaggtggccagcaaccccatcgagtgcagccagagaagcgcccaggagctgcccctggtggagaagcagagcaccgacagctaccccgtggtgggcggcaagaagatggtgctgagcggccacaacttcctgcaggacagcaaggtgatcttcgtggagaaggcccccgacggccaccacgtgtgggagatggaggccaagaccgacagagacctgtgcaagcccaacagcctggtggtggagatcccccccttcagaaaccagagaatcaccagccccgtgcacgtgagcttctacgtgtgcaacggcaagagaaagagaagccagtaccagagattcacctacctgcccgccaacgtgcccatcatcaagaccgagcccaccgacgactacgagcccgcccccacctgcggccccgtgagccagggcctgagccccctgcccagaccctactacagccagcagctggccatgccccccgaccccagcagctgcctggtggccggcttccccccctgcccccagagaagcaccctgatgcccgccgcccccggcgtgagccccaagctgcacgacctgagccccgccgcctacaccaagggcgtggccagccccggccactgccacctgggcctgccccagcccgccggcgaggcccccgccgtgcaggacgtgcccagacccgtggccacccaccccggcagccccggccagcccccccccgccctgctgccccagcaggtgagcgccccccccagcagcagctgcccccccggcctggagcacagcctgtgccccagcagccccagcccccccctgccccccgccacccaggagcccacctgcctgcagccctgcagccccgcctgcccccccgccaccggcagaccccagcacctgcccagcaccgtgagaagagacgagagccccaccgccggccccagactgctgcccgaggtgcacgaggacggcagccccaacctggcccccatccccgtgaccgtgaagagagagcccgaggagctggaccagctgtacctggacgacgtgaacgagatcatcagaaacgacctgagcagcaccagcacccacagctag

SEQ ID NO: 98937 - DNA, 1416 bp, Artificial Sequence
  derived and/or modified sequence
atgctgcagctgttcatcggcaccgccgacgacagactgctgagaccccacgccttctaccaggtgcacagaatcaccggcaagaccgtgagcaccaccagccacgaggccatcctgagcaacaccaaggtgctggagatccccctgctgcccgagaacagcatgagagccgtgatcgactgcgccggcatcctgaagctgagaaacagcgacatcgagctgagaaagggcgagaccgacatcggcagaaagaacaccagagtgagactggtgttcagagtgcacgtgccccagcccagcggcagaaccctgagcctgcaggtggccagcaaccccatcgagtgcagccagagaagcgcccaggagctgcccctggtggagaagcagagcaccgacagctaccccgtggtgggcggcaagaagatggtgctgagcggccacaacttcctgcaggacagcaaggtgatcttcgtggagaaggcccccgacggccaccacgtgtgggagatggaggccaagaccgacagagacctgtgcaagcccaacagcctggtggtggagatcccccccttcagaaaccagagaatcaccagccccgtgcacgtgagcttctacgtgtgcaacggcaagagaaagagaagccagtaccagagattcacctacctgcccgccaacgtgcccatcatcaagaccgagcccaccgacgactacgagcccgcccccacctgcggccccgtgagccagggcctgagccccctgcccagaccctactacagccagcagctggccatgccccccgaccccagcagctgcctggtggccggcttccccccctgcccccagagaagcaccctgatgcccgccgcccccggcgtgagccccaagctgcacgacctgagccccgccgcctacaccaagggcgtggccagccccggccactgccacctgggcctgccccagcccgccggcgaggcccccgccgtgcaggacgtgcccagacccgtggccacccaccccggcagccccggccagcccccccccgccctgctgccccagcaggtgagcgccccccccagcagcagctgcccccccggcctggagcacagcctgtgccccagcagccccagcccccccctgccccccgccacccaggagcccacctgcctgcagccctgcagccccgcctgcccccccgccaccggcagaccccagcacctgcccagcaccgtgagaagagacgagagccccaccgccggccccagactgctgcccgaggtgcacgaggacggcagccccaacctggcccccatccccgtgaccgtgaagagagagcccgaggagctggaccagctgtacctggacgacgtgaacgagatcatcagaaacgacctgagcagcaccagcacccacagctag

SEQ ID NO: 98938 - DNA, 2478 bp, Artificial Sequence
  derived and/or modified sequence
atgcctagcacctccttcccagtcccgagtaaattcccattggggcccgccgcagccgtcttcggaagaggtgagacactcggcccagcccctagggctggaggcacgatgaagtcagccgaggaggagcactacgggtacgcgtcaagtaacgtttcacctgccttgcccctcccaaccgctcactcaactctgcccgctccgtgccataacctacagactagcactcccggcattatccctcccgccgaccacccctcaggctatggagcagcactggacggaggtccggctgggtactttctctcctctggacacactaggccagacggcgctcctgccctcgagagccctcggattgagataactagctgcctaggtttatatcacaacaacaatcagttttttcatgatgtagaagtggaggatgtcctgccgtccagcaagaggtcaccttccacagctactttgtctctgccatcactggaagcctacagagacccatcttgcctttccccagccagctccttgtcctcccgtagctgcaacagcgaagcttcttcctacgagtctaattattcatacccctatgcaagtcctcagacgagcccgtggcaatccccgtgcgtcagtccaaagaccacagaccccgaagaggggttccccaggggcctgggggcctgtacattacttgggtcaccacggcattcgccctctacctctccgcgtgcctctgtgaccgaggagagttggctgggcgccagaagttctagacctgccagcccctgcaataagaggaagtactctctcaacggccggcaaccgccctactcccctcaccattctcccactccttccccccacgggagtcccagagtctctgtgacggacgatagttggctgggcaataccacccagtacacctcttccgccattgtcgctgctatcaacgccttgacaacggattcgtccctcgacttaggcgatggagttccagtgaagtccagaaaaaccacactggagcagcccccatctgttgcactaaaggtggagcctgtcggagaagatttagggtcacccccccctccggccgattttgcacctgaagattactcttctttccaacatatcagaaaaggaggcttctgcgatcagtacttggctgtaccacaacatccgtaccagtgggcgaagcccaaacccttgtctccaacatcctacatgtcaccaacacttcccgctctggactggcagcttcccagccactcaggcccctatgagttgcgaatcgaggtgcagcccaagtcccatcacagggcccactacgagactgagggatcccggggcgcagtgaaagcaagcgcaggaggtcaccctatcgttcaactgcatggctatctggagaacgaaccactaatgctgcagttgttcattggcaccgcggacgacagattgcttcgccctcacgcgttctaccaggtgcataggatcactggcaagacagtgagcactaccagccatgaggcaatcctgtccaacacaaaagttttggaaataccgttattaccggaaaactcaatgcgcgccgtgatcgactgcgcagggatcctgaaactgcgtaacagcgatatcgagttacgcaaaggcgaaacggacatcgggagaaagaatacccgcgtccgcctggtgttccgggttcatgtgccacagccctcaggacgtaccctgagtcttcaggtcgcatctaacccaattgaatgctcccagcgaagtgcacaggaattgccacttgtggagaaacagtctaccgactcctaccccgtggtaggagggaaaaagatggtgctcagcgggcacaatttcttacaggacagtaaagtgatcttcgtggaaaaggcccccgatggacatcatgtgtgggaaatggaggctaagactgatcgcgatctgtgcaagcccaacagcttagttgtggagattcccccatttcgaaatcagagaattacctctcccgtgcatgtgtccttctacgtctgtaatggaaagaggaaacggtctcaatatcagcggttcacgtaccttcctgccaacgtccccattatcaagaccgaacccaccgacgattacgagccagcccccacctgtggaccagtcagccaaggactgtccccattaccgaggccatactatagccagcagctggctatgccccccgatccaagctcatgtcttgtggccgggtttccaccatgccctcagagaagcaccctgatgccagccgcacccggcgtgtcaccaaaactccatgacctgagcccagccgcttataccaaaggagtggcctctccaggccactgtcatcttggcctcccccagccagcaggggaggcacctgccgtgcaggatgtgccccggcccgtagccacacaccccggctcaccagggcagccaccacctgccctgctacctcagcaatag

SEQ ID NO: 98939 - DNA, 2832 bp, Artificial Sequence
  derived and/or modified sequence
atgccaagcactagttttccggttccttctaagttcccactcggtccagccgccgctgtcttcgggagaggcgagactctgggtcccgccccgcgcgccggtggaaccatgaaaagcgctgaggaggagcactatggctacgcctcttccaatgtctcacccgccctccccctccctaccgcccacagtactttgcctgcaccttgccacaaccttcaaactagcacgcctgggatcatccccccggccgaccacccaagcggctatggggctgcattggatggagggcctgccgggtacttcctaagctccggacatactcgtcccgacggcgcaccagcactggagagcccccgcattgagattacatcttgtctgggcctgtaccacaataacaaccagttttttcatgacgtggaggttgaggacgtcctcccgagcagcaagcgaagtccaagtacagcaactctcagtctgcctagcctggaggcttacagggacccatcctgcctgagcccagcttctagcctttccagtaggtcttgcaatagcgaggcatccagctacgagagcaactactcctacccgtacgcctctccccagacgagtccctggcagagcccctgcgtttcccccaagactaccgacccagaagaaggattcccccgtggtctgggcgcgtgtactctgctcggcagtccacgccactctccatccacttcccccagggcatctgttaccgaagagtcctggctcggggcgagatccagccggccagcgtccccctgtaacaagcgaaagtattccctgaacggccgacaacctccttactctccacaccatagcccaaccccctcgccacatggcagtcctcgtgtttctgtgaccgatgatagctggctaggcaacactactcaatacactagctcagccatcgtggccgccattaacgctctcaccacagatagtagtctggatttgggtgacggagtgcctgtgaagagtcgaaagaccacactagaacagcccccctcagtggcccttaaagtagagcccgtgggggaggacttagggtctcctccgcctcccgctgacttcgcacccgaagactacagctcattccagcatatccgaaaggggggtttctgtgatcagtatcttgccgtcccgcagcacccataccaatgggccaagcccaagccactttctcctactagttacatgtcccctacactacccgctctagattggcagttacccagccatagcggaccctacgaactcaggatcgaagtccagcccaagtcacatcatcgggcccactacgagaccgagggatctcgaggagcagttaaagcttcagctggtgggcacccgatcgtgcagctccacggatatttggaaaacgaacctctcatgctgcaactgtttatcggcactgcagacgacagactactgaggccacatgctttttatcaagtccacaggattacgggcaaaacggtgtccaccacaagccatgaggccattttatccaatacaaaggtcttagaaattcccctactcccagagaattctatgcgggcagtcatcgattgtgctggcatcttgaagctcagaaattctgacatcgaacttagaaaaggcgaaacggatattgggagaaaaaatacacgtgttaggctggtctttcgagtccacgtgccccagcctagcggaagaactctgtccttacaggtggcatctaaccccattgagtgttcccagcgtagtgcgcaggaactgccactcgtggagaagcaatcaacagacagttaccctgtcgtcggagggaaaaagatggtgctgtctggacataacttcctgcaagacagcaaggtaatttttgtcgagaaggctcccgacggccatcacgtctgggaaatggaggctaagacagaccgcgacctgtgcaagcccaattcactggtcgtggagataccccctttccgcaaccagcgtataacctcccctgttcatgtgtccttctacgtctgcaacggaaaacgaaaaaggagccaataccagcgttttacctatctgcccgccaatgtgccaattatcaagacagaacccacggatgattacgagcccgcgcctacgtgtggaccagttagccaaggactctcccctctgccccgtccctactactctcagcagctggccatgccccctgacccctcctcttgcctggttgctggattccctccctgcccacagaggtcaaccctcatgcctgcggcccctggcgtttcaccaaaactgcatgacctttctccggctgcgtacacgaagggcgtcgccagccccgggcactgtcatctgggcctcccacagccagcaggcgaggcccctgccgtccaagacgtccccaggcccgtggcaacccatccagggagtccgggacagccaccacctgccttgcttccccagcaggtttccgccccgccgtcaagctcttgtcccccaggtttggagcacagcctctgcccgtcttctcctagcccaccattgcctcctgccacacaggagcccacatgtctgcagccctgtagcccagcttgtccacccgccaccggccgaccacagcacctgccctcgaccgtgaggcgtgatgagtctccaacggcgggaccccggcttcttccagaagtacatgaagatgggtcccctaatttagctcccatacctgtcacagtgaaacgggaaccggaggagctggaccagctgtatttagacgatgttaatgagattattcggaacgacctgtcctcaactagtactcactcctag

SEQ ID NO: 98940 - DNA, 2724 bp, Artificial Sequence
  derived and/or modified sequence
atgaagtccgggactcttgaacattacgggtatgcttcatcgaacgtgagtccagcactgcctctaccaactgcccattctactcttccggccccctgtcacaatctgcagacctctactccaggtataattcctccagcagatcatccaagcggatacggggcagctttagacgggggaccagccggctattttttatcatcaggacacacacggcccgatggcgccccagctttggagtccccccgcatcgagattacctcctgcctgggcctgtatcataataacaaccagttcttccacgacgtggaggttgaggacgtgttgcccagctctaaacggtctccatctacggcaacattatccctgccctcactcgaggcataccgtgatccctcatgcctgtccccagcttcctccctgtcgtctagatcgtgcaattcagaggcgagctcgtatgaatctaattatagctatccctacgccagccctcagacatccccctggcaaagcccttgcgttagtcctaagactaccgaccctgaggagggttttccccgagggctcggagcctgcacactcttagggtcaccaagacactccccttcaacaagcccaagggccagtgtgacggaggaaagttggcttggcgcaaggagtagtcgccctgcttctccttgtaataagaggaagtatagtctgaacggccggcagcctccatactccccacatcactcaccaaccccctccccccatggctcaccccgggtatccgtgaccgacgatagctggcttggaaatactacgcagtacactagttcagcaatcgtagcagcaattaacgcccttactacagacagctccctggatttaggtgacggtgtccctgtcaagagtaggaagaccacactggaacagcctccatctgtcgcgttgaaagtggagccggtcggagaagacctggggagtcctcctcctcctgccgacttcgcacccgaggactacagttcgtttcaacatatccgaaagggtgggttctgtgatcagtatctggctgtgccccagcacccttatcagtgggcgaagcccaaaccgctgtctcccactagttatatgagccctaccctgccagctctcgattggcagctgcctagccatagcggcccctatgagttacgaatcgaggtgcaaccaaagtcacaccacagagcccattatgagaccgagggcagccgcggtgcagtgaaagcaagcgctggtggccatcccattgtgcagttgcatggctatttggagaacgaaccactcatgctgcagcttttcatcggtaccgctgacgaccgcctcttgaggccccacgctttctatcaggtgcacagaatcacagggaagacagtgtctaccacatcacatgaggcaatcctgtcaaacaccaaagttctggagatcccattactgcctgagaacagcatgagggccgtaatcgattgcgctggcatactcaaattgcgcaactccgacattgaactgaggaaaggggagacagacataggcaggaagaatactcgcgtgagactagtgtttcgtgtgcacgtgcctcaaccttctggtcggaccctctccctccaggtagcctccaacccgatcgaatgtagtcagagaagtgcccaagaactgcccctagtggaaaagcagagcacagactcctacccagtcgtaggcggaaaaaaaatggtgctctccgggcacaattttctgcaggactctaaggttatctttgtagagaaggctccagacggtcatcatgtctgggaaatggaagcaaaaaccgatagagatctatgtaagccaaactcactcgtcgtagaaattcccccttttcgtaatcaacggatcacaagcccagtgcacgtgtcgttttacgtatgtaacgggaaacgcaagaggtcccagtaccaacggtttacatatctccccgcaaacgttccgatcatcaagaccgagccaacagacgactacgaacctgctcccacgtgtggcccagtttcccagggcctctctcccctgccacggccctattatagtcaacagctggcaatgcctccagatccctcctcatgtctggtggcagggttccctccttgtcctcaaagatcaacactaatgcccgctgctcccggggtgtcccccaaattacacgacttgagccccgcggcatacacgaagggtgtggcctctcctggccactgccacctagggcttccgcagccagccggtgaggctcctgccgttcaggacgtaccgcgccctgttgcaacacaccccgggagccccggacagccccctcccgccctcttaccccagcaggtatcagcacctccttcttcctcatgcccccccggactagagcatagcttatgcccgagcagcccctccccacccttaccacctgccacccaggagcctacctgcctgcagccctgctcccccgcctgtccaccggccacaggtcggccccagcacctgccatcaactgtgcggagagacgagtctcctactgccggcccccggctgctccccgaagtgcacgaggacggaagccctaacttagcccccatcccagtgactgtgaaacgagagccagaagagctcgatcaactctatctagatgatgtgaatgagatcatacggaacgacctatcctccacgtctacccactcttag

SEQ ID NO: 98941 - DNA, 1416 bp, Artificial Sequence
  derived and/or modified sequence
atgttgcagcttttcattggcacagctgacgatcgacttcttcggccacacgcgttttaccaggtccaccggattactggaaagaccgtgagcactacctcccacgaagccattctgagcaacactaaggtcctcgagattccactgctgccagagaactcaatgcgagcagtgattgattgtgcaggaatccttaagctgaggaactctgacatcgagctccgaaaaggcgaaactgatattggcaggaagaacacccgagtgcggcttgtattccgggtgcacgtgccccagccctcgggacggactctgagcctgcaagttgcctcaaaccccatagaatgctctcagcggagtgcccaggaacttcctctggtcgagaaacaaagcacagatagttatccggtggtaggggggaagaaaatggtgctgagcggacataatttcttgcaagattccaaagtgatttttgtggagaaagcccctgatggtcaccacgtgtgggaaatggaagccaagaccgatcgcgacttgtgtaaacctaatagtctggtcgtcgagatcccccctttccgcaatcaacgcataacatcaccggtccacgtatctttttatgtatgcaacggcaagcgaaagagaagtcagtatcagaggttcacctatctcccagccaacgtccccattattaaaaccgaacccacagatgattacgaacccgcccccacctgcggccccgtttctcaaggactgtccccactgccacgtccgtactattctcagcagctcgcgatgccacctgatccgtcctcctgcctggtggccggcttccccccttgcccacagagatctaccttaatgcccgccgcacctggtgtgtcacccaaactgcacgatttatcccctgccgcctacacaaagggtgttgcgtccccaggacactgccacctgggtctgcctcagccagcaggggaagcccccgctgttcaggacgtgccacgtcctgtagcaacccaccctggaagtcctggccaaccccccccagcactattaccccagcaagtctcagccccaccatccagtagttgtcctcccggactagaacatagtctatgcccaagcagcccttcacctcctctcccccccgcgacgcaggaaccaacctgccttcagccatgctcaccagcttgtccacccgccactggccgacctcagcacttaccgtcaactgtgagaagggacgaaagtccaaccgccggaccacgtcttctacctgaggtgcacgaagacggatcacctaatctcgcccccatccctgttacggttaagcgggagcccgaggagttggaccaactttatctcgacgatgttaatgaaattattaggaatgacctgagctccacttcaacccacagttag

SEQ ID NO: 98942 - DNA, 2478 bp, Artificial Sequence
  derived and/or modified sequence
atgcccagcaccagcttccctgtgcccagcaagttccccctgggccctgctgctgctgtgtttggccgcggggagaccctgggccctgcccccagggctgggggcaccatgaagtctgctgaggaggagcactacggctacgccagcagcaatgtgtccccagccctgcccctgcccacagcccacagcaccctgcctgccccctgccacaacctgcagaccagcaccccaggcatcatccccccagctgaccaccccagcggctatggagctgccctggatggcggccctgctggctacttcctgagcagcggccacaccaggccagatggagccccagccctggagagcccccgcatcgagatcaccagctgcctgggcctgtaccacaacaacaaccagttcttccatgatgtggaggtggaggatgtgctgcccagcagcaagaggagccccagcacagccaccctgagcctgcccagcctggaggcctacagagaccccagctgcctgagccctgccagcagcctgagcagccgcagctgcaacagcgaggccagcagctatgagagcaactacagctacccctatgccagcccccagaccagcccctggcagagcccctgtgtgagccccaagaccacagatcctgaggagggcttcccccggggcctgggcgcctgcaccctgctgggcagccccaggcacagccccagcaccagcccccgggcctctgtgacagaggagagctggctgggcgcccggagcagcaggcctgccagcccctgcaacaagaggaagtacagcctgaatggccggcagcccccctacagcccccaccacagccccacccccagcccccacggcagcccccgggtgtctgtgacagatgacagctggctgggcaacaccacccagtacaccagcagcgccatcgtggccgccatcaatgccctgaccacagacagcagcctggacctgggagatggagtgcctgtgaagagcaggaagaccaccctggagcagcccccatctgtggccctgaaggtggagcctgtgggggaggacctgggcagccccccacctcctgctgactttgcccctgaggactacagcagcttccagcacatcagaaaaggaggcttctgtgaccagtacctggccgtgccccagcacccctaccagtgggccaagcccaagcccctgagccccaccagctacatgagccccaccctgcctgccctggactggcagctgcccagccacagcggcccctatgagctgcgcatcgaggtgcagcccaagagccaccaccgggcccactatgaaacagagggcagcagaggagctgtgaaggccagcgctgggggccaccccatcgtgcagctgcacggctacctggagaatgagcccctgatgctgcagctgttcatcggcacagcagatgaccggctgctgcggccccacgccttctaccaggtgcaccgcatcaccgggaagacagtgtccaccaccagccatgaggccatcctgagcaacaccaaggtgctggagatccccctgctgcctgagaacagcatgagagctgtgattgactgtgccggcatcctgaagctgaggaacagcgacatcgagctgaggaagggggagacagacattggaaggaagaacaccagggtgcggctggtgttccgggtgcacgtgccccagcccagcggccgcaccctgagcctgcaggtggccagcaaccccatcgagtgcagccagaggtctgcccaggagctgcccctggtggagaagcagagcacagacagctaccctgtggtgggcggcaagaagatggtgctgagcggccacaacttcctgcaggacagcaaggtgatctttgtggagaaggccccagatggccaccacgtgtgggagatggaggccaagacagaccgggacctgtgcaagcccaacagcctggtggtggagatcccccccttcaggaaccagaggatcaccagccctgtgcacgtgtccttctacgtgtgcaatggcaagaggaagaggagccagtaccagcgcttcacctacctgcctgccaacgtgcccatcatcaagacagagcccacagatgattatgagcccgcccccacctgtggccctgtgtcccagggcctgagccccctgccccggccctactacagccagcagctggccatgcccccagaccccagcagctgcctggtggccggcttccccccctgcccccagaggagcaccctgatgcctgctgcccctggggtgagccccaagctgcatgacctgagccctgctgcctacaccaagggcgtggccagccctggccactgccacctgggcctgccccagcctgctggggaggccccagctgtgcaggatgtgcccaggcctgtggccacccaccctggcagccctggccagcccccaccagccctgctgccccagcagtag

SEQ ID NO: 98943 - DNA, 2832 bp, Artificial Sequence
  derived and/or modified sequence
atgcccagcaccagcttccctgtgcccagcaagttccccctgggccctgctgctgctgtgtttggccgcggggagaccctgggccctgcccccagggctgggggcaccatgaagtctgctgaggaggagcactacggctacgccagcagcaatgtgtccccagccctgcccctgcccacagcccacagcaccctgcctgccccctgccacaacctgcagaccagcaccccaggcatcatccccccagctgaccaccccagcggctatggagctgccctggatggcggccctgctggctacttcctgagcagcggccacaccaggccagatggagccccagccctggagagcccccgcatcgagatcaccagctgcctgggcctgtaccacaacaacaaccagttcttccatgatgtggaggtggaggatgtgctgcccagcagcaagaggagccccagcacagccaccctgagcctgcccagcctggaggcctacagagaccccagctgcctgagccctgccagcagcctgagcagccgcagctgcaacagcgaggccagcagctatgagagcaactacagctacccctatgccagcccccagaccagcccctggcagagcccctgtgtgagccccaagaccacagatcctgaggagggcttcccccggggcctgggcgcctgcaccctgctgggcagccccaggcacagccccagcaccagcccccgggcctctgtgacagaggagagctggctgggcgcccggagcagcaggcctgccagcccctgcaacaagaggaagtacagcctgaatggccggcagcccccctacagcccccaccacagccccacccccagcccccacggcagcccccgggtgtctgtgacagatgacagctggctgggcaacaccacccagtacaccagcagcgccatcgtggccgccatcaatgccctgaccacagacagcagcctggacctgggagatggagtgcctgtgaagagcaggaagaccaccctggagcagcccccatctgtggccctgaaggtggagcctgtgggggaggacctgggcagccccccacctcctgctgactttgcccctgaggactacagcagcttccagcacatcagaaaaggaggcttctgtgaccagtacctggccgtgccccagcacccctaccagtgggccaagcccaagcccctgagccccaccagctacatgagccccaccctgcctgccctggactggcagctgcccagccacagcggcccctatgagctgcgcatcgaggtgcagcccaagagccaccaccgggcccactatgaaacagagggcagcagaggagctgtgaaggccagcgctgggggccaccccatcgtgcagctgcacggctacctggagaatgagcccctgatgctgcagctgttcatcggcacagcagatgaccggctgctgcggccccacgccttctaccaggtgcaccgcatcaccgggaagacagtgtccaccaccagccatgaggccatcctgagcaacaccaaggtgctggagatccccctgctgcctgagaacagcatgagagctgtgattgactgtgccggcatcctgaagctgaggaacagcgacatcgagctgaggaagggggagacagacattggaaggaagaacaccagggtgcggctggtgttccgggtgcacgtgccccagcccagcggccgcaccctgagcctgcaggtggccagcaaccccatcgagtgcagccagaggtctgcccaggagctgcccctggtggagaagcagagcacagacagctaccctgtggtgggcggcaagaagatggtgctgagcggccacaacttcctgcaggacagcaaggtgatctttgtggagaaggccccagatggccaccacgtgtgggagatggaggccaagacagaccgggacctgtgcaagcccaacagcctggtggtggagatcccccccttcaggaaccagaggatcaccagccctgtgcacgtgtccttctacgtgtgcaatggcaagaggaagaggagccagtaccagcgcttcacctacctgcctgccaacgtgcccatcatcaagacagagcccacagatgattatgagcccgcccccacctgtggccctgtgtcccagggcctgagccccctgccccggccctactacagccagcagctggccatgcccccagaccccagcagctgcctggtggccggcttccccccctgcccccagaggagcaccctgatgcctgctgcccctggggtgagccccaagctgcatgacctgagccctgctgcctacaccaagggcgtggccagccctggccactgccacctgggcctgccccagcctgctggggaggccccagctgtgcaggatgtgcccaggcctgtggccacccaccctggcagccctggccagcccccaccagccctgctgccccagcaggtgtctgccccacccagcagcagctgccccccaggcctggagcacagcctgtgccccagcagccccagcccccccctgcccccagccacccaggagcccacctgcctgcagccctgcagccctgcctgccccccagccaccggccggccccagcacctgcccagcacagtgagaagagatgagagccccacagctggcccccggctgctgcctgaggtgcatgaagatggcagccccaacctggcccccatccctgtgacagtgaagcgggagcctgaggagctggaccagctgtacctggatgatgtgaatgagatcatcagaaatgacctgagcagcaccagcacccacagctag

SEQ ID NO: 98944 - DNA, 2724 bp, Artificial Sequence
  derived and/or modified sequence
atgaagagcggcaccctggagcactacggctacgccagcagcaatgtgtccccagccctgcccctgcccacagcccacagcaccctgcctgccccctgccacaacctgcagaccagcaccccaggcatcatccccccagctgaccaccccagcggctatggagctgccctggatggcggccctgctggctacttcctgagcagcggccacaccaggccagatggagccccagccctggagagcccccgcatcgagatcaccagctgcctgggcctgtaccacaacaacaaccagttcttccatgatgtggaggtggaggatgtgctgcccagcagcaagaggagccccagcacagccaccctgagcctgcccagcctggaggcctacagagaccccagctgcctgagccctgccagcagcctgagcagccgcagctgcaacagcgaggccagcagctatgagagcaactacagctacccctatgccagcccccagaccagcccctggcagagcccctgtgtgagccccaagaccacagatcctgaggagggcttcccccggggcctgggcgcctgcaccctgctgggcagccccaggcacagccccagcaccagcccccgggcctctgtgacagaggagagctggctgggcgcccggagcagcaggcctgccagcccctgcaacaagaggaagtacagcctgaatggccggcagcccccctacagcccccaccacagccccacccccagcccccacggcagcccccgggtgtctgtgacagatgacagctggctgggcaacaccacccagtacaccagcagcgccatcgtggccgccatcaatgccctgaccacagacagcagcctggacctgggagatggagtgcctgtgaagagcaggaagaccaccctggagcagcccccatctgtggccctgaaggtggagcctgtgggggaggacctgggcagccccccacctcctgctgactttgcccctgaggactacagcagcttccagcacatcagaaaaggaggcttctgtgaccagtacctggccgtgccccagcacccctaccagtgggccaagcccaagcccctgagccccaccagctacatgagccccaccctgcctgccctggactggcagctgcccagccacagcggcccctatgagctgcgcatcgaggtgcagcccaagagccaccaccgggcccactatgaaacagagggcagcagaggagctgtgaaggccagcgctgggggccaccccatcgtgcagctgcacggctacctggagaatgagcccctgatgctgcagctgttcatcggcacagcagatgaccggctgctgcggccccacgccttctaccaggtgcaccgcatcaccgggaagacagtgtccaccaccagccatgaggccatcctgagcaacaccaaggtgctggagatccccctgctgcctgagaacagcatgagagctgtgattgactgtgccggcatcctgaagctgaggaacagcgacatcgagctgaggaagggggagacagacattggaaggaagaacaccagggtgcggctggtgttccgggtgcacgtgccccagcccagcggccgcaccctgagcctgcaggtggccagcaaccccatcgagtgcagccagaggtctgcccaggagctgcccctggtggagaagcagagcacagacagctaccctgtggtgggcggcaagaagatggtgctgagcggccacaacttcctgcaggacagcaaggtgatctttgtggagaaggccccagatggccaccacgtgtgggagatggaggccaagacagaccgggacctgtgcaagcccaacagcctggtggtggagatcccccccttcaggaaccagaggatcaccagccctgtgcacgtgtccttctacgtgtgcaatggcaagaggaagaggagccagtaccagcgcttcacctacctgcctgccaacgtgcccatcatcaagacagagcccacagatgattatgagcccgcccccacctgtggccctgtgtcccagggcctgagccccctgccccggccctactacagccagcagctggccatgcccccagaccccagcagctgcctggtggccggcttccccccctgcccccagaggagcaccctgatgcctgctgcccctggggtgagccccaagctgcatgacctgagccctgctgcctacaccaagggcgtggccagccctggccactgccacctgggcctgccccagcctgctggggaggccccagctgtgcaggatgtgcccaggcctgtggccacccaccctggcagccctggccagcccccaccagccctgctgccccagcaggtgtctgccccacccagcagcagctgccccccaggcctggagcacagcctgtgccccagcagccccagcccccccctgcccccagccacccaggagcccacctgcctgcagccctgcagccctgcctgccccccagccaccggccggccccagcacctgcccagcacagtgagaagagatgagagccccacagctggcccccggctgctgcctgaggtgcatgaagatggcagccccaacctggcccccatccctgtgacagtgaagcgggagcctgaggagctggaccagctgtacctggatgatgtgaatgagatcatcagaaatgacctgagcagcaccagcacccacagctag

SEQ ID NO: 98945 - DNA, 1416 bp, Artificial Sequence
  derived and/or modified sequence
atgctgcagctgttcatcggcacagcagatgaccggctgctgcggccccacgccttctaccaggtgcaccgcatcaccgggaagacagtgtccaccaccagccatgaggccatcctgagcaacaccaaggtgctggagatccccctgctgcctgagaacagcatgagagctgtgattgactgtgccggcatcctgaagctgaggaacagcgacatcgagctgaggaagggggagacagacattggaaggaagaacaccagggtgcggctggtgttccgggtgcacgtgccccagcccagcggccgcaccctgagcctgcaggtggccagcaaccccatcgagtgcagccagaggtctgcccaggagctgcccctggtggagaagcagagcacagacagctaccctgtggtgggcggcaagaagatggtgctgagcggccacaacttcctgcaggacagcaaggtgatctttgtggagaaggccccagatggccaccacgtgtgggagatggaggccaagacagaccgggacctgtgcaagcccaacagcctggtggtggagatcccccccttcaggaaccagaggatcaccagccctgtgcacgtgtccttctacgtgtgcaatggcaagaggaagaggagccagtaccagcgcttcacctacctgcctgccaacgtgcccatcatcaagacagagcccacagatgattatgagcccgcccccacctgtggccctgtgtcccagggcctgagccccctgccccggccctactacagccagcagctggccatgcccccagaccccagcagctgcctggtggccggcttccccccctgcccccagaggagcaccctgatgcctgctgcccctggggtgagccccaagctgcatgacctgagccctgctgcctacaccaagggcgtggccagccctggccactgccacctgggcctgccccagcctgctggggaggccccagctgtgcaggatgtgcccaggcctgtggccacccaccctggcagccctggccagcccccaccagccctgctgccccagcaggtgtctgccccacccagcagcagctgccccccaggcctggagcacagcctgtgccccagcagccccagcccccccctgcccccagccacccaggagcccacctgcctgcagccctgcagccctgcctgccccccagccaccggccggccccagcacctgcccagcacagtgagaagagatgagagccccacagctggcccccggctgctgcctgaggtgcatgaagatggcagccccaacctggcccccatccctgtgacagtgaagcgggagcctgaggagctggaccagctgtacctggatgatgtgaatgagatcatcagaaatgacctgagcagcaccagcacccacagctag

SEQ ID NO: 98946 - DNA, 2478 bp, Artificial Sequence
  derived and/or modified sequence
atgcccagcaccagcttccccgtgcccagcaagttccccctgggccctgctgcagcagttttcggaaggggggagactctgggacccgcccccagggcaggcggtacgatgaaatcggccgaagaggaacactacgggtacgcttctagcaacgtctcacccgcactgccactcccgactgcgcactccaccctcccggccccctgccacaatctgcaaacttctacgcctgggataataccgccggctgaccaccccagcggatacggagccgctctggacggcggacccgctggctactttttgtcatccggccacacaagacccgacggagcaccagcccttgaatctccccggatcgagatcacttcttgtctcggcctctaccacaacaataaccagttcttccatgacgtggaggtggaagatgtcctgccgtccagcaaaaggagcccctccaccgccaccctatcactgccctccttggaagcatatcgcgatccgtcttgtctgagccccgctagctcactatcaagccggagttgcaatagcgaagcgagttcgtacgaatcgaactacagctacccctatgcttccccacaaacctcaccctggcagagcccttgcgtgagccccaaaaccacagatcctgaagaagggttcccccggggactgggtgcctgtacattattagggagccctaggcattcaccttccacatctccgagagcgtccgtaaccgaggaatcctggctgggagcgcggagtagtagacctgcctcaccctgcaataagcggaagtactcacttaatgggaggcaacctccatatagtccacaccatagtccaacacccagcccccacggatcccctagggtgtcggtgacagatgattcgtggctgggaaacaccacccagtacacctctagcgccatcgttgccgcaatcaatgctctgacaaccgattcttccctggacttaggcgacggggtgcctgtgaagagtaggaaaacaaccctggaacagccaccttcagtggcccttaaggtcgaaccagttggggaggatctggggtccccccccccgcccgctgactttgcccccgaagattactcgtccttccagcacatcagaaagggcgggttttgtgaccaatatctggcagtccctcagcacccgtatcagtgggccaaacctaaaccgctctctcctactagttacatgtcccccacgttgccggccctcgactggcagctgccatcgcactccggaccatatgagctgagaatcgaggtccaaccaaaatctcatcatagagcccactatgaaaccgagggatctaggggggcagtgaaggctagtgcaggcgggcatcccatcgtacagttgcacggctacctggagaacgaaccgcttatgttacagttgtttattggtacagccgacgaccgtctactaagaccccatgctttttaccaagtgcacaggatcacagggaaaaccgtatcaacgacatcccacgaagccatcctctcaaacaccaaggttttggaaattccattgctgcctgagaactccatgagggctgtgattgattgcgccggcatacttaagcttcgaaactcagacattgagttacggaagggggaaacggacatcggtcgcaaaaacacccgcgtgcgcttagtgtttcgcgtacatgtgccacaaccatctggcaggacactgagcctgcaggtggctagtaacccgattgaatgcagccagcgctcagcccaggaacttccactcgtcgagaagcagagcacagattcctacccggtggtgggaggtaagaaaatggtacttagcgggcacaactttctgcaggactccaaggtgattttcgtggagaaagctcccgatgggcatcatgtatgggagatggaggctaaaactgaccgggatctgtgtaagccgaattccctagtcgtcgagatccccccatttcggaatcagcggataaccagcccagtacacgtgagcttttatgtgtgtaatggcaaaaggaaaaggagccaatatcagaggtttacctatctccctgctaatgtaccaatcatcaaaacagagcccacagatgactatgagcctgctcccacgtgtggacccgtctcacagggattatccccgctgcctaggccctactactcccagcagctggcgatgcctcctgacccatcttcctgtctggttgctggattccccccgtgtccgcagcgctccacactgatgccggccgcccctggcgttagcccgaaactgcatgacctcagtcctgctgcatataccaagggagtggcgtccccagggcattgccacctgggcctgccccagcctgccggagaagcgccagcagtccaagatgtgccgcgccctgtggccacccacccgggatctccgggtcaacctccacccgcattgctcccgcagcaatag

SEQ ID NO: 98947 - DNA, 2832 bp, Artificial Sequence
  derived and/or modified sequence
atgcccagcaccagcttccccgtgcccagcaagttccccctgggccccgctgcagcagtgttcggaagaggcgagacactcggacctgcccctagggccggagggaccatgaaatcggccgaagaagagcattatggttatgctagctctaatgtgagcccagcgctaccattgcctaccgcgcacagtaccttacctgccccctgtcacaatctacagacctctacccccggtatcattccacccgcagaccatccctcaggatacggcgctgccctcgatggagggcctgcaggctatttcttatcctctgggcacacccgaccagatggtgcgcctgctctggagagcccccggatcgaaatcactagctgcttgggtctttatcataataacaaccagttttttcacgatgtggaagtagaggatgtcctcccaagcagcaagcgttccccatccaccgcaacactgtcactcccttcacttgaggcatatagggatccttcctgtctttctcccgcctcgagcctctcctctcggagctgtaattctgaggcctcaagctacgagagcaattactcgtacccttacgcatctccacagacgtctccttggcagagcccttgcgtgtcccctaagactaccgatccagaggaaggcttccctcggggactcggcgcttgcacccttctaggttctccacgtcattcaccctccacgtctcccagagcctccgttaccgaggagtcatggctcggggcccgatcctccagacccgcatctccgtgtaataaaaggaaatacagtctcaacggcagacagccaccctactctcctcaccattccccaactccctctccccatggaagcccaagggtgtcagtgactgacgatagttggctgggcaacacaacccagtacacatcctcagcgattgttgccgctatcaacgcacttaccaccgattcttccctcgacctcggcgacggcgtcccagtaaaaagcaggaagaccactctggaacagcccccaagtgttgctctgaaagtcgagcccgtgggagaggacctgggctcacccccaccacccgccgactttgcacctgaagattattcatctttccagcacattaggaagggtggtttctgtgaccagtacctggcagtcccccagcatccttaccagtgggccaaacccaagcccctgtcgcccacctcttacatgtccccgacactgcctgccttggactggcaactgcccagccactcaggcccctacgaactgagaatagaggtccagcccaaatctcaccatagggcacactacgagacagagggctctaggggggccgtgaaggctagtgcaggcggccatccaatcgtgcagctgcacggatatttagagaacgagcccctgatgctgcaactgttcatcggaaccgccgatgacaggctcttgcgcccacacgcattttaccaggttcataggattaccgggaaaaccgtgtccacaacttcccacgaggcaatcctgtcaaatacaaaggttcttgaaattccgctgttgcccgaaaatagcatgcgtgccgtcattgactgcgccgggatactgaagttacgtaattctgatatcgagctgagaaagggtgaaaccgacatcgggagaaagaataccagagtgaggcttgtctttagagtgcacgtgccacagccaagcggaaggaccctttccctgcaggttgcatccaatcctattgagtgcagccagcgaagtgcccaggaattacctctggttgagaagcaatccacggattcttatccagtcgtgggggggaagaaaatggtgctaagcggccataacttcctccaggattccaaagtcatcttcgtggagaaagctccggatggccaccacgtttgggaaatggaggccaagactgacagagacctgtgcaagccaaatagtctggttgtggagattcccccctttaggaatcagcggatcacaagcccggtccacgtttctttctacgtgtgtaatgggaagaggaagcgaagccagtaccagaggtttacctatctccccgccaacgtgccgattattaagactgaaccaacagacgactatgaaccggctcccacctgtgggccggtgagccaagggctttccccactgccgcggccctactacagtcagcaacttgcaatgccccctgacccatccagttgtctcgtggctggctttccgccatgtccccagagaagcaccttgatgcctgcagcgccgggcgtgagtccaaagcttcacgacctctctcccgccgcctatacaaagggggtggcttcccctggccactgccacctcgggctgccccagcctgcaggagaggcccctgcagttcaagacgtgccacgccccgtggccacccatcctggcagtccaggccagcctccccccgccctactgccccagcaggtcagcgccccaccttctagcagctgcccaccggggttagagcattcactgtgccccagcagcccgtcaccccctctgccacccgccacgcaagagcctacctgcctccagccctgtagcccggcttgcccacccgctacaggacgcccccagcaccttcccagcacagtgcgcagagacgaaagcccaactgcgggtcctcggcttctccctgaggttcatgaagacggaagtccaaacctggcaccaattcccgtcacagtcaaaagagagcctgaagaacttgaccagctgtacctggacgatgtcaatgaaatcataagaaacgatttgagttccacttccacacacagttag

SEQ ID NO: 98948 - DNA, 2724 bp, Artificial Sequence
  derived and/or modified sequence
atgaagagcggcaccctggagcactacggctacgccagcagcaacgtgagccctgccttgcccctccccacagctcattccacactccctgccccctgtcataaccttcagacatccactcctggcatcatacctcccgccgaccatcctagcggctatggagcagctttggacggggggcccgccggatattttcttagctccggtcacacacgcccagatggcgcaccggcactggagtccccacgcatcgaaattactagttgcctgggcctataccacaacaataatcagtttttccacgatgtggaagttgaagatgtcctcccgtcaagcaaaagatctccctcaacggcaacacttagcctgcccagtctggaggcctatcgggacccttcctgcctgtcgcctgcttcttctttatcatctcgctcgtgtaattctgaagctagtagttacgagagcaattactcttacccttacgccagcccccagacctctccttggcagagtccatgtgtctcgccaaagacgacggacccagaggagggcttccccagagggttgggcgcctgtacacttctcggctcccccaggcacagccccagcacaagccctagagcttctgtcacggaggaaagctggctgggcgcacgcagctctcgtcctgcttcgccatgcaataagaggaagtattcactaaatgggcggcagcctccatactcaccccaccatagtcccactcctagccctcatggctctccgcgagtgtctgtgaccgacgattcatggctgggcaacacaacccagtatacttcgagtgcaatcgtggctgctattaacgccctgactactgactctagtctcgacctcggtgatggcgtgccagttaagtcccgaaagacaacattggagcagcccccatctgtcgcacttaaggtggagcccgtcggggaggacctgggatccccaccgcccccggccgatttcgctcctgaggactactccagcttccagcatatccgtaagggaggtttttgtgaccaatacctagcagtgccacagcatccttatcagtgggcaaagccaaagccgctgagccccacctcatatatgtcaccaactcttcccgccctagattggcagctcccatctcacagcgggccctatgagctgagaatcgaggtccagcctaagtcccaccacagggcccactacgaaacagaggggtcgcggggagctgtaaaagcatcagccggtggccatccaattgtccagctgcatggatacctggaaaacgagcctcttatgctgcagctgttcattgggactgctgacgaccgcttgctccggccgcatgctttttatcaggttcaccgcatcactggaaaaacagtgagcacaaccagtcatgaagcaatcctcagtaatacaaaagttctcgagatcccactcctgcctgaaaacagtatgcgggctgtgattgattgcgctggaatactcaagctgaggaattcagacattgagctccgtaaaggcgagaccgatatcggtcgtaaaaacacacgcgttcgtttagtgttcagggtacacgtgccacagccaagcggtcggaccctatctctgcaagtggcgtccaaccccatcgagtgttctcagagaagcgctcaggaactcccactggtggagaagcagtctacagactcatatcctgtcgtcggcggcaaaaagatggtgcttagcggccacaatttcctccaggatagcaaggtgatcttcgtcgaaaaagcccctgacggccaccacgtgtgggagatggaggcaaagactgatcgtgatctatgcaagccaaatagcttggtcgtggagatcccacctttcagaaatcagcgcatcacttccccagtccacgtgtccttctacgtgtgcaacggcaaaaggaaacgatcccagtatcagaggttcacatacctgcccgccaacgtcccaattattaagaccgagcccacggacgactatgaacccgcccctacttgcgggccagtgtctcagggcctgtctccccttccccgaccttattattctcagcagctcgcaatgccccctgacccatcgagctgtctggtggccgggttcccaccatgcccacagaggtccacgctgatgcctgctgcgcccggcgtcagccccaagctgcacgatcttagtccagctgcctacaccaagggagtagcttcccctgggcactgccatcttggtttaccacagccagcaggggaggctcctgccgtccaggatgtgccccgtcctgttgccactcatcccggcagccccggacagccccctcctgccctcctgccacaacaggtgtccgctccgccctcttcaagttgccctcctggactggaacactctctctgcccttcttcaccttctccaccgctccctcccgcaacgcaggagcccacatgcctccagccctgctcccctgcctgcccacctgctactggaaggccccaacatcttcccagcaccgtacgtcgtgatgagagccccacagcaggcccaagactgctccctgaagttcacgaggatggctccccaaatctcgcacccattcccgtgaccgtgaaacgcgaacccgaagagctggatcagctgtaccttgacgacgtaaacgagataatccggaacgatctgagcagtacttctacacactcctag

SEQ ID NO: 98949 - DNA, 1416 bp, Artificial Sequence
  derived and/or modified sequence
atgctgcagctgttcatcggcaccgccgacgaccggctgctgcggcctcacgctttttatcaggtgcatagaattactggcaaaaccgtctccaccacctcccatgaagctattctgtctaatactaaagtcctggagatccctctgctgcccgagaattccatgcgcgccgttatcgattgcgcaggcattttgaaactaagaaatagtgacatcgagctgagaaagggagagaccgatatcggcagaaagaacacacgcgttcggctggtcttccgagtgcatgtgccacagccctccggcagaacccttagtttgcaggtagcgagtaatcccatcgaatgttcgcaacgcagtgcacaggagcttccgctggttgagaagcaatctacagactcctatccggtcgtggggggaaagaaaatggtgctctccggccataactttctgcaggactccaaggtgatctttgtcgagaaggccccagatggccaccacgtttgggaaatggaggctaagacagaccgagatctgtgtaagccgaattcactggtcgtcgaaatccccccattccgaaaccagaggatcacaagtcctgtgcacgtatcgttttatgtatgcaatgggaaacgcaagaggtcacagtaccaacgctttacctacctgcccgcgaatgtcccgattatcaagaccgagccaaccgacgactacgagcctgcccccacttgtggccccgtgtcgcagggtctgtctcctctgccccgcccatattatagtcagcagctggccatgccccccgacccaagctcctgtctggtagccggtttccccccgtgcccccagagatcgaccttgatgcctgcagctccaggtgtgagccctaaactgcatgacctctctcccgccgcttatactaagggagttgcgtccccaggacactgtcacctgggactgcctcagccggccggagaggctcctgccgtgcaagacgtacccaggcctgtggctactcatccaggctctcccgggcagccccctcccgcgctgctgccccagcaggttagtgccccccccagtagctcctgcccgcccggactcgagcacagcctttgcccctctagtccttcccctccactgccccccgctacccaggaacccacatgcctccagccttgttcgccagcttgcccacccgccactggcaggccccagcatctcccttctacagttaggcgtgacgagtctcccaccgcaggaccacggctcctgccagaggttcatgaggatggatcccctaatctggccccaatccctgtcacagtgaaaagggagccggaggagcttgaccagttatatcttgacgacgtcaacgaaatcatcaggaatgaccttagcagcacatcaactcactcttag

SEQ ID NO: 98950 - DNA, 4642 bp, Artificial Sequence
  derived and/or modified sequence
gagccgccgggccggcggggaggcgggggaggtgttttccagctttaaaaaggcaggaggcagagcgcggccctgcgtcagagcgagactcagaggctccgaactcgccggcggagtcgccgcgccagatcccagcagcagggcgcgggcaccggggcgcgggcagggctcggagccaccgcgcaggtcctagggccgcggccgggccccgccacgcgcgcacacgcccctcgatgactttcctccggggcgcgcggcgctgagcccggggcgagggctgtcttcccggagacccgaccccggcagcgcggggcggccgcttctcctgtgcctccgcccgccgctccactccccgccgccgccgcgcggatgccaagcaccagctttccagtcccttccaagtttccacttggccctgcggctgcggtcttcgggagaggagaaactttggggcccgcgccgcgcgccggcggcaccatgaagtcagcggaggaagaacactatggctatgcatcctccaacgtcagccccgccctgccgctccccacggcgcactccaccctgccggccccgtgccacaaccttcagacctccacaccgggcatcatcccgccggcggatcacccctcggggtacggagcagctttggacggtgggcccgcgggctacttcctctcctccggccacaccaggcctgatggggcccctgccctggagagtcctcgcatcgagataacctcgtgcttgggcctgtaccacaacaataaccagtttttccacgatgtggaggtggaagacgtcctccctagctccaaacggtccccctccacggccacgctgagtctgcccagcctggaggcctacagagacccctcgtgcctgagcccggccagcagcctgtcctcccggagctgcaactcagaggcctcctcctacgagtccaactactcgtacccgtacgcgtccccccagacgtcgccatggcagtctccctgcgtgtctcccaagaccacggaccccgaggagggctttccccgcgggctgggggcctgcacactgctgggttccccgcggcactccccctccacctcgccccgcgccagcgtcactgaggagagctggctgggtgcccgctcctccagacccgcgtccccttgcaacaagaggaagtacagcctcaacggccggcagccgccctactcaccccaccactcgcccacgccgtccccgcacggctccccgcgggtcagcgtgaccgacgactcgtggttgggcaacaccacccagtacaccagctcggccatcgtggccgccatcaacgcgctgaccaccgacagcagcctggacctgggagatggcgtccctgtcaagtcccgcaagaccaccctggagcagccgccctcagtggcgctcaaggtggagcccgtcggggaggacctgggcagccccccgcccccggccgacttcgcgcccgaagactactcctctttccagcacatcaggaagggcggcttctgcgaccagtacctggcggtgccgcagcacccctaccagtgggcgaagcccaagcccctgtcccctacgtcctacatgagcccgaccctgcccgccctggactggcagctgccgtcccactcaggcccgtatgagcttcggattgaggtgcagcccaagtcccaccaccgagcccactacgagacggagggcagccggggggccgtgaaggcgtcggccggaggacaccccatcgtgcagctgcatggctacttggagaatgagccgctgatgctgcagcttttcattgggacggcggacgaccgcctgctgcgcccgcacgccttctaccaggtgcaccgcatcacagggaagaccgtgtccaccaccagccacgaggccatcctctccaacaccaaagtcctggagatcccactcctgccggagaacagcatgcgagccgtcattgactgtgccggaatcctgaaactcagaaactccgacattgaacttcggaaaggagagacggacatcgggaggaagaacacacgggtacggctggtgttccgcgttcacgtcccgcaacccagcggccgcacgctgtccctgcaggtggcctccaaccccatcgaatgctcccagcgctcagctcaggagctgcctctggtggagaagcagagcacggacagctatccggtcgtgggcgggaagaagatggtcctgtctggccacaacttcctgcaggactccaaggtcattttcgtggagaaagccccagatggccaccatgtctgggagatggaagcgaaaactgaccgggacctgtgcaagccgaattctctggtggttgagatcccgccatttcggaatcagaggataaccagccccgttcacgtcagtttctacgtctgcaacgggaagagaaagcgaagccagtaccagcgtttcacctaccttcccgccaacgttccaattataaaaacagaacccactgatgattatgagcctgctccaacctgtggaccggtgagccaggggttaagtcctctcccaagaccatactacagccagcagctcgcgatgccacccgaccccagctcctgcctcgtggccggcttcccgccctgtccgcagagaagcaccctgatgccagcggcccctggcgtgagccccaagctccacgacctttctcccgctgcctacaccaagggcgttgccagcccgggccactgtcacctcggactcccgcagccggccggagaggcccccgccgtccaggacgtgcccaggccagtggccacgcaccccggctcgcccgggcagccacccccggccctgctgccacagcagtaaatgaaataatacgaaatgacctctccagcacgagcacccactcctagttgccacattggagcactcagttcagcaggggtatgctgacttcagcagacaaagacttttgaataaataaactgaactcacacctggtaccactcagaacctccaactgactgaatgccaggagctgaacattaatatgtgcaaagattggctctccaacaagaaggaaagcagggaggaagggagaccactgtgtcacctggaggagaagtcatctcatgacaacagaagggaggtggccgggctgagcacgggagacccaccgtgcaggggcctttcatgggaacggcccacacgcagtttgaccccacgcccagcccttctggcacccctggggttcaatactggaagtgccttatttaaccagaccatcagggcatcatagaattgagcattgaatttgctactgtaggagtatttttaggagcagaaactgcaaacacatttcattgtgaggttttaccctctgtatgaatgaagagaacgctggaaggctgcgagaggactctagtatgagtctccaacatttggaacgtttcctgggctgtcacgtacactcctgctgccttacacagtgcattttagaatcttccagtctgtcatctcagctcttttgtaacatgcttcccttgtctgcgcggttgaaaccgtaggcttgttcatagtcgcatgctcgcatctttgtttttaatctggcttcgaacatagcacaagtaacttgaatagcacatcaataggttactggacaaaagcagaaaaacctgttacaggatagcctgcatttgcatgtgtgtacatatctaggcatctatttatgtataaataataacagagccgacgtgtcctcgcccaggagggcttccctgtcagcaataaccggcatccgttttggaacctgcgtctggggctccagtcgctgctcttgctggcgtccatcgccgcctcggacggccgtgcattttctcgtctcacgcagttcgaggaggaccctagaaagccaggagctgtgattgacagtagctgtaggttaccagacggcaacattagaaagtgattgtaaataacatgcaacctaagtgtaatatatttgttcagttataagatgattgtttcacagaagccttaccactctctgcttcatctaagaaaaccaataccaaaaacgccactttaatgctcagccctgcgttgtgtgttttcagatgagttactgttaacaggtaggtttgtgtaggccttgctgggcactctgtacaattagttgcttattacgtatgattactcacagcgatctattgttccatataaccaaaaagcatggtttattcattgaaacacggttgacctgaactcgtgccttaggaattaatgcccccttatggaacctgcctgaattgcacctgcgggtggaggctccggctgtgaagtcactgaacagaacgtcgctgatggagaaagggctcccgcagaaggaacggcctgtaccgtgcgctccggcacaatcgcgtctcttgtgtctcactcacggaaagaaacaacctgaaggccatcccgtcggtctgcacgtaaccgtgaagacgtgtggccgcgtcccacctgcggctgggtaccctgcacccggcactgtaggagtcacgtgcagcctttctcaggggactgtcattgaaaaggaaacgtttgatgtctgtgtcagctgtctttgtagttaggaaatagatccaataaagccgtatttttttgctggaca

SEQ ID NO: 98951 - DNA, 5030 bp, Artificial Sequence
  derived and/or modified sequence
ggcgggcgctcggcgactcgtccccggggccccgcgcgggcccgggcagcaggggcgtgatgtcacggcagggagggggcgcgggagccgccgggccggcggggaggcgggggaggtgttttccagctttaaaaaggcaggaggcagagcgcggccctgcgtcagagcgagactcagaggctccgaactcgccggcggagtcgccgcgccagatcccagcagcagggcgcgggcaccggggcgcgggcagggctcggagccaccgcgcaggtcctagggccgcggccgggccccgccacgcgcgcacacgcccctcgatgactttcctccggggcgcgcggcgctgagcccggggcgagggctgtcttcccggagacccgaccccggcagcgcggggcggccgcttctcctgtgcctccgcccgccgctccactccccgccgccgccgcgcggatgccaagcaccagctttccagtcccttccaagtttccacttggccctgcggctgcggtcttcgggagaggagaaactttggggcccgcgccgcgcgccggcggcaccatgaagtcagcggaggaagaacactatggctatgcatcctccaacgtcagccccgccctgccgctccccacggcgcactccaccctgccggccccgtgccacaaccttcagacctccacaccgggcatcatcccgccggcggatcacccctcggggtacggagcagctttggacggtgggcccgcgggctacttcctctcctccggccacaccaggcctgatggggcccctgccctggagagtcctcgcatcgagataacctcgtgcttgggcctgtaccacaacaataaccagtttttccacgatgtggaggtggaagacgtcctccctagctccaaacggtccccctccacggccacgctgagtctgcccagcctggaggcctacagagacccctcgtgcctgagcccggccagcagcctgtcctcccggagctgcaactcagaggcctcctcctacgagtccaactactcgtacccgtacgcgtccccccagacgtcgccatggcagtctccctgcgtgtctcccaagaccacggaccccgaggagggctttccccgcgggctgggggcctgcacactgctgggttccccgcggcactccccctccacctcgccccgcgccagcgtcactgaggagagctggctgggtgcccgctcctccagacccgcgtccccttgcaacaagaggaagtacagcctcaacggccggcagccgccctactcaccccaccactcgcccacgccgtccccgcacggctccccgcgggtcagcgtgaccgacgactcgtggttgggcaacaccacccagtacaccagctcggccatcgtggccgccatcaacgcgctgaccaccgacagcagcctggacctgggagatggcgtccctgtcaagtcccgcaagaccaccctggagcagccgccctcagtggcgctcaaggtggagcccgtcggggaggacctgggcagccccccgcccccggccgacttcgcgcccgaagactactcctctttccagcacatcaggaagggcggcttctgcgaccagtacctggcggtgccgcagcacccctaccagtgggcgaagcccaagcccctgtcccctacgtcctacatgagcccgaccctgcccgccctggactggcagctgccgtcccactcaggcccgtatgagcttcggattgaggtgcagcccaagtcccaccaccgagcccactacgagacggagggcagccggggggccgtgaaggcgtcggccggaggacaccccatcgtgcagctgcatggctacttggagaatgagccgctgatgctgcagcttttcattgggacggcggacgaccgcctgctgcgcccgcacgccttctaccaggtgcaccgcatcacagggaagaccgtgtccaccaccagccacgaggccatcctctccaacaccaaagtcctggagatcccactcctgccggagaacagcatgcgagccgtcattgactgtgccggaatcctgaaactcagaaactccgacattgaacttcggaaaggagagacggacatcgggaggaagaacacacgggtacggctggtgttccgcgttcacgtcccgcaacccagcggccgcacgctgtccctgcaggtggcctccaaccccatcgaatgctcccagcgctcagctcaggagctgcctctggtggagaagcagagcacggacagctatccggtcgtgggcgggaagaagatggtcctgtctggccacaacttcctgcaggactccaaggtcattttcgtggagaaagccccagatggccaccatgtctgggagatggaagcgaaaactgaccgggacctgtgcaagccgaattctctggtggttgagatcccgccatttcggaatcagaggataaccagccccgttcacgtcagtttctacgtctgcaacgggaagagaaagcgaagccagtaccagcgtttcacctaccttcccgccaacgttccaattataaaaacagaacccactgatgattatgagcctgctccaacctgtggaccggtgagccaggggttaagtcctctcccaagaccatactacagccagcagctcgcgatgccacccgaccccagctcctgcctcgtggccggcttcccgccctgtccgcagagaagcaccctgatgccagcggcccctggcgtgagccccaagctccacgacctttctcccgctgcctacaccaagggcgttgccagcccgggccactgtcacctcggactcccgcagccggccggagaggcccccgccgtccaggacgtgcccaggccagtggccacgcaccccggctcgcccgggcagccacccccggccctgctgccacagcaggtgagtgcgcctccaagcagtagctgcccccctggtctcgaacactcgctctgccccagcagcccctctcctccactcccgcctgccacccaagagccgacctgcctgcagccctgcagcccagcgtgcccgcccgccacgggccgcccgcagcacctgccgtccacggtccgcagggacgagtctccgactgccgggccacggctgctgccagaggtgcatgaggacggtagtcctaatttggcccctattcctgtaacggtcaagcgagagcctgaagagttggaccagttgtacctggatgacgtaaatgaaataatacgaaatgacctctccagcacgagcacccactcctagttgccacattggagcactcagttcagcaggggtatgctgacttcagcagacaaagacttttgaataaataaactgaactcacacctggtaccactcagaacctccaactgactgaatgccaggagctgaacattaatatgtgcaaagattggctctccaacaagaaggaaagcagggaggaagggagaccactgtgtcacctggaggagaagtcatctcatgacaacagaagggaggtggccgggctgagcacgggagacccaccgtgcaggggcctttcatgggaacggcccacacgcagtttgaccccacgcccagcccttctggcacccctggggttcaatactggaagtgccttatttaaccagaccatcagggcatcatagaattgagcattgaatttgctactgtaggagtatttttaggagcagaaactgcaaacacatttcattgtgaggttttaccctctgtatgaatgaagagaacgctggaaggctgcgagaggactctagtatgagtctccaacatttggaacgtttcctgggctgtcacgtacactcctgctgccttacacagtgcattttagaatcttccagtctgtcatctcagctcttttgtaacatgcttcccttgtctgcgcggttgaaaccgtaggcttgttcatagtcgcatgctcgcatctttgtttttaatctggcttcgaacatagcacaagtaacttgaatagcacatcaataggttactggacaaaagcagaaaaacctgttacaggatagcctgcatttgcatgtgtgtacatatctaggcatctatttatgtataaataataacagagccgacgtgtcctcgcccaggagggcttccctgtcagcaataaccggcatccgttttggaacctgcgtctggggctccagtcgctgctcttgctggcgtccatcgccgcctcggacggccgtgcattttctcgtctcacgcagttcgaggaggaccctagaaagccaggagctgtgattgacagtagctgtaggttaccagacggcaacattagaaagtgattgtaaataacatgcaacctaagtgtaatatatttgttcagttataagatgattgtttcacagaagccttaccactctctgcttcatctaagaaaaccaataccaaaaacgccactttaatgctcagccctgcgttgtgtgttttcagatgagttactgttaacaggtaggtttgtgtaggccttgctgggcactctgtacaattagttgcttattacgtatgattactcacagcgatctattgttccatataaccaaaaagcatggtttattcattgaaacacggttgacctgaactcgtgccttaggaattaatgcccccttatggaacctgcctgaattgcacctgcgggtggaggctccggctgtgaagtcactgaacagaacgtcgctgatggagaaagggctcccgcagaaggaacggcctgtaccgtgcgctccggcacaatcgcgtctcttgtgtctcactcacggaaagaaacaacctgaaggccatcccgtcggtctgcacgtaaccgtgaagacgtgtggccgcgtcccacctgcggctgggtaccctgcacccggcactgtaggagtcacgtgcagcctttctcaggggactgtcattgaaaaggaaacgtttgatgtctgtgtcagctgtctttgtagttaggaaatagatccaataaagccgtatttttttgctgg

SEQ ID NO: 98952 - DNA, 4469 bp, Artificial Sequence
  derived and/or modified sequence
atgaagagcggaaccctagaacactatggctatgcatcctccaacgtcagccccgccctgccgctccccacggcgcactccaccctgccggccccgtgccacaaccttcagacctccacaccgggcatcatcccgccggcggatcacccctcggggtacggagcagctttggacggtgggcccgcgggctacttcctctcctccggccacaccaggcctgatggggcccctgccctggagagtcctcgcatcgagataacctcgtgcttgggcctgtaccacaacaataaccagtttttccacgatgtggaggtggaagacgtcctccctagctccaaacggtccccctccacggccacgctgagtctgcccagcctggaggcctacagagacccctcgtgcctgagcccggccagcagcctgtcctcccggagctgcaactcagaggcctcctcctacgagtccaactactcgtacccgtacgcgtccccccagacgtcgccatggcagtctccctgcgtgtctcccaagaccacggaccccgaggagggctttccccgcgggctgggggcctgcacactgctgggttccccgcggcactccccctccacctcgccccgcgccagcgtcactgaggagagctggctgggtgcccgctcctccagacccgcgtccccttgcaacaagaggaagtacagcctcaacggccggcagccgccctactcaccccaccactcgcccacgccgtccccgcacggctccccgcgggtcagcgtgaccgacgactcgtggttgggcaacaccacccagtacaccagctcggccatcgtggccgccatcaacgcgctgaccaccgacagcagcctggacctgggagatggcgtccctgtcaagtcccgcaagaccaccctggagcagccgccctcagtggcgctcaaggtggagcccgtcggggaggacctgggcagccccccgcccccggccgacttcgcgcccgaagactactcctctttccagcacatcaggaagggcggcttctgcgaccagtacctggcggtgccgcagcacccctaccagtgggcgaagcccaagcccctgtcccctacgtcctacatgagcccgaccctgcccgccctggactggcagctgccgtcccactcaggcccgtatgagcttcggattgaggtgcagcccaagtcccaccaccgagcccactacgagacggagggcagccggggggccgtgaaggcgtcggccggaggacaccccatcgtgcagctgcatggctacttggagaatgagccgctgatgctgcagcttttcattgggacggcggacgaccgcctgctgcgcccgcacgccttctaccaggtgcaccgcatcacagggaagaccgtgtccaccaccagccacgaggccatcctctccaacaccaaagtcctggagatcccactcctgccggagaacagcatgcgagccgtcattgactgtgccggaatcctgaaactcagaaactccgacattgaacttcggaaaggagagacggacatcgggaggaagaacacacgggtacggctggtgttccgcgttcacgtcccgcaacccagcggccgcacgctgtccctgcaggtggcctccaaccccatcgaatgctcccagcgctcagctcaggagctgcctctggtggagaagcagagcacggacagctatccggtcgtgggcgggaagaagatggtcctgtctggccacaacttcctgcaggactccaaggtcattttcgtggagaaagccccagatggccaccatgtctgggagatggaagcgaaaactgaccgggacctgtgcaagccgaattctctggtggttgagatcccgccatttcggaatcagaggataaccagccccgttcacgtcagtttctacgtctgcaacgggaagagaaagcgaagccagtaccagcgtttcacctaccttcccgccaacgttccaattataaaaacagaacccactgatgattatgagcctgctccaacctgtggaccggtgagccaggggttaagtcctctcccaagaccatactacagccagcagctcgcgatgccacccgaccccagctcctgcctcgtggccggcttcccgccctgtccgcagagaagcaccctgatgccagcggcccctggcgtgagccccaagctccacgacctttctcccgctgcctacaccaagggcgttgccagcccgggccactgtcacctcggactcccgcagccggccggagaggcccccgccgtccaggacgtgcccaggccagtggccacgcaccccggctcgcccgggcagccacccccggccctgctgccacagcaggtgagtgcgcctccaagcagtagctgcccccctggtctcgaacactcgctctgccccagcagcccctctcctccactcccgcctgccacccaagagccgacctgcctgcagccctgcagcccagcgtgcccgcccgccacgggccgcccgcagcacctgccgtccacggtccgcagggacgagtctccgactgccgggccacggctgctgccagaggtgcatgaggacggtagtcctaatttggcccctattcctgtaacggtcaagcgagagcctgaagagttggaccagttgtacctggatgacgtaaatgaaataatacgaaatgacctctccagcacgagcacccactcctagttgccacattggagcactcagttcagcaggggtatgctgacttcagcagacaaagacttttgaataaataaactgaactcacacctggtaccactcagaacctccaactgactgaatgccaggagctgaacattaatatgtgcaaagattggctctccaacaagaaggaaagcagggaggaagggagaccactgtgtcacctggaggagaagtcatctcatgacaacagaagggaggtggccgggctgagcacgggagacccaccgtgcaggggcctttcatgggaacggcccacacgcagtttgaccccacgcccagcccttctggcacccctggggttcaatactggaagtgccttatttaaccagaccatcagggcatcatagaattgagcattgaatttgctactgtaggagtatttttaggagcagaaactgcaaacacatttcattgtgaggttttaccctctgtatgaatgaagagaacgctggaaggctgcgagaggactctagtatgagtctccaacatttggaacgtttcctgggctgtcacgtacactcctgctgccttacacagtgcattttagaatcttccagtctgtcatctcagctcttttgtaacatgcttcccttgtctgcgcggttgaaaccgtaggcttgttcatagtcgcatgctcgcatctttgtttttaatctggcttcgaacatagcacaagtaacttgaatagcacatcaataggttactggacaaaagcagaaaaacctgttacaggatagcctgcatttgcatgtgtgtacatatctaggcatctatttatgtataaataataacagagccgacgtgtcctcgcccaggagggcttccctgtcagcaataaccggcatccgttttggaacctgcgtctggggctccagtcgctgctcttgctggcgtccatcgccgcctcggacggccgtgcattttctcgtctcacgcagttcgaggaggaccctagaaagccaggagctgtgattgacagtagctgtaggttaccagacggcaacattagaaagtgattgtaaataacatgcaacctaagtgtaatatatttgttcagttataagatgattgtttcacagaagccttaccactctctgcttcatctaagaaaaccaataccaaaaacgccactttaatgctcagccctgcgttgtgtgttttcagatgagttactgttaacaggtaggtttgtgtaggccttgctgggcactctgtacaattagttgcttattacgtatgattactcacagcgatctattgttccatataaccaaaaagcatggtttattcattgaaacacggttgacctgaactcgtgccttaggaattaatgcccccttatggaacctgcctgaattgcacctgcgggtggaggctccggctgtgaagtcactgaacagaacgtcgctgatggagaaagggctcccgcagaaggaacggcctgtaccgtgcgctccggcacaatcgcgtctcttgtgtctcactcacggaaagaaacaacctgaaggccatcccgtcggtctgcacgtaaccgtgaagacgtgtggccgcgtcccacctgcggctgggtaccctgcacccggcactgtaggagtcacgtgcagcctttctcaggggactgtcattgaaaaggaaacgtttgatgtctgtgtcagctgtctttgtagttaggaaatagatccaataaagccgtatttttttgctgg

SEQ ID NO: 98953 - DNA, 1919 bp, Artificial Sequence
  derived and/or modified sequence
gagaaccgaacccctggcggccgcgaccccggctcccgccccggccccggcccgacccgccatgacggggctggaggaccaggagttcgacttcgagttcctcttcgagtttaaccagcgcgacgagggcgccgccgcggccgccccagcccgaccctgcccgccctggactggcagctgccgtcccactcaggcccgtatgagcttcggattgaggtgcagcccaagtcccaccaccgagcccactacgagacggagggcagccggggggccgtgaaggcgtcggccggaggacaccccatcgtgcagctgcatggctacttggagaatgagccgctgatgctgcagcttttcattgggacggcggacgaccgcctgctgcgcccgcacgccttctaccaggtgcaccgcatcacagggaagaccgtgtccaccaccagccacgaggccatcctctccaacaccaaagtcctggagatcccactcctgccggagaacagcatgcgagccgtcattgactgtgccggaatcctgaaactcagaaactccgacattgaacttcggaaaggagagacggacatcgggaggaagaacacacgggtacggctggtgttccgcgttcacgtcccgcaacccagcggccgcacgctgtccctgcaggtggcctccaaccccatcgaatgctcccagcgctcagctcaggagctgcctctggtggagaagcagagcacggacagctatccggtcgtgggcgggaagaagatggtcctgtctggccacaacttcctgcaggactccaaggtcattttcgtggagaaagccccagatggccaccatgtctgggagatggaagcgaaaactgaccgggacctgtgcaagccgaattctctggtggttgagatcccgccatttcggaatcagaggataaccagccccgttcacgtcagtttctacgtctgcaacgggaagagaaagcgaagccagtaccagcgtttcacctaccttcccgccaacgttccaattataaaaacagaacccactgatgattatgagcctgctccaacctgtggaccggtgagccaggggttaagtcctctcccaagaccatactacagccagcagctcgcgatgccacccgaccccagctcctgcctcgtggccggcttcccgccctgtccgcagagaagcaccctgatgccagcggcccctggcgtgagccccaagctccacgacctttctcccgctgcctacaccaagggcgttgccagcccgggccactgtcacctcggactcccgcagccggccggagaggcccccgccgtccaggacgtgcccaggccagtggccacgcaccccggctcgcccgggcagccacccccggccctgctgccacagcaggtgagtgcgcctccaagcagtagctgcccccctggtctcgaacactcgctctgccccagcagcccctctcctccactcccgcctgccacccaagagccgacctgcctgcagccctgcagcccagcgtgcccgcccgccacgggccgcccgcagcacctgccgtccacggtccgcagggacgagtctccgactgccgggccacggctgctgccagaggtgcatgaggacggtagtcctaatttggcccctattcctgtaacggtcaagcgagagcctgaagagttggaccagttgtacctggatgacgtaaatgaaataatacgaaatgacctctccagcacgagcacccactcctagttgccacattggagcactcagttcagcaggggtatgctgacttcagcagacaaagacttttgaataaataaactgaactcacacctggtaccactcagaacctccaactgactgaatgccaggagctgaacattaatatgtgcaaagattggctctccaacaag

SEQ ID NO: 98954 - DNA, 2478 bp, Artificial Sequence
  derived and/or modified sequence
atgccttccaccagctttccagttccctctaagttccctcttggacctgccgctgctgtcttcgggcgtggcgaaacgctggggcctgccccacgggcaggcggtactatgaagtcggccgaagaggaacactacggctatgcttcttccaatgtctcacctgctctgccattgcccaccgcccattccactcttcccgctccttgccacaacctgcagacatccacaccaggcatcattcctcccgctgaccacccttcggggtacggcgctgccttagacggagggcctgcgggttacttcctctccagcgggcatacccggccagacggtgcaccagccctggaaagtcctaggatcgaaattactagctgcctgggtctttaccacaataacaaccagttctttcatgatgttgaagtggaagacgtgctaccatcatccaaaaggtctccctccacggccaccctaagccttccatccctagaggcttatcgggacccttcttgtctcagccccgcaagcagtcttagctctaggagttgtaatagcgaagcgtcttcttacgaaagcaattattcgtacccttacgcctcaccccagacttctccctggcagagcccttgcgtgagtcccaagacaaccgaccctgaagagggcttccctagaggtttaggtgcatgcactctcctgggatctccccgacactctccctctacatcacctcgggcttcagtaacggaggaaagctggctgggcgctagatctagcagacccgcaagcccctgtaacaaacgtaagtattcgctcaatggccgtcagcctccgtactccccgcaccatagtccgacaccttcaccgcacgggagccccagggtgtcggtcacagatgactcctggctgggaaacactacacaatatacttcctctgccatcgtagctgctattaacgccctgacgacagatagctcgttggatctcggagatggagtcccagtcaaatcccgcaagacgaccctggaacagccaccctctgtcgccctgaaggtggaacctgtaggcgaggatttgggaagcccccctccacccgcagattttgcaccagaagactattcctcatttcagcacattaggaaagggggtttttgtgaccaatatctggcagtgcctcaacacccctaccagtgggcaaagcccaagcctctgtctccaacctcatatatgtctccgactctccccgctctggactggcagttgcccagccattctggcccatatgagctcagaatcgaagtccagcccaagtcgcaccatagggcccactacgaaaccgagggttcgcggggagccgtgaaagcaagcgccggtggccaccctatcgtgcagctgcatggttacctcgagaatgaacccctgatgctccagcttttcatcggaactgcagatgacaggcttctgagacctcacgcattctatcaggtccatcgaatcactggaaaaactgtcagcacaacctcccacgaagcgatcctatctaacaccaaagtcctggaaatccccctgcttccggagaatagtatgagggctgtgatagattgtgctgggattctaaagctgaggaacagcgacattgagcttcgaaagggagagacagatatcgggaggaagaacacacgtgtgagactggtgttccgcgttcatgtaccccaaccaagcggccgaacgctaagcttgcaggtggcatcaaatcctatcgagtgcagtcaaagatctgcacaggaactcccactcgtcgaaaaacagtctactgactcataccctgttgtggggggtaagaagatggttctgagtggacacaactttctccaggatagtaaggtgattttcgtggagaaggctcctgatgggcatcacgtttgggaaatggaggccaaaacggaccgggacttgtgcaaacccaattctctggtggtggagatccccccatttaggaaccagcgaattacatcaccagtccatgtctcattctatgtttgcaacggaaagagaaagcgctctcagtaccagcggttcacatatctgccagctaatgtaccaataatcaagactgagccaaccgatgattatgaaccggcaccgacatgcggaccagtcagtcagggactgtcccctctgcccagaccgtactattcgcagcagctggccatgccgcctgatccaagttcctgcctggtcgcagggttccccccttgtccccagcgatcaacgctgatgccggctgcccctggagttagtcctaagctccatgacctgagccctgccgcttatactaagggtgttgcctcacctggccattgccacctgggcctgccacaaccagcaggcgaggcaccggctgtgcaggatgttcccaggcctgtcgccacgcacccaggctccccgggacagccacctcccgctctgctgccccagcagtag

SEQ ID NO: 98955 - DNA, 2832 bp, Artificial Sequence
  derived and/or modified sequence
atgcctagcacttctttccctgtgccttccaaattccccctcggccctgctgctgccgtgttcgggagaggggaaaccctgggacccgcacccagagctgggggtactatgaagagcgcagaagaggaacactacggttatgcaagcagtaatgtaagcccagctttgcccctgcctactgcccactccacgctccccgcaccttgtcacaaccttcaaacttccacccccggtatcattccgcctgccgatcatccctccggctatggcgctgcactggatgggggacccgcaggatatttcttgtcaagtggacacaccaggcctgacggagcccctgcattggaaagcccaagaattgagatcacgtcttgcctcgggctctaccacaacaacaatcaattcttccatgacgtggaggttgaggatgtccttccgtcctccaagcggtctcctagtacggccaccctcagcctgccatccctcgaggcatatcgagatccgagctgcctatcacctgcgtcctccctttcaagcaggagttgcaatagcgaggcctcttcttatgaatctaattatagttatccctatgcctctccgcagaccagcccctggcaatctccctgtgtgagtcccaaaaccaccgatccagaagagggtttccctagagggttaggggcttgtaccctcttagggagccctcgacactctccatccacctctcctcgtgcctccgtgaccgaggagtcctggctgggtgccagatccagcaggcccgcaagcccttgcaacaagcgtaagtacagcctgaatgggaggcagcccccttacagcccgcatcatagtcctactccctcaccccacggaagtcctcgagtctcagttactgacgacagctggctgggcaacacaacccagtacacaagctcagcaatcgttgccgcaattaacgccctgacaactgactcaagcctggatctgggcgacggcgtccctgtcaagagcagaaagaccactctcgagcaaccgccatcggtcgctcttaaagtagagccagtgggcgaggatttgggctcaccccctccaccagcggactttgcccctgaagactatagcagcttccagcacatccgcaaaggaggtttctgtgaccagtatctggccgtgccccagcacccttatcagtgggcaaagccgaagccactcagtccaacctcttacatgtctcctactctgccagctctggattggcagctgccctcgcactccggtccttatgagcttcgcatcgaagtccaaccgaagtctcatcatcgtgctcattacgagacagaggggtcgcgaggggctgtcaaagccagtgctggtggccatccaatagtgcagctgcatggctaccttgagaacgaacctttgatgctccagctgtttattggcacagcagatgataggctgctgcgtccccatgccttttaccaggtccataggattactggcaaaactgtgagtactacctctcatgaggccattttgagtaacacaaaggtgctggagattcctctgcttcccgaaaactcaatgcgtgctgtcattgattgcgccggaattctaaaactgagaaattctgatattgaattgaggaagggtgagaccgatatcgggagaaagaacacacgggttaggcttgtgtttcgggtgcatgtgcctcagccctcaggacgcactctctcattacaggtggcttctaaccccatcgagtgttctcaaagatctgctcaggaattgcccctagtcgagaagcagtccaccgactcctatcctgtggtgggtggtaagaagatggtattgtcaggacataacttcctccaagattccaaggtgatcttcgtggaaaaggctcccgatgggcatcacgtctgggaaatggaagctaaaacagatagagacctctgtaagccaaactcactggttgtagagatccctcctttcagaaatcagcgcataacaagccccgtgcacgtctccttctacgtgtgcaatggcaagcgtaagcgcagccagtaccagcggtttacttacctcccagcaaatgttccaataatcaagaccgaaccaacagacgactacgagcccgctcctacttgcggacctgtgtcccaagggctaagccccctgcccaggccctactactctcagcagctggctatgcctcctgatccttcttcttgcctggtggctggcttccccccatgtcctcagagaagtaccttgatgccagcagcccctggggtttcccccaagctacacgacctttctcccgcagcctacacgaagggcgtggcctccccaggacactgtcacctagggttgcctcaacctgctggggaagctcccgctgtgcaggacgttcccaggcccgtcgcaacgcaccctgggagtcccggtcagcccccacccgcacttctgccccagcaggtgtccgctcccccatccagcagctgtccgccaggactcgaacactctctgtgcccgtccagcccatcccctccactgccccctgccacacaggagcctacctgcctgcagccttgttcacctgcatgccctcctgctaccgggaggcctcagcatctccctagcacggttcgcagagacgagtcacccacggcaggccctagactgttgcccgaggttcacgaagacggcagcccaaatcttgcccctatccctgtaacagtgaaaagagaaccagaagagctcgaccagctctatctggatgatgtcaatgagatcatcaggaacgatctttcctcgacctctacccatagctag

SEQ ID NO: 98956 - DNA, 2724 bp, Artificial Sequence
  derived and/or modified sequence
atgaagagcgggactctggagcactacggatatgcatcaagcaacgtgagccctgcactccccctccccaccgcacacagcactctccccgcaccttgccacaatcttcagacaagtacacccggaataatcccccctgccgaccacccatctggttatggcgctgccctggacggcggtcctgccggatactttttaagctctggccataccagaccagatggggctcccgcattggagtctccacgcatcgaaatcacaagctgcctggggctttatcataacaataatcagttctttcatgacgttgaggttgaagacgtgcttccctccagtaagcgatcaccatcaacagcaacacttagcctaccctccctggaggcctatcgcgatccctcctgtctgtcccctgccagctcactatcttctcggtcatgtaactctgaagctagcagttacgagtccaactatagctacccctacgccagccctcagacaagtccctggcagtcaccctgtgtatctcctaaaaccactgacccagaggaggggttccctagagggctaggggcttgcactcttctgggcagccccagacattccccgtcaacatcccccagagccagtgtgactgaggaatcttggcttggtgcacggtccagcagaccagcttccccctgcaataaaaggaagtatagtctcaacggcaggcagcctccttactcccctcaccacagtcctaccccaagcccccatggatcccctcgcgtgtcagtgacagacgatagttggctcggtaacaccacacagtatacatctagtgccatcgtcgcagcaatcaacgctttgactaccgacagtagtctggatctcggggacggtgtgcccgtgaaatctcgcaagacgactctggagcagcctccctccgtggcccttaaagtcgagcctgtaggtgaggacctcggaagccccccacctcctgccgactttgcgcctgaggattattccagtttccagcacatacgcaagggtggcttctgtgaccagtaccttgcggttcctcagcacccctaccagtgggcaaagccaaaacccttgagccccactagctacatgagccccactttaccagctcttgattggcagctgccctcccacagcggaccctacgagctccgcattgaggttcagccaaagagccaccacagggcccattacgaaacagaaggcagtcgaggcgctgtcaaagcgtctgctggcggtcatcccattgtgcagctgcacgggtacctggagaacgagcccttgatgctgcagctctttattggcacggccgatgataggctcctccgccctcacgcgttttatcaggtgcaccggatcaccggcaagaccgtaagtaccacttcacatgaagccattctcagcaacacaaaagtattggagatccccctgctgcctgagaatagcatgcgggcagtgattgattgcgcgggaatactcaaactgaggaattccgacatcgaactgcggaagggcgagactgatattggaaggaagaatacaagagtgaggcttgtgttccgagtccatgtaccccagccgagcggaaggaccctcagcctacaagtagcatccaaccccatcgagtgctcgcaacggtctgctcaggaactcccgctagtagaaaaacagagcactgactcatatcctgtggtgggcggaaagaaaatggtgctgtccggccacaacttcctgcaagactccaaggtgatcttcgtggaaaaggcaccagacggccatcacgtctgggagatggaggcaaagactgatagagacctgtgcaaaccaaatagtcttgtagttgagattccacccttccgcaaccagaggataacatctccagtgcatgtatcgttttatgtctgcaatgggaaacgtaagagaagccaatatcagcgattcacctacttgcctgcgaacgtgcctattattaaaaccgagcccaccgacgattacgaacctgcccctacatgcggccctgtctctcagggcctgagtcccttgccccgaccatactacagtcaacagctggctatgcctcccgaccccagctcttgtctggtagctggcttcccaccgtgtccccagaggtccactctcatgccagccgctcctggagtttctccaaaattacatgatctgtcacctgccgcatacactaagggagttgcctcccctggtcactgccacttgggactgccgcagccggcaggggaggctcctgccgtgcaggatgtgcctcgcccagtagcaacgcacccgggttctccaggacagcctccaccagcactgcttcctcagcaggtctcagcacccccttcttccagctgtcctccgggacttgagcacagcctatgtccaagcagcccatcacctccactgcccccagcaacccaagaacccacttgcctccagccatgtagtcctgcctgtcccccagctacaggcagacctcagcatctcccctctaccgtcaggagggatgagtctcccacagccggtccgaggctgctgccagaagtgcatgaagacggctcaccaaacttggcacccattcctgtgactgtgaaaagagagccggaggaactcgatcagctgtatctcgatgacgtgaatgagataatacgtaatgatctgagcagtaccagtacacattcatag

SEQ ID NO: 98957 - DNA, 1416 bp, Artificial Sequence
  derived and/or modified sequence
atgctgcagttgttcatcggaactgctgatgacagacttcttaggccacacgcattctaccaggtacacagaattaccggtaaaacagtgtccactacatcacacgaagcgattttgtccaatacgaaagtattagagattccactcttacccgagaattccatgcgggctgtgatcgattgcgctgggatcttaaagctgcgaaattctgacatcgagctccgtaaaggcgagacagacatcgggaggaagaatactagagtgagacttgtgtttcgggtgcatgtcccccagcctagcggcagaacactgtccctgcaagtcgcttcaaaccccatcgagtgctctcaacggtcggcccaggaactgcccctggtcgagaagcaatccactgattcttatcctgtagtgggtggcaaaaaaatggtccttagcggccacaactttcttcaagatagtaaagtcatatttgtagagaaagctccagacgggcatcatgtgtgggagatggaagcgaagactgatagggacctgtgcaagcccaactcgttggtcgtagaaattcccccttttcggaatcagagaatcaccagtccagtgcatgtttccttctacgtctgtaacgggaagcgcaagaggtctcagtatcagcgattcacttacctgccagccaatgtccccattatcaagacagaacccaccgatgactatgagccagccccaacgtgcgggccagtctcacagggactgtcccctttaccgcgtccgtattactctcagcaattggcaatgcccccagatccgagttcttgcttggtcgcaggctttccgccttgtccacagcgctcgaccctgatgcccgctgccccaggcgttagcccaaagttgcatgacctttcgccggcagcctacaccaagggcgtagcgtccccaggccattgtcacctgggactaccccaacccgctggggaagcccctgccgttcaggacgtgcccaggcccgttgctacccatcctggaagtcccggtcagccacctccagctttgctgccccagcaagtcagtgcccctccctcaagcagctgtcctcctgggttggagcacagcttgtgtccaagcagcccttcgccacctctgcctccagcaacccaggagccgacctgtttgcagccttgcagcccagcatgccctccggcaacagggcgtccgcagcacctgccaagtactgtacgcagagacgagagcccaacggccggtcccagactgctcccagaggtacatgaagacggctcccccaatctggctcccataccagtgacagtgaagcgggagccggaggagctggatcagttatacctggacgacgtgaacgaaatcatcagaaatgacctgtctagcaccagtacccattcatag

SEQ ID NO: 98958 - protein, 713 aa, Artificial Sequence
  derived and/or modified sequence
MPSTSFPVPSKFPLGPAAAVFGRGETLGPAPRAGGTMKSAEEEHYGYASSNVSPALPLPTAHSTLPAPCHNLQTSTPGIIPPADHPSGYGAALDGGPAGYFLSSGHTRPDGAPALESPRIEITSCLGLYHNNNQFFHDVEVEDVLPSSKRSPSTATLSLPSLEAYRDPSCLSPASSLSSRSCNSEASSYESNYSYPYASPQTSPWQSPCVSPKTTDPEEGFPRGLGACTLLGSPRHSPSTSPRASVTEESWLGARSSRPASPCNKRKYSLNGRQPPYSPHHSPTPSPHGSPRVSVTDDSWLGNTTQYTSSAIVAAINALTTDSSLDLGDGVPVKSRKTTLEQPPSVALKVEPVGEDLGSPPPPADFAPEDYSSFQHIRKGGFCDQYLAVPQHPYQWAKPKPLSPTSYMSPTLPALDWQLPSHSGPYELRIEVQPKSHHRAHYETEGSRGAVKASAGGHPIVQLHGYLENEPLMLQLFIGTADDRLLRPHAFYQVHRITGKTVSTTSHEAILSNTKVLEIPLLPENSMRAVIDCAGILKLRNSDIELRKGETDIGRKNTRVRLVFRVHVPQPSGRTLSLQVASNPIECSQRSAQELPLVEKQSTDSYPVVGGKKMVLSGHNFLQDSKVIFVEKAPDGHHVWEMEAKTDRDLCKPNSLVVEIPPFRNQRITSPVHVSFYVCNGKRKRSQYQRFTYLPANVNEIIRNDLSSTSTHS

SEQ ID NO: 98959 - DNA, 2142 bp, Artificial Sequence
  derived and/or modified sequence
atgcccagcaccagcttccccgtgcccagcaagttccccctgggccccgccgccgccgtgttcggcagaggcgagaccctgggccccgcccccagagccggcggcaccatgaagagcgccgaggaggagcactacggctacgccagcagcaacgtgagccccgccctgcccctgcccaccgcccacagcaccctgcccgccccctgccacaacctgcagaccagcacccccggcatcatcccccccgccgaccaccccagcggctacggcgccgccctggacggcggccccgccggctacttcctgagcagcggccacaccagacccgacggcgcccccgccctggagagccccagaatcgagatcaccagctgcctgggcctgtaccacaacaacaaccagttcttccacgacgtggaggtggaggacgtgctgcccagcagcaagagaagccccagcaccgccaccctgagcctgcccagcctggaggcctacagagaccccagctgcctgagccccgccagcagcctgagcagcagaagctgcaacagcgaggccagcagctacgagagcaactacagctacccctacgccagcccccagaccagcccctggcagagcccctgcgtgagccccaagaccaccgaccccgaggagggcttccccagaggcctgggcgcctgcaccctgctgggcagccccagacacagccccagcaccagccccagagccagcgtgaccgaggagagctggctgggcgccagaagcagcagacccgccagcccctgcaacaagagaaagtacagcctgaacggcagacagcccccctacagcccccaccacagccccacccccagcccccacggcagccccagagtgagcgtgaccgacgacagctggctgggcaacaccacccagtacaccagcagcgccatcgtggccgccatcaacgccctgaccaccgacagcagcctggacctgggcgacggcgtgcccgtgaagagcagaaagaccaccctggagcagccccccagcgtggccctgaaggtggagcccgtgggcgaggacctgggcagcccccccccccccgccgacttcgcccccgaggactacagcagcttccagcacatcagaaagggcggcttctgcgaccagtacctggccgtgccccagcacccctaccagtgggccaagcccaagcccctgagccccaccagctacatgagccccaccctgcccgccctggactggcagctgcccagccacagcggcccctacgagctgagaatcgaggtgcagcccaagagccaccacagagcccactacgagaccgagggcagcagaggcgccgtgaaggccagcgccggcggccaccccatcgtgcagctgcacggctacctggagaacgagcccctgatgctgcagctgttcatcggcaccgccgacgacagactgctgagaccccacgccttctaccaggtgcacagaatcaccggcaagaccgtgagcaccaccagccacgaggccatcctgagcaacaccaaggtgctggagatccccctgctgcccgagaacagcatgagagccgtgatcgactgcgccggcatcctgaagctgagaaacagcgacatcgagctgagaaagggcgagaccgacatcggcagaaagaacaccagagtgagactggtgttcagagtgcacgtgccccagcccagcggcagaaccctgagcctgcaggtggccagcaaccccatcgagtgcagccagagaagcgcccaggagctgcccctggtggagaagcagagcaccgacagctaccccgtggtgggcggcaagaagatggtgctgagcggccacaacttcctgcaggacagcaaggtgatcttcgtggagaaggcccccgacggccaccacgtgtgggagatggaggccaagaccgacagagacctgtgcaagcccaacagcctggtggtggagatcccccccttcagaaaccagagaatcaccagccccgtgcacgtgagcttctacgtgtgcaacggcaagagaaagagaagccagtaccagagattcacctacctgcccgccaacgtgaacgagatcatcagaaacgacctgagcagcaccagcacccacagctag

SEQ ID NO: 98960 - DNA, 2142 bp, Artificial Sequence
  derived and/or modified sequence
atgccttcgactagctttcctgtgccgagcaaatttcctctgggacccgcggccgcggttttcggtagaggtgagactctgggccctgctcctcgggccggcggtactatgaagtccgcagaagaagagcactacggatacgcctcttctaatgtttccccggcgcttcctttaccaactgctcacagcaccctcccagctccctgccacaaccttcagacatctactcccggcatcatcccacccgccgatcacccttcaggatacggagctgcactggatggcggccccgcggggtacttcctgtcaagcgggcacacccgacctgacggtgctcccgcgttagagagtcctaggatcgagattacaagctgtttaggcttgtatcataacaacaaccaattctttcacgatgtcgaagtggaggatgtgcttccttcatctaaaagatcccccagcactgctacactgagccttccatcactagaagcttatagagatcctagctgtttgagccctgccagctccctatcctctaggtcatgcaatagtgaggcatcttcttatgaatccaactatagctacccatatgctagccctcagaccagtccatggcagtctccctgcgtcagcccaaagacaaccgaccctgaggagggatttccgagaggccttggtgcgtgcactctgctgggcagccctaggcatagccctagtacaagccctagagcatctgttactgaggagtcctggctgggagcccgatcctcccgacccgcctcaccatgcaataagagaaagtattctctgaatggaagacagcccccttacagccctcatcatagcccaacgccatcaccacatggaagccctcgtgtatcagtcacagatgatagctggttgggaaataccactcagtatacaagcagcgccatcgtcgcagctatcaatgctctgacaacagacagcagtctggatttgggcgatggtgtgccagtgaagtcccgcaagacaaccctggagcagccccctagtgtagctctgaaggtggagcctgtaggcgaagatctggggtccccacccccccccgccgatttcgctccagaggactacagctcattccagcatatcagaaaaggaggtttttgtgatcagtatctggccgtaccgcaacacccttaccaatgggctaagccaaagcctctcagccctaccagctatatgagccccactcttccagccttagactggcagctgccttcacatagtggtccctatgagctgagaatcgaggttcagcctaagagccaccaccgtgcccattacgagacagaaggatcgagaggtgcagtgaaggccagcgccggcggccatccaattgtgcagctccacggataccttgagaacgagcctcttatgctgcaattgttcataggtacagcggacgataggcttctgcgacctcatgccttctaccaagtccaccgtatcactggtaagactgtgagtacaaccagccacgaggcaatactgagtaatactaaagtgttagagattccactactgcccgaaaactctatgcgtgcggtcatcgattgtgcagggattttaaaactgagaaattcagacatagaactccggaagggagaaaccgacattggtcgcaaaaataccagggtgagactggtgttcagagtgcacgtaccccaaccctccggcaggacactttccctacaagtggcatccaaccccatcgagtgtagtcagcgctcggcccaggagcttcctctggttgaaaaacagtctactgatagctatccggttgtgggcggcaagaaaatggtgctctctgggcacaactttctgcaggactctaaggtgatcttcgtggagaaagcccctgacgggcaccacgtgtgggagatggaagccaagaccgatcgcgacctctgcaagcctaattccctcgtagtcgaaattccaccttttcgtaatcagcgtataacctcccccgtccatgtgtccttttacgtgtgcaatggtaagaggaaacgtagccaatatcagcgcttcacgtaccttccagctaacgtaaatgaaattattcgtaacgacctatcttctacaagcactcattcgtag

SEQ ID NO: 98961 - DNA, 2142 bp, Artificial Sequence
  derived and/or modified sequence
atgcccagcaccagcttccctgtgcccagcaagttccccctgggccctgctgctgctgtgtttggccgcggggagaccctgggccctgcccccagggctgggggcaccatgaagtctgctgaggaggagcactacggctacgccagcagcaatgtgtccccagccctgcccctgcccacagcccacagcaccctgcctgccccctgccacaacctgcagaccagcaccccaggcatcatccccccagctgaccaccccagcggctatggagctgccctggatggcggccctgctggctacttcctgagcagcggccacaccaggccagatggagccccagccctggagagcccccgcatcgagatcaccagctgcctgggcctgtaccacaacaacaaccagttcttccatgatgtggaggtggaggatgtgctgcccagcagcaagaggagccccagcacagccaccctgagcctgcccagcctggaggcctacagagaccccagctgcctgagccctgccagcagcctgagcagccgcagctgcaacagcgaggccagcagctatgagagcaactacagctacccctatgccagcccccagaccagcccctggcagagcccctgtgtgagccccaagaccacagatcctgaggagggcttcccccggggcctgggcgcctgcaccctgctgggcagccccaggcacagccccagcaccagcccccgggcctctgtgacagaggagagctggctgggcgcccggagcagcaggcctgccagcccctgcaacaagaggaagtacagcctgaatggccggcagcccccctacagcccccaccacagccccacccccagcccccacggcagcccccgggtgtctgtgacagatgacagctggctgggcaacaccacccagtacaccagcagcgccatcgtggccgccatcaatgccctgaccacagacagcagcctggacctgggagatggagtgcctgtgaagagcaggaagaccaccctggagcagcccccatctgtggccctgaaggtggagcctgtgggggaggacctgggcagccccccacctcctgctgactttgcccctgaggactacagcagcttccagcacatcagaaaaggaggcttctgtgaccagtacctggccgtgccccagcacccctaccagtgggccaagcccaagcccctgagccccaccagctacatgagccccaccctgcctgccctggactggcagctgcccagccacagcggcccctatgagctgcgcatcgaggtgcagcccaagagccaccaccgggcccactatgaaacagagggcagcagaggagctgtgaaggccagcgctgggggccaccccatcgtgcagctgcacggctacctggagaatgagcccctgatgctgcagctgttcatcggcacagcagatgaccggctgctgcggccccacgccttctaccaggtgcaccgcatcaccgggaagacagtgtccaccaccagccatgaggccatcctgagcaacaccaaggtgctggagatccccctgctgcctgagaacagcatgagagctgtgattgactgtgccggcatcctgaagctgaggaacagcgacatcgagctgaggaagggggagacagacattggaaggaagaacaccagggtgcggctggtgttccgggtgcacgtgccccagcccagcggccgcaccctgagcctgcaggtggccagcaaccccatcgagtgcagccagaggtctgcccaggagctgcccctggtggagaagcagagcacagacagctaccctgtggtgggcggcaagaagatggtgctgagcggccacaacttcctgcaggacagcaaggtgatctttgtggagaaggccccagatggccaccacgtgtgggagatggaggccaagacagaccgggacctgtgcaagcccaacagcctggtggtggagatcccccccttcaggaaccagaggatcaccagccctgtgcacgtgtccttctacgtgtgcaatggcaagaggaagaggagccagtaccagcgcttcacctacctgcctgccaacgtgaatgagatcatcagaaatgacctgagcagcaccagcacccacagctag

SEQ ID NO: 98962 - DNA, 2142 bp, Artificial Sequence
  derived and/or modified sequence
atgcccagcaccagcttccccgtgcccagcaagttccccctgggcccggcagcagccgtgtttggcaggggcgaaactttaggcccagcaccgcgtgctggtggaaccatgaaatccgctgaagaagaacattatgggtacgcgtcgagtaacgtttcacccgcccttcccctacccacagcacacagtactctacccgcaccatgccataatctgcagacatccacgcccggcataatcccccctgccgaccacccctcaggctacggagctgcactagacggcggccccgcgggatactttctgagttcaggccatacgcggcccgatggcgcacctgccctcgagtccccacggatcgaaattacctcctgcctgggcctataccataacaataaccagttcttccacgatgtcgaagttgaggatgtcttaccttcatcaaaaagatcacctagcaccgccacgctatcactcccttcactggaggcgtatcgagacccaagttgcctttcccccgcatcatctctgtcatctagatcatgtaactctgaagcttcatcatatgagtccaactacagctatccttacgcctcgccacagacctcaccctggcagtcaccctgcgtttccccgaagacaacggatccggaggaggggtttcccagaggtcttggggcctgcacgttactcggaagtcctaggcacagcccgtctacttccccacgtgcaagtgtgaccgaggaaagttggctgggcgccagatcctctcggccagcaagtccctgcaataaacgcaagtatagcctcaatggccgacagcccccctacagtccccaccactcccccactccatcgcctcatggaagcccacgagtgtccgtgacagacgactcgtggttgggcaacaccactcagtacacctcctccgccatcgtggcagccatcaatgcactaacgacagactcctccttggacctcggtgacggggtccctgtcaaatcccgaaaaaccaccctggagcaaccaccctcagtcgcgctgaaagtggaaccggtgggtgaggatctgggttcacctccacctcctgcggattttgcccctgaggattattcaagtttccagcacatacgtaaaggcggattctgtgaccagtacctggctgtaccccagcacccctaccagtgggctaagcctaagcctttgtctccaacatcttacatgtctcctacactgcctgcccttgactggcagctgccctctcatagcggtccgtatgaactacgcattgaggtccagccgaaatcacaccaccgggcgcattatgagactgagggcagcaggggagctgtaaaagcttccgctgggggccaccctattgtccagctccacggttacttggaaaatgagcccctaatgctgcaactgttcatcggcacagctgatgacagactcttaaggccgcacgcattctaccaggtccatcgaataactggaaaaaccgtctcgaccacaagtcatgaggccattctgtccaatacgaaggtgctggaaatccctcttctgcccgaaaacagtatgcgcgcggttatcgactgcgccggcattctcaagctccgaaattctgatatagagcttagaaagggagaaacggatatcgggaggaagaacactcgggtgaggctcgtgttcagggttcatgtcccccagccctcagggcgtacgctttccctgcaagtggcttccaatccaatagaatgctcgcaacgaagcgcacaagaactgcccctcgtggaaaaacagtcgactgacagctatcctgttgtcggtggaaagaagatggtgctgtctgggcataactttctccaagactcaaaggtgatcttcgtcgagaaagcacctgatggacatcacgtgtgggaaatggaagccaaaacggatagagacctgtgcaagcccaattcactggtcgttgagattccccctttcaggaaccagagaattacttctcccgtacacgtgagcttttacgtatgcaacggaaaacgcaagcgaagccaatatcaaaggtttacgtatctgcctgcaaacgtgaatgagattatccgaaacgacctgtcgagtacaagcacccactcatag

SEQ ID NO: 98963 - DNA, 2142 bp, Artificial Sequence
  derived and/or modified sequence
atgccaagcaccagctttccagtcccttccaagtttccacttggccctgcggctgcggtcttcgggagaggagaaactttggggcccgcgccgcgcgccggcggcaccatgaagtcagcggaggaagaacactatggctatgcatcctccaacgtcagccccgccctgccgctccccacggcgcactccaccctgccggccccgtgccacaaccttcagacctccacaccgggcatcatcccgccggcggatcacccctcggggtacggagcagctttggacggtgggcccgcgggctacttcctctcctccggccacaccaggcctgatggggcccctgccctggagagtcctcgcatcgagataacctcgtgcttgggcctgtaccacaacaataaccagtttttccacgatgtggaggtggaagacgtcctccctagctccaaacggtccccctccacggccacgctgagtctgcccagcctggaggcctacagagacccctcgtgcctgagcccggccagcagcctgtcctcccggagctgcaactcagaggcctcctcctacgagtccaactactcgtacccgtacgcgtccccccagacgtcgccatggcagtctccctgcgtgtctcccaagaccacggaccccgaggagggctttccccgcgggctgggggcctgcacactgctgggttccccgcggcactccccctccacctcgccccgcgccagcgtcactgaggagagctggctgggtgcccgctcctccagacccgcgtccccttgcaacaagaggaagtacagcctcaacggccggcagccgccctactcaccccaccactcgcccacgccgtccccgcacggctccccgcgggtcagcgtgaccgacgactcgtggttgggcaacaccacccagtacaccagctcggccatcgtggccgccatcaacgcgctgaccaccgacagcagcctggacctgggagatggcgtccctgtcaagtcccgcaagaccaccctggagcagccgccctcagtggcgctcaaggtggagcccgtcggggaggacctgggcagccccccgcccccggccgacttcgcgcccgaagactactcctctttccagcacatcaggaagggcggcttctgcgaccagtacctggcggtgccgcagcacccctaccagtgggcgaagcccaagcccctgtcccctacgtcctacatgagcccgaccctgcccgccctggactggcagctgccgtcccactcaggcccgtatgagcttcggattgaggtgcagcccaagtcccaccaccgagcccactacgagacggagggcagccggggggccgtgaaggcgtcggccggaggacaccccatcgtgcagctgcatggctacttggagaatgagccgctgatgctgcagcttttcattgggacggcggacgaccgcctgctgcgcccgcacgccttctaccaggtgcaccgcatcacagggaagaccgtgtccaccaccagccacgaggccatcctctccaacaccaaagtcctggagatcccactcctgccggagaacagcatgcgagccgtcattgactgtgccggaatcctgaaactcagaaactccgacattgaacttcggaaaggagagacggacatcgggaggaagaacacacgggtacggctggtgttccgcgttcacgtcccgcaacccagcggccgcacgctgtccctgcaggtggcctccaaccccatcgaatgctcccagcgctcagctcaggagctgcctctggtggagaagcagagcacggacagctatccggtcgtgggcgggaagaagatggtcctgtctggccacaacttcctgcaggactccaaggtcattttcgtggagaaagccccagatggccaccatgtctgggagatggaagcgaaaactgaccgggacctgtgcaagccgaattctctggtggttgagatcccgccatttcggaatcagaggataaccagccccgttcacgtcagtttctacgtctgcaacgggaagagaaagcgaagccagtaccagcgtttcacctaccttcccgccaacgtaaatgaaataatacgaaatgacctctccagcacgagcacccactcctag

SEQ ID NO: 98964 - DNA, 2142 bp, Artificial Sequence
  derived and/or modified sequence
atgccgtctacatccttccctgtgccaagtaaatttcctctgggcccagccgctgctgtgtttgggagaggtgagacgttgggacccgcacctagggccggaggcactatgaagtcagctgaggaagaacactatggctacgcttcctctaacgtgtctcccgctctccctctgccaaccgctcattctactctgccagccccatgccacaacctgcaaacttccacgccaggaatcattcctcctgctgaccatccatcaggatacggagcagcccttgacggaggcccagccggatacttcctgagctccggtcatacccgacctgacggtgcacctgcgctcgaaagtcctcgaattgagattacctcatgtctgggcttgtaccataacaataaccagttctttcacgatgtagaagtggaagatgtgctgcccagctctaagcggagtccctcaacggctaccttgtcactgccatccctagaggcctaccgagatcccagctgtctgtctccagcttcatcgctgtccagccgctcatgtaattcagaggcaagttcctacgagtcaaattactcttatccgtacgcaagtcctcagacatccccctggcagtcaccatgtgtgtctccaaagacaactgatcctgaggagggttttccacggggactgggggcttgcaccctgcttgggtcccccagacatagcccatcgaccagcccccgagcttcagttacggaagaatcttggctcggagcgcgaagttcccggcctgcctccccctgtaacaagagaaaatacagcctgaatggaaggcagcctccgtactcaccgcaccacagccctaccccgtccccgcatggctctccccgtgtgtcagtgacagatgattcctggttaggaaacaccacccaatatacaagtagcgccatcgtggcggcaataaatgccttgacgaccgactcttcattggacctgggcgacggagtgcccgtcaaatcaaggaagacgaccctggagcagccaccttctgttgcactgaaagttgaaccagtaggcgaagatctggggtccccgccaccacctgccgacttcgctcctgaagattattccagtttccagcatataaggaaaggcggattttgcgaccagtaccttgctgtcccacagcatccatatcagtgggcgaagccaaagccattgtcccccacttcgtacatgtctcctaccctacccgcactggactggcaactgcccagccattcaggtccatatgagctgcgtatcgaggtccagcctaaatctcaccacagagcccactatgagactgaaggttccaggggcgcagttaaggcctcggccggtggacaccccattgtgcagcttcatgggtacttagaaaatgagcccctgatgctgcagttgtttatcggaaccgccgacgatcgtttactgcggccacatgctttttatcaggtccacagaattactggtaaaactgtgtccacgacctcccacgaggccatactttccaacaccaaggttcttgaaatcccactgctgccagagaactctatgcgcgctgtaatcgactgtgccggtattctaaagctgcgaaactccgacattgagctcagaaagggggagactgacatcgggaggaaaaacacaagggtgcgcctggtgtttcgagtacatgttccacagccctccgggagaacgttgagcttacaggtggcctcaaacccaatcgagtgctcacagaggtcggcccaagaacttcctttggtggaaaagcagtcaaccgactcatatcccgtggtcggcggtaagaagatggtgctgtcagggcacaactttttgcaggacagcaaagtgatttttgtggagaaggctcctgacggccaccacgtatgggagatggaagcaaagactgaccgggacctatgtaagcccaactccttggtcgtggagatccctccgttccgaaaccaacgcatcactagtcctgtgcacgtgtccttctatgtctgcaacggcaagcgcaagcgtagccaataccagcggttcacttacctccccgcaaacgtaaacgagataatccgcaacgatctttcctccacgagtacacatagctag

SEQ ID NO: 98965 - DNA, 309 bp, Artificial Sequence
  derived and/or modified sequence
atggctcaggatttcagtcagcatcctcagactggtataattcggcggcacagattctacagcccaaagcctttgtctacaacccccagaggccagagttttcttctgtccaggcaagcaaaagtggccacctgggaccccatgcttagtcctgatttccagccaaagtctgccttcaagttgacatggacagcccagccgccatgtctgagcgttacaccttcgcagggtcagacattccatccgaacagccctgagggagaacttccacctgacctcacggaaaatacgtgccctagtcaagcatag

SEQ ID NO: 98966 - DNA, 378 bp, Artificial Sequence
  derived and/or modified sequence
atgagggtggtgatggcccggctgctgtctgagggggagcagggcatccccacagcctgtgccgcctttgcccagcagcctgctggcccccggcggggcctggccggcgtgggggagggcggcccccagtgctcctgggtgaactaccgctgcaccctggagttcctggtgtccctgctgggcacagacctggcccggggccggggcaacagcgccagcggccccacagccccagctgacagcaagcagctgatgaacagcggcagccctgcccgggacaatgcccccagccagcgcttctgcaccaacctgtctgagggcctgcgcttcggcatcagccccagctggagggaggccctgtatggctgccacgcctag

SEQ ID NO: 98967 - DNA, 309 bp, Artificial Sequence
  derived and/or modified sequence
atggcccaggacttcagccagcacccccagacaggcatcatcagaagacaccgcttctacagccccaagcccctgagcaccaccccccggggccagagcttcctgctgagccggcaggccaaggtggccacctgggaccccatgctgagcccagacttccagcccaagagcgccttcaagctgacctggacagcccagcccccctgcctgtctgtgacccccagccagggccagaccttccaccccaacagccctgagggggagctgcccccagacctgacagagaacacctgccccagccaggcctag

SEQ ID NO: 98968 - DNA, 387 bp, Artificial Sequence
  derived and/or modified sequence
atgggcaccagcagcatcttcctgtgtgtgctcttcctgtgtggggccctgggcctgaccatgagccctgcccggggccgcctgcgctgctacatctgtggcttcaccaagccctgccaccctgtgcccacagaatgtagagatgatgaggcctgtggcatcagcatcggcacctctgtgaagaagctgcccctgaagggccctgtgcccagcgcccggctgtgccacctgctggccgccctgctgcacagcgtggcccccctgctgcgggccggccctgtgcagcacagccgcttccccacagctgcccaccagcccccccggctgcctgcccccctgtgtggccagctgcgctgggagaggaccccaccacccctggccagctag

SEQ ID NO: 98969 - DNA, 309 bp, Artificial Sequence
  derived and/or modified sequence
atggcccaggacttcagccagcacccccagaccggcatcatccggaggcatcgtttttactctccaaaaccactgtcaaccaccccacgaggtcagtcttttctgctgagcagacaggcaaaagtggccacttgggatccaatgctttcacccgattttcaacccaagtcggcctttaaactcacgtggactgcccagcctccttgcttgtctgtgacaccgtctcaaggtcagacctttcacccaaattcaccggaaggggagttgccgcctgacctgacagagaatacctgtccttcacaagcctag

SEQ ID NO: 98970 - DNA, 309 bp, Artificial Sequence
  derived and/or modified sequence
atggctcaggacttctcgcagcatccccagactggaatcataagaagacacagattttattccccaaaacccttgtcaacaactccacgaggccaatcatttctgctgtcaagacaagccaaggtcgccacctgggatcccatgctctctccagacttccagcctaaaagcgctttcaagctgacctggacagctcagcctccatgcctgtcagtgactcccagccagggtcagacttttcaccccaactcccctgagggggaactgccaccagatttaaccgaaaatacttgcccctctcaggcttag

SEQ ID NO: 98971 - DNA, 303 bp, Artificial Sequence
  derived and/or modified sequence
atgcgaccaaagcacctccagggcatagctccggaggtcttccgaaccccgacgggatcacacggccagatgcctggacagcccttgcaacgcggacacgcgctcgatatcaggccccctttgagaccacaccccctgattagcgggcatgccctcaggggagaccggtggcaaactccagctcttgccttgggccctgctctttgtggatttgtccctgctcactgggtgctgaccgttccccctcctcagaggccttccatcccttcccgttctgctgatacatgtcctgccagccggtag

SEQ ID NO: 98972 - DNA, 288 bp, Artificial Sequence
  derived and/or modified sequence
atgtcctgccagcagaaccagcagcagtgccagcctctgcccaagtgcccctcacccaagtgccccccaaagagctcagcacagtgtctgcctccagcctcctcctgctgtgctccaagacctgggtgctgtggtggccccagctctgagggcggctgctgcctgagccaccacaggtgctgcaggtcccaccgatgccggcgccagagctccaactcctgtgacagaggcagtggtcagcaagatggtgcctccgactgtggctatggctctggaggctgctgctga

SEQ ID NO: 98973 - DNA, 1352 bp, Artificial Sequence
  derived and/or modified sequence
cacaacatttccttgtatgtggatagcgtgaaagaagcttgtgatcctgcccccaccctccccaccgccacattttttaaagtgtattgttgcagcatctggcagtgagactgaggatgaggacagcatggacattcccttggacctttcttcatccgctggctcaggcaagagaaggagaaggggcaacctacccaaggagtctgtgcagattcttcgggattggctgtatgagcaccgttacaatgcctatccttcagagcaagaaaaagcgttgctgtcccagcaaacacacctgtctacgctacaggtctgtaactggttcatcaacgcccgccgcaggctcctccctgacatgctgagaaaggatggcaaagatccaaatcagttcacaatttcccgccgtggggccaagatttctgaaacgagctctgtggagtccgtgatgggcatcaaaaacttcatgccagctctagaggagaccccatttcattcctgtacagctgggccaaacccaaccctagggaggccactgtctcctaagccgtcatccccgggatcagttttggctcgtccatcagtgatctgccataccactgtgactgcattgaaagatgtccctttctctctctgccagtcggtcggtgtgggacaaaacacagatatacagcagatagcggccaaaaacttcacagacacctctctcatgtacccagaggacacttgtaaatctggaccaagtacgaatacacagagtggtcttttcaacactcctccccctactccaccggacctcaaccaggacttcagtggatttcagcttctagtggatgttgcactcaaacgggctgcagagatggagcttcaggcaaaacttacagcttaacccattttcaagcaaaacagttctcagaaatgtcatgattgccggggtgaaggcaagagatgaattgcattattttatatattttttattaatatttgcacatgggattgctaaaacagcttcctgttactgagatgtcttcaatggaatacagtcattccaagaactataaacttaaagctactgtagaaacaaagggttttcttttttaaatgtttcttggtagattattcataatgtgagatggttcccaatatcatgtgattttttttttcctccccttccctttttttgttattttttcagactgtgcaatacttagagaacctatagcatcttctcattcccatgtggaacaggatgcccacatactgtctaattaataaattttccattttttttcaaacaagtatgaatctagttggttgatgccttttttttcatgacataataaagtattttcttt

SEQ ID NO: 98974 - DNA, 563 bp, Artificial Sequence
  derived and/or modified sequence
agcatgtgagcgtgacaagtgtctgtccgcaacgtgtcagatttcgaaactgccttgcaatccagtccggaactcgcagctttagcccgggggaacagacgttcgtttaggctgtgtctcatcattcccccccgccccacccccgccgacctcccactgtcgctgctggaggaagagccccgggaggagaagggtgcgccgcgccgcgcccgcgtgtcaatggcagccgcgcattctggaagaagtattgttgcagcatctggcagtgagactgaggatgaggacagcatggacattcccttggacctttcttcatccgctggctcaggcaagagaaggagaaggggcaacctacccaaggagtctgtgcagattcttcgggattggctgtatgagcaccgttacaatgcctatccttcagagcaagaaaaagcgttgctgtcccagcaaacacacctgtctacgctacaggtctgtaactggttcatcaacgcccgccgcaggctcctccctgacatgctgagaaaggatggcaaagatccaaatcagttcacaatttcccg

SEQ ID NO: 98975 - DNA, 526 bp, Artificial Sequence
  derived and/or modified sequence
cacaacatttccttgtatgtggatagcgtgaaagaagcttgtgatcctgcccccaccctccccaccgccacattttttaaagtgtattgttgcagcatctggcagtgagactgaggatgaggacagcatggacattcccttggacctttcttcatccgctggctcaggcaagagaaggagaaggggcaacctacccaaggagtctgtgcagattcttcgggattggctgtatgagcaccgttacaatgcctatccttcagagcaagaaaaagcgttgctgtcccagcaaacacacctgtctacgctacaggtctgtaactggttcatcaacgcccgccgcaggctcctccctgacatgctgagaaaggatggcaaagatccaaatcagttcacaatttcccgccgtggggccaagatttctgaaacgagctctgtggagtccgtgatgggcatcaaaaacttcatgccagctctagaggagaccccatttcattcctgtacagctgggccaaacccaaccctaggg

SEQ ID NO: 98976 - protein, 272 aa, Artificial Sequence
  derived and/or modified sequence
MKGKKGIVAASGSETEDEDSMDIPLDLSSSAGSGKRRRRGNLPKESVQILRDWLYEHRYNAYPSEQEKALLSQQTHLSTLQVCNWFINARRRLLPDMLRKDGKDPNQFTISRRGAKISETSSVESVMGIKNFMPALEETPFHSCTAGPNPTLGRPLSPKPSSPGSVLARPSVICHTTVTALKDVPFSLCQSVGVGQNTDIQQIAAKNFTDTSLMYPEDTCKSGPSTNTQSGLFNTPPPTPPDLNQDFSGFQLLVDVALKRAAEMELQAKLTA

SEQ ID NO: 98977 - DNA, 1618 bp, Artificial Sequence
  derived and/or modified sequence
tctgacagcgccgaggtgcgccgagcaggagcagggaacaaaggagcggagaggggaggggagagagttgggcgagggagagcccccggccggctgccagaagatcccggcgggaggaagcccaagtgtcacttgaattccacccaaggagcgggcgcctgggatcagagcgtcctgtttagcaataacggctggagcacgtcctacaagttacgggagagtcggctgtgaaggagacgttcgcttatcccctgtgtccccgctcctggcccctccagacccccgccttgcctcgcgctgggaggggagatccagaatgaaaggcaagaaaggtattgttgcagcatctggcagtgagactgaggatgaggacagcatggacattcccttggacctttcttcatccgctggctcaggcaagagaaggagaaggggcaacctacccaaggagtctgtgcagattcttcgggattggctgtatgagcaccgttacaatgcctatccttcagagcaagaaaaagcgttgctgtcccagcaaacacacctgtctacgctacaggtctgtaactggttcatcaacgcccgccgcaggctcctccctgacatgctgagaaaggatggcaaagatccaaatcagttcacaatttcccgccgtggggccaagatttctgaaacgagctctgtggagtccgtgatgggcatcaaaaacttcatgccagctctagaggagaccccatttcattcctgtacagctgggccaaacccaaccctagggaggccactgtctcctaagccgtcatccccgggatcagttttggctcgtccatcagtgatctgccataccactgtgactgcattgaaagatgtccctttctctctctgccagtcggtcggtgtgggacaaaacacagatatacagcagatagcggccaaaaacttcacagacacctctctcatgtacccagaggacacttgtaaatctggaccaagtacgaatacacagagtggtcttttcaacactcctccccctactccaccggacctcaaccaggacttcagtggatttcagcttctagtggatgttgcactcaaacgggctgcagagatggagcttcaggcaaaacttacagcttaacccattttcaagcaaaacagttctcagaaatgtcatgattgccggggtgaaggcaagagatgaattgcattattttatatattttttattaatatttgcacatgggattgctaaaacagcttcctgttactgagatgtcttcaatggaatacagtcattccaagaactataaacttaaagctactgtagaaacaaagggttttcttttttaaatgtttcttggtagattattcataatgtgagatggttcccaatatcatgtgattttttttttcctccccttccctttttttgttattttttcagactgtgcaatacttagagaacctatagcatcttctcattcccatgtggaacaggatgcccacatactgtctaattaataaattttccattttttttcaaacaagtatgaatctagttggttgatgccttttttttcatgacataataaagtattttctttaaaaaaaaaaaaaaaaa

SEQ ID NO: 98978 - DNA, 819 bp, Artificial Sequence
  derived and/or modified sequence
atgaagggcaaaaaggggatcgtagcagcttccggttccgagactgaagacgaggattccatggatatcccactggacctatcatcatccgctggttctggcaaaaggcgccgaagaggcaacctgcccaaggaatccgtgcaaatcctgcgcgattggctctacgaacatcgctataacgcttatcccagtgagcaggagaaggctctgctgtcacaacagactcaccttagtaccctgcaagtttgcaattggttcataaatgcacgcagaaggttgctgcccgacatgttgcggaaagacggcaaggacccaaaccaatttacaataagccgcagaggtgcgaagataagtgagacgtcctccgtagaaagcgtgatgggtattaagaactttatgccagcattggaagagactccgttccattcttgcacagccgggcctaatccaacgcttggtcgcccactttcaccaaaaccatcatcccctggttctgtgctggcacgacctagcgtcatctgccacactacggtgacagccctgaaggacgtgcccttttcgctgtgccagtctgtgggcgtaggtcagaataccgatatccaacagatagccgccaagaactttactgacacaagcctgatgtatcccgaagacacctgtaaatctgggcccagtaccaatacacagagcggactgtttaatacacccccccccacgcccccagatctcaatcaggatttttccggctttcagctcctggtagatgtggccttgaaacgggctgctgagatggagctgcaggcgaagctgaccgcctag

SEQ ID NO: 98979 - DNA, 819 bp, Artificial Sequence
  derived and/or modified sequence
atgaaggggaagaaggggatcgttgccgcctccggatctgaaaccgaggacgaagactcaatggatattcccctggatctgtcctcttctgccggtagcggtaaacgccgccggcgcggaaacctgcctaaggagtctgtccaaatattgcgcgactggctgtacgagcaccggtataatgcttacccttccgaacaagaaaaagcacttttaagccagcagactcatttgtcaactctgcaggtgtgtaactggttcattaatgctaggaggcgcctcctccccgatatgcttaggaaagatgggaaagaccccaaccagttcacgatctcaagaaggggtgcaaaaatcagcgagaccagttcggtggagtctgtgatggggattaagaacttcatgcccgccctcgaagagacccctttccatagttgcacagcaggccctaaccccacactcgggaggccactgtccccaaaaccatcatctccagggtccgtgcttgccagaccctcagtcatttgtcacactaccgtcactgctctgaaggatgttccattctcactgtgccagtccgtgggagtgggccagaatacagatatccagcagatcgccgcaaaaaatttcacagacacttcgcttatgtatccggaggatacctgtaagtctggcccaagcacgaatacacaatcgggcctgtttaatacgccccccccaactcctcctgatctgaatcaggacttttccggctttcagctcctcgtggacgtggccttgaaacgcgcagctgagatggagttacaagccaaactcactgcttag

SEQ ID NO: 98980 - DNA, 819 bp, Artificial Sequence
  derived and/or modified sequence
atgaagggcaagaagggcatcgtggccgccagcggcagcgagacagaagatgaggacagcatggacatccccctggacctgagcagcagcgctggcagcggcaagagaagaagaagaggcaacctgcccaaggagagcgtgcagatcctgcgggactggctgtatgagcaccgctacaatgcctaccccagcgagcaggagaaggccctgctgagccagcagacccacctgagcaccctgcaggtgtgcaactggttcatcaatgcccggcggcggctgctgcctgacatgctgaggaaggatggcaaggaccccaaccagttcaccatcagccggcggggggccaagatcagcgagaccagctctgtggagagcgtgatgggcatcaagaacttcatgcctgccctggaggagacccccttccacagctgcacagctggccccaaccccaccctgggccggcccctgagccccaagcccagcagccctggctctgtgctggcccggcccagcgtcatctgccacaccaccgtgacagccctgaaggatgtgcccttcagcctgtgccagagcgtgggcgtgggccagaacacagacatccagcagattgctgccaagaacttcacagacaccagcctgatgtacccagaggacacctgcaagagcggccccagcaccaacacccagagcggcctcttcaacaccccaccacccaccccaccagacctgaaccaggacttcagcggcttccagctgctggtggatgtggccctgaagagagctgctgagatggagctgcaggccaagctgacagcctag

SEQ ID NO: 98981 - DNA, 819 bp, Artificial Sequence
  derived and/or modified sequence
atgaagggcaagaagggcatcgtggccgccagcggcagcgagaccgaggatgaagatagtatggacatcccgctggatctatcatcctcagctggatccggaaagcggcgaaggagagggaaccttcctaaggaaagcgttcagatccttagggattggctgtatgaacacaggtataatgcgtatccctccgaacaagagaaggcactcctatcccagcagacccacttgtctaccttgcaggtctgtaattggttcatcaacgccagacgcaggctgctgcccgatatgcttagaaaggatggcaaggacccaaaccaattcaccattagccgacggggtgccaaaatctccgaaaccagctctgtcgaatccgtgatgggaatcaagaatttcatgcccgcccttgaggagacaccctttcatagttgtaccgctggacccaatcccactctggggaggccactgtcccccaaaccgagctcacctggctctgtgttggcccgcccctctgttatttgccacaccacagtcacagcgcttaaagacgttccctttagtctgtgccagagcgtaggtgttggtcaaaacactgatattcagcagatcgctgcaaagaattttactgacacatctctcatgtatcctgaagatacctgcaagtccggacccagcacaaatacgcagtcgggattgtttaataccccacctcctaccccacccgacttgaaccaggattttagtggatttcagttgctcgtagacgtcgcccttaaaagagcagccgagatggaactgcaggcaaaactcacagcatag

SEQ ID NO: 98982 - DNA, 819 bp, Artificial Sequence
  derived and/or modified sequence
atgaagggcaagaagggcatcgtggccgccagcggcagcgagaccgaggacgaagacagtatggatatcccccttgacctgtctagctctgcaggcagcggcaagcgtcgcagaaggggtaacctgcccaaagaatccgtccagatcctgcgagattggctttatgaacaccgttacaatgcgtacccatccgaacaggaaaaagccctcctaagccaacaaactcacctgagcacactgcaagtctgtaactggtttattaatgcaagacgaagactgctgccagatatgctgaggaaggatgggaaagaccccaatcaattcactatcagcaggcgaggagctaagatcagcgaaacatcgagcgtagagagcgtgatgggcatcaaaaattttatgcccgcccttgaggagaccccctttcatagttgcactgcaggacccaatcctacgttggggagacctctatcacctaaaccttcaagcccaggttctgtcctggcaaggccaagcgtcatctgtcataccacggtgaccgctctcaaagacgtgccattctccttatgtcagtccgtaggggtggggcagaacacagatatacagcagatcgccgcaaaaaatttcaccgatacctcgctcatgtatcctgaagacacatgcaagtcagggccttcaactaatacacagtcagggctgtttaacacacccccacccacgccacctgatctgaaccaagacttcagtggtttccagctcttggtggacgtggcactcaagcgggctgcagaaatggaactgcaagccaaactgacagcatag

SEQ ID NO: 98983 - DNA, 2055 bp, Artificial Sequence
  derived and/or modified sequence
atcagaggcggctgtctcgtgcggctagagcagggccagtagagttcggggcagctgtcaaaaacgagacggggaggcttttcttcccgggggtggaggagggaaggagggaggtgtccttttttccatctgttgcagtttccgaaccaaacgcaccctcgccagccccgggaagaaaggcccaagggagaaacctggggcgctcggctggtgcccccaccgccgggcgagggatgcgggcggtccgtgcgcggcaggcggaaaggatcgtgtttctggacccggccaccccccgcgtccgcaccgccgcccccgagggacgagtgacagcggccgccgcgctcggtccagtcttcccggctggaaggtgcgggggaggggcggaggagcggcggggcgggagggggacggggcgggcggctgggggcggaggcaggacctcctgtaccttccctcctcgcctctctcactctgacagcgccgaggtgcgccgagcaggagcagggaacaaaggagcggagaggggaggggagagagttgggcgagggagagcccccggccggctgccagaagatcccggcgggaggaagcccaagtgtcacttgaattccacccaaggagcgggcgcctgggatcagagcgtcctgtttagcaataacggctggagcacgtcctacaagttacgggagagtcggctgtgaaggagacgttcgcttatcccctgtgtccccgctcctggcccctccagacccccgccttgcctcgcgctgggaggggagatccagaatgaaaggcaagaaaggtattgttgcagcatctggcagtgagactgaggatgaggacagcatggacattcccttggacctttcttcatccgctggctcaggcaagagaaggagaaggggcaacctacccaaggagtctgtgcagattcttcgggattggctgtatgagcaccgttacaatgcctatccttcagagcaagaaaaagcgttgctgtcccagcaaacacacctgtctacgctacaggtctgtaactggttcatcaacgcccgccgcaggctcctccctgacatgctgagaaaggatggcaaagatccaaatcagttcacaatttcccgccgtggggccaagatttctgaaacgagctctgtggagtccgtgatgggcatcaaaaacttcatgccagctctagaggagaccccatttcattcctgtacagctgggccaaacccaaccctagggaggccactgtctcctaagccgtcatccccgggatcagttttggctcgtccatcagtgatctgccataccactgtgactgcattgaaagatgtccctttctctctctgccagtcggtcggtgtgggacaaaacacagatatacagcagatagcggccaaaaacttcacagacacctctctcatgtacccagaggacacttgtaaatctggaccaagtacgaatacacagagtggtcttttcaacactcctccccctactccaccggacctcaaccaggacttcagtggatttcagcttctagtggatgttgcactcaaacgggctgcagagatggagcttcaggcaaaacttacagcttaacccattttcaagcaaaacagttctcagaaatgtcatgattgccggggtgaaggcaagagatgaattgcattattttatatattttttattaatatttgcacatgggattgctaaaacagcttcctgttactgagatgtcttcaatggaatacagtcattccaagaactataaacttaaagctactgtagaaacaaagggttttcttttttaaatgtttcttggtagattattcataatgtgagatggttcccaatatcatgtgattttttttttcctccccttccctttttttgttattttttcagactgtgcaatacttagagaacctatagcatcttctcattcccatgtggaacaggatgcccacatactgtctaattaataaattttccattttttttcaaacaagtatgaatctagttggttgatgccttttttttcatgacata

SEQ ID NO: 98984 - DNA, 1739 bp, Artificial Sequence
  derived and/or modified sequence
gcgccgcgccgcgcccgcgtgtcaatggcagccgcgcattctggaagaagttggttcttgtctcgaatacttttcctcccgtgccccgccccttgaatcagaggcggctgtctcgtgcggctagagcagggccagtagagttcggggcagctgtcaaaaacgagacggggaggcttttcttcccgggggtggaggagggaaggagggaggtgtccttttttccatctgttgcagtttccgaaccaaacgcaccctcgccagccccgggaagaaaggcccaagggagaaacctggggcgctcggctggtgcccccaccgccgggcgagggatgcgggcggtccgtgcgcggcaggcggaaaggatcgtgtttctggacccggccaccccccgcgtccgcaccgccgcccccgagggacgagtgacagcggccgccgcgctcggtccagtcttcccggctggaaggtattgttgcagcatctggcagtgagactgaggatgaggacagcatggacattcccttggacctttcttcatccgctggctcaggcaagagaaggagaaggggcaacctacccaaggagtctgtgcagattcttcgggattggctgtatgagcaccgttacaatgcctatccttcagagcaagaaaaagcgttgctgtcccagcaaacacacctgtctacgctacaggtctgtaactggttcatcaacgcccgccgcaggctcctccctgacatgctgagaaaggatggcaaagatccaaatcagttcacaatttcccgccgtggggccaagatttctgaaacgagctctgtggagtccgtgatgggcatcaaaaacttcatgccagctctagaggagaccccatttcattcctgtacagctgggccaaacccaaccctagggaggccactgtctcctaagccgtcatccccgggatcagttttggctcgtccatcagtgatctgccataccactgtgactgcattgaaagatgtccctttctctctctgccagtcggtcggtgtgggacaaaacacagatatacagcagatagcggccaaaaacttcacagacacctctctcatgtacccagaggacacttgtaaatctggaccaagtacgaatacacagagtggtcttttcaacactcctccccctactccaccggacctcaaccaggacttcagtggatttcagcttctagtggatgttgcactcaaacgggctgcagagatggagcttcaggcaaaacttacagcttaacccattttcaagcaaaacagttctcagaaatgtcatgattgccggggtgaaggcaagagatgaattgcattattttatatattttttattaatatttgcacatgggattgctaaaacagcttcctgttactgagatgtcttcaatggaatacagtcattccaagaactataaacttaaagctactgtagaaacaaagggttttcttttttaaatgtttcttggtagattattcataatgtgagatggttcccaatatcatgtgattttttttttcctccccttccctttttttgttattttttcagactgtgcaatacttagagaacctatagcatcttctcattcccatgtggaacaggatgcccacatactgtctaattaataaattttccattttttttcaaacaagtatgaatctagttggttgatgccttttttttcatgacataataaagtattttctttaaaaatt

SEQ ID NO: 98985 - DNA, 1585 bp, Artificial Sequence
  derived and/or modified sequence
ggcccaagggagaaacctggggcgctcggctggtgcccccaccgccgggcgagggatgcgggcggtccgtgcgcggcaggcggaaaggatcgtgtttctggacccggccaccccccgcgtccgcaccgccgcccccgagggacgagtgacagcggccgccgcgctcggtccagtcttcccggctggaaggagcgggcgcctgggatcagagcgtcctgtttagcaataacggctggagcacgtcctacaagttacgggagagtcggctgtgaaggagacgttcgcttatcccctgtgtccccgctcctggcccctccagacccccgccttgcctcgcgctgggaggggagatccagaatgaaaggcaagaaaggtattgttgcagcatctggcagtgagactgaggatgaggacagcatggacattcccttggacctttcttcatccgctggctcaggcaagagaaggagaaggggcaacctacccaaggagtctgtgcagattcttcgggattggctgtatgagcaccgttacaatgcctatccttcagagcaagaaaaagcgttgctgtcccagcaaacacacctgtctacgctacaggtctgtaactggttcatcaacgcccgccgcaggctcctccctgacatgctgagaaaggatggcaaagatccaaatcagttcacaatttcccgccgtggggccaagatttctgaaacgagctctgtggagtccgtgatgggcatcaaaaacttcatgccagctctagaggagaccccatttcattcctgtacagctgggccaaacccaaccctagggaggccactgtctcctaagccgtcatccccgggatcagttttggctcgtccatcagtgatctgccataccactgtgactgcattgaaagatgtccctttctctctctgccagtcggtcggtgtgggacaaaacacagatatacagcagatagcggccaaaaacttcacagacacctctctcatgtacccagaggacacttgtaaatctggaccaagtacgaatacacagagtggtcttttcaacactcctccccctactccaccggacctcaaccaggacttcagtggatttcagcttctagtggatgttgcactcaaacgggctgcagagatggagcttcaggcaaaacttacagcttaacccattttcaagcaaaacagttctcagaaatgtcatgattgccggggtgaaggcaagagatgaattgcattattttatatattttttattaatatttgcacatgggattgctaaaacagcttcctgttactgagatgtcttcaatggaatacagtcattccaagaactataaacttaaagctactgtagaaacaaagggttttcttttttaaatgtttcttggtagattattcataatgtgagatggttcccaatatcatgtgattttttttttcctccccttccctttttttgttattttttcagactgtgcaatacttagagaacctatagcatcttctcattcccatgtggaacaggatgcccacatactgtctaattaataaattttccattttttttcaaacaa

SEQ ID NO: 98986 - DNA, 2214 bp, Artificial Sequence
  derived and/or modified sequence
aaagtacttacagccaaaagagcttcctctggggcttgcatattcagtttcctttgtcatgtaatcatttaagactgaactctgcttattgatatgtagtattctattctaggttgagctcaaactggtagctgaaatttaggagacatttttaattcatttagtattaggcatcttttgaccttactaaagtaccagtagtagaaaaatatttttgtgtgatgaaactgaaaacatcagtggtcgtatttaataaaaggtgactagtactgcccatttaaagtaggtgtctaactttgaataaatgtggatagcaatgaataagaaatgaccatgcatggtgttagcagaaaattttaacatgtgttttacctttagaatactaactgggttcagcgtagtatgtaattttccttccttatatccatgaaaaaaaatgtacgagtgctccctttcatttcaaaccttcagtagaggaaggaggaagagtagcatttaaaatgtacattaggactggttaggttgcttttcctagttagcactgatcttagaaagaaggttggtaggcatattccaactgccacagcacccttcctgtttcaaatgtggcaggttattcattttgggtgcagtttgtctcctccaatgattagacgaaagagttttctgaccatcattcaaaaggaatgtgagaagttaatgaatcctagaggaaagcggctgagaaaaggcatctggcatttggttgagagcctcctatgtggtgctagtcaaactacttttacttggaccctgaattcaggacagaaaacactgctccttctcctcgctctcagttgttgggaaagcatggttacattgaatggtcagcgttaagtgagctttgcaatagttgctgtgcttataaagcaactgacaactggcccttgtcctttcctaggtattgttgcagcatctggcagtgagactgaggatgaggacagcatggacattcccttggacctttcttcatccgctggctcaggcaagagaaggagaaggggcaacctacccaaggagtctgtgcagattcttcgggattggctgtatgagcaccgttacaatgcctatccttcagagcaagaaaaagcgttgctgtcccagcaaacacacctgtctacgctacaggtctgtaactggttcatcaacgcccgccgcaggctcctccctgacatgctgagaaaggatggcaaagatccaaatcagttcacaatttcccgccgtggggccaagatttctgaaacgagctctgtggagtccgtgatgggcatcaaaaacttcatgccagctctagaggagaccccatttcattcctgtacagctgggccaaacccaaccctagggaggccactgtctcctaagccgtcatccccgggatcagttttggctcgtccatcagtgatctgccataccactgtgactgcattgaaagatgtccctttctctctctgccagtcggtcggtgtgggacaaaacacagatatacagcagatagcggccaaaaacttcacagacacctctctcatgtacccagaggacacttgtaaatctggaccaagtacgaatacacagagtggtcttttcaacactcctccccctactccaccggacctcaaccaggacttcagtggatttcagcttctagtggatgttgcactcaaacgggctgcagagatggagcttcaggcaaaacttacagcttaacccattttcaagcaaaacagttctcagaaatgtcatgattgccggggtgaaggcaagagatgaattgcattattttatatattttttattaatatttgcacatgggattgctaaaacagcttcctgttactgagatgtcttcaatggaatacagtcattccaagaactataaacttaaagctactgtagaaacaaagggttttcttttttaaatgtttcttggtagattattcataatgtgagatggttcccaatatcatgtgattttttttttcctccccttccctttttttgttattttttcagactgtgcaatacttagagaacctatagcatcttctcattcccatgtggaacaggatgcccacatactgtctaattaataaattttccattttttttcaaacaagtatgaatctagttggttgatgccttttttttcatgacataataaagtattttctttaaaaa

SEQ ID NO: 98987 - DNA, 820 bp, Artificial Sequence
  derived and/or modified sequence
cagcgagagtgaaattaaacttgaaactcggatcaactggtattgttgcagcatctggcagtgagactgaggatgaggacagcatggacattcccttggacctttcttcatccgctggctcaggcaagagaaggagaaggggcaacctacccaaggagtctgtgcagattcttcgggattggctgtatgagcaccgttacaatgcctatccttcagagcaagaaaaagcgttgctgtcccagcaaacacacctgtctacgctacaggtctgtaactggttcatcaacgcccgccgcaggctcctccctgacatgctgagaaaggatggcaaagatccaaatcagttcacaatttcccgccgtggggccaagatttctgaaacgagctctgtggagtccgtgatgggcatcaaaaacttcatgccagctctagaggagaccccatttcattcctgtacagctgggccaaacccaaccctagggaggccactgtctcctaagccgtcatccccgggatcagttttggctcgtccatcagtgatctgccataccactgtgactgcattgaaagatgtccctttctctctctgccagtcggtcggtgtgggacaaaacacagatatacagcagatagcggccaaaaacttcacagacacctctctcatgtacccagaggacacttgtaaatctggaccaagtacgaatacacagagtggtcttttcaacactcctccccctactccaccggacctcaaccaggacttcagtggatttcagcttctagtggatgttgcactcaaacgggctgcagagatggagct

SEQ ID NO: 98988 - DNA, 801 bp, Artificial Sequence
  derived and/or modified sequence
tggcttgtccccaggaccgcgctccccccgagccgttttaggtgtgtgttctcttctgtcccgagcagtcagcaaaccacagaagaaaaaaatcgtaaggtattgttgcagcatctggcagtgagactgaggatgaggacagcatggacattcccttggacctttcttcatccgctggctcaggcaagagaaggagaaggggcaacctacccaaggagtctgtgcagattcttcgggattggctgtatgagcaccgttacaatgcctatccttcagagcaagaaaaagcgttgctgtcccagcaaacacacctgtctacgctacaggtctgtaactggttcatcaacgcccgccgcaggctcctccctgacatgctgagaaaggatggcaaagatccaaatcagttcacaatttcccgccgtggggccaagatttctgaaacgagctctgtggagtccgtgatgggcatcaaaaacttcatgccagctctagaggagaccccatttcattcctgtacagctgggccaaacccaaccctagggaggccactgtctcctaagccgtcatccccgggatcagttttggctcgtccatcagtgatctgccataccactgtgactgcattgaaagatgtccctttctctctctgccagtcggtcggtgtgggacaaaacacagatatacagcagatagcggccaaaaacttcacagacacctctctcatgtacccagaggacacttgtaaatctggaccaagtacgaatacacagagtggtcttttcaacactcctccccctactc

SEQ ID NO: 98989 - DNA, 564 bp, Artificial Sequence
  derived and/or modified sequence
atgccattgtttgtaattcatttctgtttttaagattctagattgtctacaagcaaaagaatgtatttctttagtcattcggagtagcctgctgtagtttttgaaaggtattgttgcagcatctggcagtgagactgaggatgaggacagcatggacattcccttggacctttcttcatccgctggctcaggcaagagaaggagaaggggcaacctacccaaggagtctgtgcagattcttcgggattggctgtatgagcaccgttacaatgcctatccttcagagcaagaaaaagcgttgctgtcccagcaaacacacctgtctacgctacaggtctgtaactggttcatcaacgcccgccgcaggctcctccctgacatgctgagaaaggatggcaaagatccaaatcagttcacaatttcccgccgtggggccaagatttctgaaacgagctctgtggagtccgtgatgggcatcaaaaacttcatgccagctctagaggagaccccatttcattcctgtacagctgggccaaacccaaccctagggaggccactgtctcc

SEQ ID NO: 98990 - DNA, 990 bp, Artificial Sequence
  derived and/or modified sequence
acattctttcagacccggcccgctgcggggcgttcctggggggtagcctcaaggccagcggggttccttcggctgcgtttctgtgggaggccctgaaacgcgcggagcttccctctgcctccaggctttcccagcgagagtgaaattaaacttgaaactcggatcaactggcagtcgttgttggtattgttgcagcatctggcagtgagactgaggatgaggacagcatggacattcccttggacctttcttcatccgctggctcaggcaagagaaggagaaggggcaacctacccaaggagtctgtgcagattcttcgggattggctgtatgagcaccgttacaatgcctatccttcagagcaagaaaaagcgttgctgtcccagcaaacacacctgtctacgctacaggtctgtaactggttcatcaacgcccgccgcaggctcctccctgacatgctgagaaaggatggcaaagatccaaatcagttcacaatttcccgccgtggggccaagatttctgaaacgagctctgtggagtccgtgatgggcatcaaaaacttcatgccagctctagaggagaccccatttcattcctgtacagctgggccaaacccaaccctagggaggccactgtctcctaagccgtcatccccgggatcagttttggctcgtccatcagtgatctgccataccactgtgactgcattgaaagatgtccctttctctctctgccagtcggtcggtgtgggacaaaacacagatatacagcagatagcggccaaaaacttcacagacacctctctcatgtacccagaggacacttgtaaatctggaccaagtacgaatacacagagtggtcttttcaacactcctccccctactccaccggacctcaaccaggacttcagtggatttcagcttctagtggatgttgcactcaaacgggctgcagagatggagcttcaggcaaaacttacagcttaaccca

SEQ ID NO: 98991 - DNA, 819 bp, Artificial Sequence
  derived and/or modified sequence
atgaaaggtaagaaggggattgtcgccgcatctggctcagagaccgaagatgaggactcgatggatattcccctcgacctgagtagctcagcgggaagcggcaagaggcgcagaagaggcaatctgccaaaagagtcagttcaaatcttgcgggattggttatacgaacacagatataacgcatacccaagcgaacaagagaaggcactcctgtcacagcaaacccatctgtccacactgcaggtctgcaactggttcataaatgccagaagaaggctactgcctgacatgctacgcaaagacggtaaagaccctaatcagtttacaatcagcaggcgtggagcaaagattagtgagacaagctccgtagagtccgtgatgggcattaagaatttcatgccggcactcgaagagaccccgttccattcttgcaccgccggacctaacccaactttagggaggcctctgtctccaaagccttcatcacctggatctgtgctcgcacggccttctgtgatttgccacaccactgtaactgccctgaaggatgttcctttctccctgtgccagtctgttggagtagggcagaatacagatatccaacaaattgctgctaagaatttcactgacacatcactaatgtaccctgaggatacctgtaaatccggaccatctactaacactcagagcggtctgtttaacaccccaccgccaacacctcctgacctgaatcaggacttcagtggattccaattgctggtcgacgtggcactgaagcgagctgccgaaatggaattgcaagccaaactgactgcctag

SEQ ID NO: 98992 - DNA, 819 bp, Artificial Sequence
  derived and/or modified sequence
atgaagggtaagaaggggatagtggccgctagcggatccgaaactgaggacgaggacagtatggatatacctctggacctgtccagctccgccggttcaggtaaacggcgacgtcgtggcaacttacccaaggagagcgtgcagatcctgcgcgactggctctatgaacaccggtataacgcctatccaagtgaacaggagaaagcgctactcagccagcaaacacacctatcgactttgcaggtctgcaattggttcataaatgctaggagacgcctgctccccgacatgctgagaaaggacggaaaggaccctaatcaattcactataagtcgccgaggggctaaaatctctgagacgtccagcgtagagtcagtcatgggcataaagaacttcatgccagcgctcgaggagactccctttcactcctgtaccgccggtcccaaccctaccctgggcagacccctctctcctaaacccagtagccccggatcagtgctggctcggccaagcgttatttgtcacaccacagttacggcattaaaggatgttcctttttccctgtgtcagtctgtcggcgtaggccaaaacaccgacattcagcagatcgccgctaagaatttcacagacacgagtctaatgtatcctgaggacacttgcaagagtgggccttccactaacacccagagcggactgtttaacaccccccctccgactccacccgatcttaatcaggacttttctggattccagcttctggtcgatgtggcactcaaaagggctgctgagatggagcttcaggcgaagctcaccgcgtag

SEQ ID NO: 98993 - DNA, 819 bp, Artificial Sequence
  derived and/or modified sequence
atgaagggcaagaagggcatcgtggccgccagcggcagcgagaccgaggacgaggacagcatggacatccccctggacctgagcagcagcgccggcagcggcaagagaagaagaagaggcaacctgcccaaggagagcgtgcagatcctgagagactggctgtacgagcacagatacaacgcctaccccagcgagcaggagaaggccctgctgagccagcagacccacctgagcaccctgcaggtgtgcaactggttcatcaacgccagaagaagactgctgcccgacatgctgagaaaggacggcaaggaccccaaccagttcaccatcagcagaagaggcgccaagatcagcgagaccagcagcgtggagagcgtgatgggcatcaagaacttcatgcccgccctggaggagacccccttccacagctgcaccgccggccccaaccccaccctgggcagacccctgagccccaagcccagcagccccggcagcgtgctggccagacccagcgtgatctgccacaccaccgtgaccgccctgaaggacgtgcccttcagcctgtgccagagcgtgggcgtgggccagaacaccgacatccagcagatcgccgccaagaacttcaccgacaccagcctgatgtaccccgaggacacctgcaagagcggccccagcaccaacacccagagcggcctgttcaacacccccccccccaccccccccgacctgaaccaggacttcagcggcttccagctgctggtggacgtggccctgaagagagccgccgagatggagctgcaggccaagctgaccgcctag

SEQ ID NO: 98994 - protein, 527 aa, Artificial Sequence
  derived and/or modified sequence
MLMLFVFGVLLHEVSLSGQNEAPPNTHSIPGEPLYNYASIRLPEEHIPFFLHNNRHIATVCRKDSLCPYKKHLEKLKYCWGYEKSCKPEFRFGYPVCSYVDMGWTDTLESAEDIFWKQADFGYARERLEEMHVLCQPKETSDSSLVCSRYLQYCRATNLYLDLRNIKRNHDRFKEDFFQSGEIGGHCKLDIRTLTSEGQRKSPLQSWFAELQSYTQLNFRPIEDAKCDIVIEKPTYFMKLDAGVNMYHHFCDFINLYITQHVNNSFSTDVYIVMWDTSSYGYGDLFSDTWNAFTDYDVIHLKTYDSKRVCFKEAVFSLLPRMRYGLFYNTPLISGCQNTGLFRAFAQHVLHRLNITQEGPKDGKIRVTILARSTEYRKILNQNELVNALKTVSTFEVQIVDYKYRELGFLDQLRITHNTDIFIGMHGAGLTHLLFLPDWAAVFELYNCEDERCYLDLARLRGVHYITWRRQNKVFPQDKGHHPTLGEHPKFTNYSFDVEEFMYLVLQAADHVLQHPKWPFKKKHDEL

SEQ ID NO: 98995 - protein, 132 aa, Artificial Sequence
  derived and/or modified sequence
MLMLFVFGVLLHEVSLSGQNEAPPNTHSIPGEPLYNYASIRLPEEHIPFFLHNNRHIATVCRKDSLCPYKKHLEKLKYCWGYEKSCKPEFRFGYPVCSYVDMGWTDTLESAEDIFWKQADFGYARERLEEMH

SEQ ID NO: 98996 - protein, 124 aa, Artificial Sequence
  derived and/or modified sequence
MLMLFVFGVLLHEVSLSGQNEAPPNTHSIPGEPLYNYASIRLPEEHIPFFLHNNRHIATVCRKDSLCPYKKHLEKLKYCWGYEKSCKPEFRFGYPVCSYVDMGWTDTLESAEDIFWKQADFGYA

SEQ ID NO: 98997 - protein, 426 aa, Artificial Sequence
  derived and/or modified sequence
MGWTDTLESAEDIFWKQADFGYARERLEEMHVLCQPKETSDSSLVCSRYLQYCRATNLYLDLRNIKRNHDRFKEDFFQSGEIGGHCKLDIRTLTSEGQRKSPLQSWFAELQSYTQLNFRPIEDAKCDIVIEKPTYFMKLDAGVNMYHHFCDFINLYITQHVNNSFSTDVYIVMWDTSSYGYGDLFSDTWNAFTDYDVIHLKTYDSKRVCFKEAVFSLLPRMRYGLFYNTPLISGCQNTGLFRAFAQHVLHRLNITQEGPKDGKIRVTILARSTEYRKILNQNELVNALKTVSTFEVQIVDYKYRELGFLDQLRITHNTDIFIGMHGAGLTHLLFLPDWAAVFELYNCEDERCYLDLARLRGVHYITWRRQNKVFPQDKGHHPTLGEHPKFTNYSFDVEEFMYLVLQAADHVLQHPKWPFKKKHDEL

SEQ ID NO: 98998 - DNA, 1281 bp, Artificial Sequence
  derived and/or modified sequence
atgggctggaccgacaccctggagagcgccgaggacatcttctggaagcaggcggactttgggtatgcgagggaaagattggaagagatgcatgttctctgccaacctaaggaaacctccgacagctctctagtctgtagtagatacttacagtattgccgggccacaaatctttatttagatctgcgcaatataaagcggaatcatgatagattcaaagaggatttttttcagagcggagaaattggtggtcactgtaagctcgatatccgcacactgacaagcgaaggacagagaaaaagtccattacagtcttggtttgccgaacttcaaagttacacacaactaaacttccgcccgatcgaggatgctaaatgcgatatcgtgattgagaaacctacctatttcatgaaactggacgctggggttaatatgtaccatcacttttgtgacttcatcaatttatatattacccagcatgtgaataacagcttcagtacagacgtctacattgttatgtgggatacatcaagttacggatatggcgatctgttcagtgacacatggaacgcattcacagactatgatgtcattcaccttaagacctacgacagcaagcgcgtgtgttttaaggaggccgtgttttcactcctaccgaggatgagatacgggctcttttacaataccccactgatcagtggttgtcagaacaccggacttttccgagctttcgctcaacacgttttgcacagacttaacatcacgcaggaaggaccaaaagacgggaaaattagggtcacaatactcgcaaggtccactgagtatcgcaagatactcaaccagaacgaattggtcaatgctctcaagacggtctccacatttgaggtacaaattgtggactataagtaccgcgagttgggattcttggatcagctccggatcacacacaacaccgacatttttatcggaatgcacggggcaggactcacccatctcctcttcttaccagactgggcagctgtgttcgaactctataattgtgaggacgagcgatgctaccttgatttggcgaggctccgtggggtgcactacattacctggcgaagacagaacaaggtcttccctcaggacaagggacaccacccaacccttggtgaacatccgaaatttacgaactactcctttgacgtcgaggaattcatgtacctggtgcttcaggccgctgaccatgtcctgcagcaccctaagtggcctttcaagaagaagcacgatgaactttag

SEQ ID NO: 98999 - DNA, 756 bp, Artificial Sequence
  derived and/or modified sequence
atgagcagctacggctacggcgacctgttcagcgacacctggaacgcgttcaccgactatgatgtgatccacctaaagacctatgatagcaagcgggtgtgctttaaagaagcagttttttccctcctgccacggatgcgctacggcttattttacaacacgcctcttatcagtgggtgccagaataccggccttttccgcgcctttgcccagcatgtgcttcacaggctgaatatcacgcaagaaggcccgaaggatgggaagatccgggtgacaatcctggcacggtcaaccgagtaccgaaaaatcctgaaccagaatgagctagtcaatgccctgaaaacagtctccacatttgaggtgcagattgtcgattataaatatcgcgagctcggctttctcgaccagctccgcataacccacaacacggatatattcatcggtatgcacggggccggcctaacccacctcctgttcttgcctgattgggctgccgtgttcgagttgtataactgtgaggatgaaaggtgttacctggatttagcaaggctgcggggagtacactacataacctggagacgtcagaacaaagtcttccctcaggataagggccaccaccccacactcggcgagcaccccaagtttacaaattacagctttgatgtagaagagttcatgtatctcgtcctccaggccgccgaccatgtcctgcaacatccgaaatggcccttcaaaaagaagcacgacgagctctag

SEQ ID NO: 99000 - DNA, 1584 bp, Artificial Sequence
  derived and/or modified sequence
atgctgatgctgttcgtgtttggggtgctactgcacgaggtatctctatctggtcagaacgaggcccctccgaatacgcacagcatcccgggagagccattatataattacgcttcaattcgacttccggaggagcatatcccattctttctccataacaacaggcacatagcgactgtctgcagaaaagatagcctgtgcccgtacaaaaagcaccttgagaagctgaaatactgttgggggtacgagaaaagttgcaagcctgagttccgctttggatacccagtttgctcgtatgtagacatgggctggacagataccctggagtctgccgaggatattttttggaagcaggccgacttcggctatgccagagaaaggctggaagaaatgcacgttctgtgccagcccaaggaaacctctgattcatccttagtgtgcagccggtatcttcagtactgtagagctactaacctgtacctggatcttcgtaatatcaagagaaatcatgatcgattcaaagaagactttttccagagcggcgagattggaggtcactgtaaactagacattcggacgcttacgtcggaaggacaacgaaaatcaccattacagtcctggttcgcagagctccagtcctatacccagttaaatttccgtcctattgaggacgcaaaatgcgatattgtcatagagaagcccacgtacttcatgaagctcgatgccggtgttaacatgtatcatcacttctgtgacttcataaatctctatatcacccagcacgtgaataactccttctctaccgacgtatacatcgttatgtgggatacgtccagttacgggtacggagacttatttagcgacacctggaacgcctttacggactacgacgtgatccatctgaaaacctatgacagcaagagggtgtgcttcaaggaggcagtgttttcactcttgccaagaatgcggtacggtcttttctacaacaccccgctgatcagcggttgccagaatacaggcctctttcgagccttcgcccaacacgtgctccaccggcttaacatcacgcaggaagggccaaaggatggaaaaataagagtgactattttggcaaggtctaccgagtaccgcaagatcctcaaccagaacgaactagtgaacgcactgaagacagtgtcgacgttcgaggtgcagatagtggattataagtaccgggaattaggcttcctcgaccaacttcgtatcactcacaataccgacatttttatcggcatgcacggggctggcctgacacatctcttgttcctcccagattgggcagccgtgttcgaattatataattgcgaggatgaaaggtgttatcttgacctggcgaggctgcggggagtgcattacataacctggagacgccagaacaaggtgttcccacaggacaaggggcatcatccgaccctgggggaacacccaaagttcaccaactactcatttgacgttgaggagtttatgtatctggtgctccaggcagctgatcacgtcctgcaacaccctaaatggcccttcaaaaaaaaacacgacgagctttag

SEQ ID NO: 99001 - DNA, 1281 bp, Artificial Sequence
  derived and/or modified sequence
atgggttggacagatacactggagagcgccgaggatatcttttggaaacaggcagacttcgggtacgccagggaacgacttgaagaaatgcacgtgctgtgccagccaaaggaaacaagtgacagctcccttgtgtgctcgagatatctgcagtactgtagagccaccaacctgtacttggatctaagaaatatcaaaagaaatcatgacaggttcaaggaagacttttttcagtccggagaaattggcggacactgtaaactggacattaggaccctgacctctgagggccaacgtaagagccctctccaatcatggtttgctgagctgcagagctacacccagttaaatttccggcctattgaagacgccaaatgcgatatcgtcatcgagaagccgacttactttatgaaactggatgctggcgtgaatatgtatcatcacttctgcgatttcattaacctctacataacacagcacgtaaataattccttctcaacggacgtgtacattgtgatgtgggacaccagttcctacggatatggcgacctattctccgacacttggaatgccttcacggactacgacgttatacacctcaaaacatacgattcaaagagggtctgttttaaggaagccgtcttctcattgctgcctcgaatgcgctacggcctgttctacaatactcctctgatctctgggtgccagaacacaggactgtttcgggcattcgcacagcacgtcttgcataggctaaatattacacaggagggacccaaggatggcaagatacgcgtgaccattctggcgagatcgactgagtacagaaaaattcttaatcaaaacgagctggtgaatgccttaaagacagtgtctacgtttgaggtgcagatagtcgactacaaataccgggagctgggctttctcgatcagctcaggatcacacataataccgacatcttcatcggcatgcacggtgccggactgactcacctgctatttctccctgattgggcagctgtcttcgaattgtataactgcgaggacgagagatgctacttggatcttgctcggctgcgtggcgtccattacataacatggagaagacagaacaaggtgtttccccaagataaagggcaccatcctactttgggcgaacaccctaagttcaccaactatagtttcgacgtggaagagtttatgtacttggtgctgcaagctgcggaccacgtgctgcagcatcccaagtggccgtttaaaaaaaagcatgatgagctctag

SEQ ID NO: 99002 - DNA, 756 bp, Artificial Sequence
  derived and/or modified sequence
atgtcgagttacggttacggagatctcttcagcgacacctggaacgcgtttactgactacgacgttattcacctgaagacgtatgacagtaaaagagtttgttttaaagaggccgttttctccttactcccaagaatgcgctacgggctgttctacaacacgccattgatctcaggctgccagaacaccggtctgtttcgcgctttcgcacaacatgtgctccatcggctcaacatcacccaggagggcccaaaagacggcaagattagggttacgattctggccaggtcaaccgagtaccggaaaatcctgaaccagaatgagcttgtaaatgcattaaagaccgtcagcaccttcgaggtccaaatcgtcgactacaaatacagggagctgggatttctggatcagctccgcatcactcataataccgacatattcattggtatgcatggcgcaggtctcacccatctgctcttcctgcccgattgggctgccgtgtttgaactgtataactgtgaagatgagcggtgctatctggacctggctcgattacggggagtccactatattacatggcggaggcagaataaggtattcccgcaggataaaggacaccatcctaccctgggagagcaccccaagttcactaactattccttcgatgtggaggagtttatgtatctcgtactccaggccgctgatcatgtgttgcagcacccaaaatggcccttcaaaaagaagcacgacgaactatag

SEQ ID NO: 99003 - DNA, 1584 bp, Artificial Sequence
  derived and/or modified sequence
atgctaatgctcttcgtctttggtgtgctgctgcacgaagtgagcctctctggccagaacgaggccccacccaacacccatagcatccccggcgagcccttgtacaattatgcctcaattcgtctccctgaagagcacatccccttttttctccacaataatcgccacattgccacagtctgtcggaaagattcactgtgtccatacaagaaacacttggagaagctgaagtactgttggggatacgaaaaaagttgcaagcccgagtttcggttcggctatccggtttgcagctatgtggacatgggctggactgacacactggaatccgcggaggatatcttttggaagcaagctgacttcgggtacgctagagagcgcctagaagagatgcacgttctctgccaacccaaagaaacttccgacagctctctggtgtgctcccgatacctgcagtattgcagggctaccaacctgtatctggaccttcggaacatcaaaaggaaccacgacagattcaaggaagactttttccagagtggagagatcggaggccactgcaaacttgacattaggactcttacctcagagggacaacgaaaatcccctctacagtcatggttcgctgagctccaatcatatacacaactgaacttccgcccaattgaagatgctaaatgtgacatagtgatcgagaaacccacttactttatgaaattagacgccggggtgaatatgtaccatcatttctgtgacttcataaatctgtacataacgcagcacgtcaataacagcttcagcaccgacgtgtacatagtgatgtgggatacaagcagttacggctatggcgatctgttcagtgacacctggaatgcatttaccgattatgatgtcattcacctgaaaacgtacgattctaaacgagtttgtttcaaagaggctgtgttcagtctcctccctagaatgcgctatggactcttctacaacacccctctcatatctgggtgccagaatacaggactgtttcgagcatttgcacagcatgtgttgcaccgtttaaacatcacacaggaagggcccaaggatggaaaaattagagttacaattctcgctaggtctaccgaatatcggaaaatattgaatcagaatgaactggtcaatgctctaaagacagtttccacttttgaggtgcaaatcgttgactataagtaccgagaactgggctttctagaccagcttaggattacacacaacacggacattttcatcggcatgcacggggccggccttacccatcttctgtttttacctgattgggctgctgtctttgagctgtataattgcgaagacgagcgatgttacctggacctcgcaagactgaggggcgtacactacatcacttggcggcgtcagaataaagtctttccacaggataaaggtcaccatccaacgctcggggagcatcctaagtttactaactactcgtttgacgtagaggagtttatgtaccttgtattacaggcagctgatcatgtgctccaacaccccaagtggccatttaaaaagaaacacgacgaattgtag

SEQ ID NO: 99004 - DNA, 1281 bp, Artificial Sequence
  derived and/or modified sequence
atgggttggacagacaccttagaaagtgctgaggacatcttctggaagcaagctgactttggctacgcgcgggagcgactggaggagatgcacgtactatgccaacccaaagaaacatcagacagttcactggtgtgtagccggtaccttcagtactgtcgtgcgaccaacttatatcttgatttgaggaacattaaaaggaaccacgatcgattcaaagaggatttttttcagtcaggcgaaatcggcggccactgtaaactcgatatccggaccctgactagtgaaggccagaggaagagccctctccaaagctggttcgctgagttgcagagctatacccaactgaacttcaggccaatcgaagacgctaaatgcgacattgtgatagagaaacctacctacttcatgaagctagatgcaggggtgaacatgtatcaccacttttgtgactttattaatttatacataactcaacacgtcaacaactctttttctacggacgtctacatcgttatgtgggacactagcagctacgggtatggtgatttgtttagtgacacttggaacgccttcacggactatgacgttattcatctcaagacctacgactccaagcgggtctgtttcaaggaagcagttttttcgttattaccacggatgagatatgggctcttctacaatactccccttatctccggctgccagaataccggtctgttccgtgctttcgcccaacatgtcctgcacaggctgaacataacacaagaaggcccaaaggatggcaaaataagggtgaccattctggcaaggagcacagaatacaggaaaatcctcaaccagaacgaattggtgaacgctctgaaaaccgtgtctacctttgaggtgcagatcgttgattataaataccgagaattaggcttccttgaccagctgcgcataacacataacacagacatcttcatcggcatgcatggtgccgggcttacgcacctgctctttctgcccgactgggcagccgtattcgagctttataattgtgaggacgaacggtgttacctagacctggccaggctccggggggttcattacataacatggagaagacagaataaggtattcccacaagataaggggcatcaccctactctgggcgagcatccaaagtttacaaattacagcttcgatgtcgaggagttcatgtacttggtgctgcaagcagcagatcacgtactgcagcatcccaaatggcccttcaagaagaagcatgacgaactttag

SEQ ID NO: 99005 - DNA, 756 bp, Artificial Sequence
  derived and/or modified sequence
atgtcctcctatggatacggagacctcttctccgacacctggaacgcatttactgactatgatgttatccatctgaagacttacgatagcaaaagagtatgtttcaaagaggcagtgttctccctactccccaggatgcgctatggtctgttttacaacacccccctcatttctggatgtcagaatacaggcctcttccgagcttttgcccaacatgtcttacacaggcttaacataacccaggagggacctaaggacggaaagatccgggtaactattctggcgcgctctactgaataccgtaagatcttgaaccaaaacgaactggtcaatgcactgaagactgtgagcacgttcgaggttcaaatcgtagattataagtacagagaactcggtttccttgaccagcttagaatcactcataacaccgacatatttatcgggatgcacggagccggcctcacacatctgctttttctcccagattgggccgccgtctttgaactgtacaactgcgaggatgaacggtgctatttggacctggctcgcctaaggggagtccattacattacctggcgccgacagaacaaggtattccctcaggacaaaggacatcaccctactttgggagaacatccgaaatttaccaactattctttcgacgtcgaagagttcatgtatttagtcttgcaggccgctgaccacgtactccagcacccgaaatggccttttaaaaaaaaacatgacgagctgtag

SEQ ID NO: 99006 - DNA, 1584 bp, Artificial Sequence
  derived and/or modified sequence
atgttaatgctgttcgttttcggcgttttactgcacgaggtctcacttagcggccaaaacgaagcacctccaaatacacacagtatcccgggcgaaccactctacaattacgccagcattagattgccagaagaacacatcccgttctttctccacaataaccgccacatcgcaactgtctgtcgcaaagactctctgtgtccctataaaaagcatctggagaaacttaaatactgttggggttatgaaaagtcctgcaaacccgagttcagattcggttaccctgtatgttcctatgttgatatgggatggaccgatacacttgaatcagctgaggacatattctggaagcaagccgatttcgggtatgcaagagagaggctggaagagatgcacgttctctgtcaacctaaagagaccagcgacagctccctggtttgcagccgctacctgcagtactgtagagccacaaatctgtatctggatctgcgtaacattaaaaggaaccacgatagatttaaagaagactttttccaatccggcgaaataggaggccattgtaaactggacattaggaccctaacctccgagggacaacgtaagagccctctgcagagctggtttgcagaacttcagtcatatacccaactcaacttccggccaatagaggatgccaagtgcgatatcgtcattgaaaagcccacttacttcatgaaactggatgccggcgtcaacatgtaccaccacttctgcgacttcattaacctctacatcacccagcatgtgaataactcattttctaccgacgtttacatcgttatgtgggacacctccagctacggttacggagatctgttctcggacacttggaacgcatttactgactatgatgtcatccacttgaaaacctatgactcaaaaagagtgtgtttcaaagaggcagtgttctccttgttaccccggatgcgatatgggctattttataacacgccactgatctccggctgccaaaacaccggccttttcagagcctttgcacaacatgtcttacatcgcctcaatattacacaggagggtccaaaggatggaaagattcgcgtaacaatcctcgcacggtcaactgaatacaggaagatcttgaatcagaacgagctcgtgaacgccctgaagacagtatccacctttgaagtacagattgtagactacaagtaccgcgagctaggatttcttgaccaattgcgtattacccacaatacagacatctttattggaatgcatggcgcaggacttacacatcttctgtttctaccggactgggccgcagtttttgaactctataactgcgaagatgaaagatgttacctggatctggcaaggttgaggggcgtgcactacattacatggcgacggcaaaacaaagtttttccgcaagacaaaggacaccatcctacactgggagagcacccaaagtttactaattatagcttcgacgtcgaggagttcatgtatctcgtactccaggcagccgaccacgtcctccaacaccctaaatggccatttaagaagaaacacgatgaactctag

SEQ ID NO: 99007 - DNA, 1281 bp, Artificial Sequence
  derived and/or modified sequence
atgggatggaccgacacacttgaatctgcggaagacatattttggaaacaggcagattttggctatgcaagggaacgtctcgaagaaatgcatgtactctgtcagccaaaagagacctcagacagcagcttagtctgtagtcggtaccttcagtactgtcgagcaacaaacctctatcttgatctgagaaacattaaacgaaatcacgatcgctttaaagaggactttttccagagcggcgaaatcggaggccactgtaaactcgacattaggacattgacgtcagaaggccagaggaagtctcctttgcagagctggtttgctgaattgcaatcttatactcagttgaacttcagacctatcgaagacgccaaatgcgatatagtcatcgagaagccaacatactttatgaaactggatgctggcgtaaacatgtaccatcatttctgcgattttattaacctctacatcacccagcacgtgaataactcatttagtacagatgtttacattgtcatgtgggacactagctcgtacggatacggagacctgttcagcgatacatggaatgccttcaccgattacgacgttattcatctgaaaacctatgatagtaaaagagtttgctttaaggaagctgtgttctccctcttgcctaggatgcggtacggtctcttttataatacccctctgataagcggctgtcaaaatactggactctttcgggccttcgcccagcatgtgttgcatcgactcaacattacgcaggaaggaccaaaagacggcaagatacgcgtgaccatactggcccgttctactgaatatcgcaaaatcctcaatcagaatgagctggtgaacgccctgaaaaccgtatcaacatttgaagtgcagattgtcgactacaagtaccgtgaactgggctttctcgaccagctgcggatcacccacaatacagacatcttcattggaatgcacggagcaggactcacccatctcctctttctgcctgactgggccgccgtgtttgaactctataattgcgaggacgagcgctgctacctcgacctggccaggctccgcggagtgcactatattacgtggaggaggcaaaataaagtcttccctcaagacaaaggacaccatcctaccttaggcgaacacccaaaatttacaaactactcttttgatgttgaagaattcatgtatttagtactgcaggccgccgaccacgttttacaacaccctaaatggccctttaaaaagaaacacgatgagctgtag

SEQ ID NO: 99008 - DNA, 756 bp, Artificial Sequence
  derived and/or modified sequence
atgtcttcttacggctacggagatcttttcagtgatacctggaatgcatttacagactatgatgtaatacacttgaaaacttacgattccaagcgggtctgctttaaagaagccgtgttctcattgctgccccgaatgcgctatgggctcttttataatacaccccttatttccggctgccaaaatactggattgttccgagcctttgcacagcacgtccttcaccgacttaacataacacaggaaggtccaaaggatggaaaaattagggttacaattttggctcgaagtaccgaatatcgtaaaatactcaatcaaaatgaactggtaaatgcactaaagaccgtgtccacatttgaggtgcagatcgtcgattataaatatagagagcttgggttcctggatcagctacgaatcacacacaatacagatatctttatcgggatgcacggcgcaggtctcacacacctgttgtttctgcccgattgggccgcagtctttgaattgtacaactgcgaagacgaaagatgttatctcgaccttgcccggctgcgtggagtacactacattacatggagaaggcagaacaaggtatttccacaggacaaagggcaccatccgacccttggcgagcatcccaaattcactaactattcgttcgatgtagaggaattcatgtacctggtcctgcaagccgccgaccatgtattacaacatcccaaatggccattcaagaaaaaacatgacgaattatag

SEQ ID NO: 99009 - DNA, 1726 bp, Artificial Sequence
  derived and/or modified sequence
agaaacacctagagaagctaaagtactgctggggttatgagaaatcctgcaaaccagagttcaggtttggttacccagtttgcagctatgtcgacatgggatggacggacactcttgagtcagctgaggacatattttggaaacaagctgactttggatatgccagagagaggctggaggagatgcatgtgctctgtcagcctaaggaaacgagtgactcaagtctggtgtgttcccgttatcttcagtactgcagagcaaccaatctctatcttgatttaagaaacatcaagagaaatcatgacagatttaaggaggactttttccagagtggtgaaattggagggcactgtaaacttgacatccgtacattgacgtctgaaggtcagcgcaaaagccctctgcagtcatggtttgctgagctacaaagctatactcagctcaacttcagacctatagaagatgctaaatgtgacattgtcattgaaaaaccaacatatttcatgaaattagatgcaggtgttaacatgtatcaccacttctgtgatttcatcaatctttatattactcagcacgttaataactcattcagtactgacgtgtacatcgtgatgtgggacaccagttcttacggatatggtgacctattctccgacacatggaatgcatttactgattatgacgttatacatttgaaaacttatgattccaaaagggtatgttttaaagaagctgttttttcattactcccccgcatgaggtatgggctgttctataatactcctctgatatctggctgtcaaaatactggactattcagggcatttgcccagcatgtactacacagactaaacatcacacaagaaggacctaaggatggaaaaattcgagtcaccattcttgcacggagcacagaataccggaaaatccttaaccaaaatgagcttgtaaatgcactgaaaacagtatctacatttgaagtccagattgttgattacaagtatagagaacttgggtttttagatcaactaaggatcacacacaacacggacatatttattggaatgcatggagctggtctgacccatttacttttccttccagactgggctgctgtatttgaactgtacaactgtgaagatgaacgctgttacttagacttggccaggctgagaggcgttcactacatcacttggcgacggcagaacaaagtctttcctcaggataagggccaccatccaaccctgggggagcacccgaagttcaccaactactctttcgatgtagaagaatttatgtatcttgtccttcaggctgcagaccacgtattgcaacacccaaagtggccatttaagaagaaacatgatgagctataaatatgctgagtctgtttgcaaaaagagagtgtttaaacactccaacacccagacttagaattaaatcagtaaagcaatctgttatttcctatccccgaattaccttttctatgccaaaacataccttcaggatattgttatgtgttgtatagatgttaagtgtttcatgtggtttttgtgtcattgctatttatcaatagcaataattttgcactgaaaactttttatagttcaaaaattaagcatggactccccagtatactttaactttctttctttctttttttttttttggagacagagtctcactgtcacccaggctggagtgcagtggcatgatctcagtttat

SEQ ID NO: 99010 - DNA, 2243 bp, Artificial Sequence
  derived and/or modified sequence
atgacgactccctcctctggaacagccgccgtctcctccgcctcctcctcggtagttcacggctgccccggctccaggcctgtggaaatcgaatcaagggtttctggagtggagtgattccagctgctttgagctgaaggaaaagtagcctggccagtaaagcgtccgtgtgctggaggagtgcagccacccatcccggcgggccttgcaggacgaccgacaccaggaaggctttgtgccaggcccagcagccacccccagccgccttatgcaagtgggtacatgccctcgccagacgccagctttctgatctgcgtctttagattttttccatcgcctaagcgttacttctccactgatcggttttagagacctgaaacatcacagaagcttctgagtggttctgaagattcaagaggtttgcaggttgctatgttaatgttgtttgtctttggagtcttacttcatgaagtctcactgagtggtcagaatgaagctcctcctaatactcacagcattccaggcgaacctctgtataactatgccagcatccgcttgccagaggagcacattcccttctttttgcacaacaataggcatattgccactgtctgtaggaaagactctctttgtccatataagaaacacctagagaagctaaagtactgctggggttatgagaaatcctgcaaaccagagttcaggtttggttacccagtttgcagctatgtcgacatgggatggacggacactcttgagtcagctgaggacatattttggaaacaagctgactttggatatgccagagagaggctggaggagatgcatgtgctctgtcagcctaaggaaacgagtgactcaagtctggtgtgttcccgttatcttcagtactgcagagcaaccaatctctatcttgatttaagaaacatcaagagaaatcatgacagatttaaggaggactttttccagagtggtgaaattggagggcactgtaaacttgacatccgtacattgacgtctgaaggtcagcgcaaaagccctctgcagtcatgagttcttacggatatggtgacctattctccgacacatggaatgcatttactgattatgacgttatacatttgaaaacttatgattccaaaagggtatgttttaaagaagctgttttttcattactcccccgcatgaggtatgggctgttctataatactcctctgatatctggctgtcaaaatactggactattcagggcatttgcccagcatgtactacacagactaaacatcacacaagaaggacctaaggatggaaaaattcgagtcaccattcttgcacggagcacagaataccggaaaatccttaaccaaaatgagcttgtaaatgcactgaaaacagtatctacatttgaagtccagattgttgattacaagtatagagaacttgggtttttagatcaactaaggatcacacacaacacggacatatttattggaatgcatggagctggtctgacccatttacttttccttccagactgggctgctgtatttgaactgtacaactgtgaagatgaacgctgttacttagacttggccaggctgagaggcgttcactacatcacttggcgacggcagaacaaagtctttcctcaggataagggccaccatccaaccctgggggagcacccgaagttcaccaactactctttcgatgtagaagaatttatgtatcttgtccttcaggctgcagaccacgtattgcaacacccaaagtggccatttaagaagaaacatgatgagctataaatatgctgagtctgtttgcaaaaagagagtgtttaaacactccaacacccagacttagaattaaatcagtaaagcaatctgttatttcctatccccgaattaccttttctatgccaaaacataccttcaggatattgttatgtgttgtatagatgttaagtgtttcatgtggtttttgtgtcattgctatttatcaatagcaataattttgcactgaaaactttttatagttcaaaaattaagcatggactccccagtatactttaactttctttctttctttttttttttttggagacagagtctcactgtcacccaggctggagtgcagtggcatgatctcagtttatgcaacttctgcctccccaggttcaagcgattcttttgcctcagccacctgactagctgggattgcagcctgcaccaccacacctggct

SEQ ID NO: 99011 - DNA, 1584 bp, Artificial Sequence
  derived and/or modified sequence
atgctgatgctgttcgtgttcggcgtgctgctgcacgaggtgagcctgagcggccagaacgaggccccccccaacacccacagcatccccggcgagcccctgtacaactacgccagcatcagactgcccgaggagcacatccccttcttcctgcacaacaacagacacatcgccaccgtgtgcagaaaggacagcctgtgcccctacaagaagcacctggagaagctgaagtactgctggggctacgagaagagctgcaagcccgagttcagattcggctaccccgtgtgcagctacgtggacatgggctggaccgacaccctggagagcgccgaggacatcttctggaagcaggccgacttcggctacgccagagagagactggaggagatgcacgtgctgtgccagcccaaggagaccagcgacagcagcctggtgtgcagcagatacctgcagtactgcagagccaccaacctgtacctggacctgagaaacatcaagagaaaccacgacagattcaaggaggacttcttccagagcggcgagatcggcggccactgcaagctggacatcagaaccctgaccagcgagggccagagaaagagccccctgcagagctggttcgccgagctgcagagctacacccagctgaacttcagacccatcgaggacgccaagtgcgacatcgtgatcgagaagcccacctacttcatgaagctggacgccggcgtgaacatgtaccaccacttctgcgacttcatcaacctgtacatcacccagcacgtgaacaacagcttcagcaccgacgtgtacatcgtgatgtgggacaccagcagctacggctacggcgacctgttcagcgacacctggaacgccttcaccgactacgacgtgatccacctgaagacctacgacagcaagagagtgtgcttcaaggaggccgtgttcagcctgctgcccagaatgagatacggcctgttctacaacacccccctgatcagcggctgccagaacaccggcctgttcagagccttcgcccagcacgtgctgcacagactgaacatcacccaggagggccccaaggacggcaagatcagagtgaccatcctggccagaagcaccgagtacagaaagatcctgaaccagaacgagctggtgaacgccctgaagaccgtgagcaccttcgaggtgcagatcgtggactacaagtacagagagctgggcttcctggaccagctgagaatcacccacaacaccgacatcttcatcggcatgcacggcgccggcctgacccacctgctgttcctgcccgactgggccgccgtgttcgagctgtacaactgcgaggacgagagatgctacctggacctggccagactgagaggcgtgcactacatcacctggagaagacagaacaaggtgttcccccaggacaagggccaccaccccaccctgggcgagcaccccaagttcaccaactacagcttcgacgtggaggagttcatgtacctggtgctgcaggccgccgaccacgtgctgcagcaccccaagtggcccttcaagaagaagcacgacgagctgtag

SEQ ID NO: 99012 - DNA, 1281 bp, Artificial Sequence
  derived and/or modified sequence
atgggctggaccgacaccctggagagcgccgaggacatcttctggaagcaggccgacttcggctacgccagagagagactggaggagatgcacgtgctgtgccagcccaaggagaccagcgacagcagcctggtgtgcagcagatacctgcagtactgcagagccaccaacctgtacctggacctgagaaacatcaagagaaaccacgacagattcaaggaggacttcttccagagcggcgagatcggcggccactgcaagctggacatcagaaccctgaccagcgagggccagagaaagagccccctgcagagctggttcgccgagctgcagagctacacccagctgaacttcagacccatcgaggacgccaagtgcgacatcgtgatcgagaagcccacctacttcatgaagctggacgccggcgtgaacatgtaccaccacttctgcgacttcatcaacctgtacatcacccagcacgtgaacaacagcttcagcaccgacgtgtacatcgtgatgtgggacaccagcagctacggctacggcgacctgttcagcgacacctggaacgccttcaccgactacgacgtgatccacctgaagacctacgacagcaagagagtgtgcttcaaggaggccgtgttcagcctgctgcccagaatgagatacggcctgttctacaacacccccctgatcagcggctgccagaacaccggcctgttcagagccttcgcccagcacgtgctgcacagactgaacatcacccaggagggccccaaggacggcaagatcagagtgaccatcctggccagaagcaccgagtacagaaagatcctgaaccagaacgagctggtgaacgccctgaagaccgtgagcaccttcgaggtgcagatcgtggactacaagtacagagagctgggcttcctggaccagctgagaatcacccacaacaccgacatcttcatcggcatgcacggcgccggcctgacccacctgctgttcctgcccgactgggccgccgtgttcgagctgtacaactgcgaggacgagagatgctacctggacctggccagactgagaggcgtgcactacatcacctggagaagacagaacaaggtgttcccccaggacaagggccaccaccccaccctgggcgagcaccccaagttcaccaactacagcttcgacgtggaggagttcatgtacctggtgctgcaggccgccgaccacgtgctgcagcaccccaagtggcccttcaagaagaagcacgacgagctgtag

SEQ ID NO: 99013 - DNA, 756 bp, Artificial Sequence
  derived and/or modified sequence
atgagcagctacggctacggcgacctgttcagcgacacctggaacgccttcaccgactacgacgtgatccacctgaagacctacgacagcaagagagtgtgcttcaaggaggccgtgttcagcctgctgcccagaatgagatacggcctgttctacaacacccccctgatcagcggctgccagaacaccggcctgttcagagccttcgcccagcacgtgctgcacagactgaacatcacccaggagggccccaaggacggcaagatcagagtgaccatcctggccagaagcaccgagtacagaaagatcctgaaccagaacgagctggtgaacgccctgaagaccgtgagcaccttcgaggtgcagatcgtggactacaagtacagagagctgggcttcctggaccagctgagaatcacccacaacaccgacatcttcatcggcatgcacggcgccggcctgacccacctgctgttcctgcccgactgggccgccgtgttcgagctgtacaactgcgaggacgagagatgctacctggacctggccagactgagaggcgtgcactacatcacctggagaagacagaacaaggtgttcccccaggacaagggccaccaccccaccctgggcgagcaccccaagttcaccaactacagcttcgacgtggaggagttcatgtacctggtgctgcaggccgccgaccacgtgctgcagcaccccaagtggcccttcaagaagaagcacgacgagctgtag

SEQ ID NO: 99014 - DNA, 1584 bp, Artificial Sequence
  derived and/or modified sequence
atgcttatgctgtttgtgtttggtgtcctgttacatgaagttagcctatcaggtcagaatgaggctccgccaaacacccacagcattccaggcgagcccctctacaactatgcaagcatccggttgccagaagagcatattcccttcttccttcataataatcggcacatcgcaacggtttgccggaaagattccctctgtccatataagaaacacttggagaagctgaagtactgctggggctatgaaaagtcttgcaaaccagagttcagattcggttacccagtgtgtagctacgtcgacatgggatggacagataccctagaatctgctgaggacatcttttggaagcaagccgactttggatacgctagggaacgattagaagagatgcacgtcctatgtcagccaaaggagacctctgattcttccctggtttgctctcgctacctacaatactgccgcgcaaccaacctgtaccttgacctgagaaatattaagagaaaccacgacagattcaaagaagacttttttcagtccggagagatcgggggccactgcaaactggacatcagaacactgactagtgaggggcagcggaagtcacctctgcagtcatggtttgccgaactgcagtcctacacgcaacttaacttcaggccaatcgaagacgctaagtgtgacatagtaatagaaaagcccacctactttatgaagctcgacgcgggggtgaatatgtatcaccacttctgcgactttatcaacttgtacatcacgcaacacgtcaacaactctttctccaccgacgtttacatagtgatgtgggatacaagctcatatggctatggagatctcttttcagacacatggaacgcgtttacagattatgatgtcatccacctgaaaacctacgactctaagcgcgtgtgcttcaaggaggctgttttcagcctactgccccgaatgaggtacggtttgttttacaatacccccctgataagtggttgccaaaataccggcctctttcgagccttcgctcaacacgtgctccacagattgaatattacacaggagggccctaaggacggcaaaattcgtgtgaccattctcgctcgctcaaccgaataccgcaagatcctgaatcaaaacgaacttgtaaatgccctgaaaactgtttctacattcgaggtgcaaatcgtggattataaatatcgggagctaggtttcctggaccagttgagaatcacacacaacaccgacatttttattgggatgcatggagctggcctcacccatcttctcttcctgcctgattgggccgctgtgtttgaactgtacaactgcgaagatgaacgttgttatttggatttggcccgcctgaggggagtgcattacattacctggaggcggcagaacaaggtctttccccaggataaaggtcaccaccccactttgggggagcaccccaagttcaccaattatagcttcgatgttgaggagttcatgtatctcgtgcttcaggcagccgaccacgtccttcagcatccaaagtggcctttcaaaaaaaagcacgatgaattatag

SEQ ID NO: 99015 - DNA, 1281 bp, Artificial Sequence
  derived and/or modified sequence
atggggtggacggacaccctcgagtctgccgaagacattttctggaaacaggccgattttggttacgcccgggagcgccttgaggaaatgcatgtgttgtgtcagcccaaggaaacctccgactccagtctcgtctgctcgcggtatctccagtattgcagggccaccaacttgtatctagacttgcgcaacataaaacgaaatcacgatagattcaaggaagatttttttcagtctggcgaaatcgggggacactgcaagttggacattcgcaccctgacgagtgaggggcagcggaagtcccccttacagtcatggtttgcagagctgcagagttatacccaactcaatttccgaccaatcgaggacgccaagtgcgatatcgtcatcgaaaagcccacttactttatgaagctggacgccggcgtgaacatgtatcatcatttctgtgacttcataaatttatatattacacagcacgtaaacaatagcttcagtacagacgtttacatcgtgatgtgggacacctctagctatggttatggggacctgttctcggatacctggaacgccttcaccgattacgatgtaatacaccttaaaacatatgattctaagcgcgtttgttttaaagaagctgttttttcccttcttcccaggatgcgttatggcctattctacaatacgcccttgatatcgggatgtcaaaataccggactattcagagcctttgctcagcacgttctccaccgactgaacattacacaggaaggaccaaaagatggtaaaatcagggtcaccatcctggccagatctacagagtatagaaagatccttaatcagaacgagctggttaacgcacttaaaaccgtgtctaccttcgaagtgcagattgtggactataaatatcgcgagctggggttcctcgatcagctcagaattacacacaacaccgacattttcatcggaatgcatggtgcaggactcacacacctgctgtttcttcctgactgggctgcagttttcgaattatacaactgtgaagatgagcgctgctacctggacttagccagacttcgcggagtgcattacattacatggcggcggcagaacaaggtgttcccccaagacaagggccaccatccaactctgggagagcacccgaaatttaccaattactcattcgacgtagaggaattcatgtacctggtactacaagccgccgatcacgtgctacagcacccaaaatggcccttcaagaaaaagcacgatgaactctag

SEQ ID NO: 99016 - DNA, 756 bp, Artificial Sequence
  derived and/or modified sequence
atgagtagttatgggtacggggacctgttctctgacacttggaacgcattcacggattacgatgtgattcatttgaagacatacgattcgaagagggtgtgttttaaagaagcagtttttagcctgctaccacgaatgcgttacggactgttctacaatacaccactgatcagcgggtgtcagaataccggtctgttcagagccttcgcccaacatgtcctacatcgcctgaatatcacccaggagggacccaaagacggaaagatccgagttacgattctcgcccggagcacagaataccgcaaaatcctcaaccagaacgagttggtaaacgcccttaaaacagtgagcacttttgaagtacagatcgtggactataaatacagagaactcggattcctcgatcaactgaggattactcacaacaccgacatctttattgggatgcacggagccggcctgactcatcttttgttcctcccggattgggccgccgtattcgagttgtataattgcgaggatgaaaggtgctatctggatctggcacgccttagaggcgtgcactatattacttggcgtcgtcagaataaagtgttcccccaggataagggacatcaccctacactcggggaacaccccaagttcacgaactactcctttgacgtcgaggagttcatgtatcttgtgcttcaagccgccgaccacgtgctgcaacaccctaagtggccgttcaaaaaaaagcatgacgaactttag

SEQ ID NO: 99017 - DNA, 1584 bp, Artificial Sequence
  derived and/or modified sequence
atgctgatgctgtttgtgtttggagtgctgctgcacgaggtgtccctgagcggccagaatgaggccccacccaacacccacagcatccctggagagcccctgtacaactatgccagcatccggctgcctgaggagcacatccccttcttcctgcacaacaacagacacatcgccaccgtgtgcaggaaggacagcctgtgcccctacaagaagcacctggagaagctgaagtactgctggggctatgagaagagctgcaagccagagttccgcttcggctaccctgtgtgcagctatgtggacatgggctggacagacaccctggagagcgctgaggacatcttctggaagcaggccgactttggctacgcccgggagcggctggaggagatgcacgtgctgtgccagcccaaggagaccagtgacagcagcctggtgtgcagccgctacctgcagtactgccgggccaccaacctgtacctggacctgaggaacatcaagaggaaccacgaccgcttcaaggaggacttcttccagagcggggagattggaggccactgcaagctggacatccgcaccctgaccagcgagggccagaggaagagccccctgcagagctggtttgctgagctgcagagctacacccagctgaacttccggcccattgaagatgccaagtgtgacatcgtgattgagaagcccacctacttcatgaagctggatgctggggtgaacatgtaccaccacttctgtgacttcatcaacctgtacatcacccagcacgtgaacaacagcttcagcacagatgtgtacatcgtgatgtgggacaccagcagctatggctacggggacctcttcagtgacacctggaatgccttcacagattatgatgtgatccacctgaagacctatgacagcaagagggtgtgcttcaaggaggccgtgttcagcctgctgcccaggatgagatatggcctcttctacaacacccccctcatcagcggctgccagaacacaggcctcttccgggcctttgcccagcacgtgctgcaccggctgaacatcacccaggagggccccaaggatggcaagatccgggtgaccatcctggcccggagcacagagtacaggaagatcctgaaccagaatgagctggtgaatgccctgaagacagtgtccacctttgaggtgcagatcgtggactacaagtaccgggagctgggcttcctggaccagctgcgcatcacccacaacacagacatcttcatcggcatgcacggggccggcctgacccacctgctcttcctgcctgactgggccgctgtgtttgagctgtacaactgtgaagatgagcgctgctacctggacctggcccggctgcggggcgtgcactacatcacctggaggcggcagaacaaggtgttcccccaggacaagggccaccaccccaccctgggggagcaccccaagttcaccaactacagctttgatgtggaggagttcatgtacctggtgctgcaggccgctgaccacgtgctgcagcaccccaagtggcccttcaagaagaagcatgatgagctgtag

SEQ ID NO: 99018 - DNA, 1281 bp, Artificial Sequence
  derived and/or modified sequence
atgggctggacagacaccctggagagcgctgaggacatcttctggaagcaggccgactttggctacgcccgggagcggctggaggagatgcacgtgctgtgccagcccaaggagaccagtgacagcagcctggtgtgcagccgctacctgcagtactgccgggccaccaacctgtacctggacctgaggaacatcaagagaaatcatgaccgcttcaaggaggacttcttccagagcggggagatcggcggccactgcaagctggacatccgcaccctgaccagcgagggccagaggaagagccccctgcagagctggtttgctgagctgcagagctacacccagctgaacttccggcccattgaagatgccaagtgtgacatcgtcatcgagaagcccacctacttcatgaagctggatgctggggtgaacatgtaccaccacttctgtgacttcatcaacctgtacatcacccagcacgtgaacaacagcttcagcacagatgtgtacatcgtgatgtgggacaccagcagctatggctatggagacctcttcagtgacacctggaatgccttcacagattatgatgtgatccacctgaagacctatgacagcaagagggtgtgcttcaaggaggccgtgttcagcctgctgcccaggatgagatatggcctcttctacaacacccccctcatcagcggctgccagaacacaggcctcttccgggcctttgcccagcacgtgctgcaccggctgaacatcacccaggagggccccaaggatggcaagatccgggtgaccatcctggcccggagcacagagtacaggaagatcctgaaccagaatgagctggtgaatgccctgaagacagtgtccacctttgaggtgcagatcgtggactacaagtaccgggagctgggcttcctggaccagctgcgcatcacccacaacacagacatcttcatcggcatgcatggagctggcctgacccacctgctcttcctgcctgactgggccgctgtgtttgagctgtacaactgtgaagatgagcgctgctacctggacctggcccggctgcggggcgtgcactacatcacctggaggcggcagaacaaggtgttcccccaggacaagggccaccaccccaccctgggggagcaccccaagttcaccaactacagctttgatgtggaggagttcatgtacctggtgctgcaggccgctgaccacgtgctgcagcaccccaagtggcccttcaagaagaagcatgatgagctgtag

SEQ ID NO: 99019 - DNA, 756 bp, Artificial Sequence
  derived and/or modified sequence
atgagcagctatggctacggggacctcttcagtgacacctggaatgccttcacagattatgatgtgatccacctgaagacctatgacagcaagagggtgtgcttcaaggaggccgtgttcagcctgctgcccaggatgagatatggcctcttctacaacacccccctcatcagcggctgccagaacacaggcctcttccgggcctttgcccagcacgtgctgcaccggctgaacatcacccaggagggccccaaggatggcaagatccgggtgaccatcctggcccggagcacagagtacaggaagatcctgaaccagaatgagctggtgaatgccctgaagacagtgtccacctttgaggtgcagatcgtggactacaagtaccgggagctgggcttcctggaccagctgcgcatcacccacaacacagacatcttcatcggcatgcacggggccggcctgacccacctgctcttcctgcctgactgggccgctgtgtttgagctgtacaactgtgaagatgagcgctgctacctggacctggcccggctgcggggcgtgcactacatcacctggaggcggcagaacaaggtgttcccccaggacaagggccaccaccccaccctgggggagcaccccaagttcaccaactacagctttgatgtggaggagttcatgtacctggtgctgcaggccgctgaccacgtgctgcagcaccccaagtggcccttcaagaagaagcatgatgagctgtag

SEQ ID NO: 99020 - DNA, 1584 bp, Artificial Sequence
  derived and/or modified sequence
atgctgatgctgttcgtgttcggcgtgctgctgcacgaggtgagcttatctggacaaaacgaagccccccctaacacgcacagcattccaggtgagccgctgtacaactacgccagtatccggctcccagaggaacacatcccattctttttacacaataataggcacattgcaacagtgtgtagaaaggacagcctctgcccgtataaaaagcatcttgagaaattaaagtactgctgggggtacgagaagagttgtaaacctgaatttagattcgggtatcctgtctgtagttatgttgacatgggatggacagatacgctggaatccgccgaagacattttctggaagcaggccgatttcggttatgcacgagagagactagaagagatgcacgtgttatgtcagccaaaggagacgagcgacagttcattagtgtgctctagatacctccagtattgccgagcaaccaacctgtatctggatttgaggaacattaagcgaaatcatgatcgtttcaaagaagatttctttcagtcaggggagatcgggggtcattgcaaactggacataagaacactgacaagtgagggacaacgaaagagcccgctccagtcatggtttgcagaactgcagtcttacacccagcttaacttccggccaattgaggatgctaaatgcgatatcgtgatcgaaaaacccacgtattttatgaaactggatgccggcgtcaatatgtatcaccacttttgtgactttatcaacctgtacataacacagcacgttaacaatagctttagcacagatgtgtatatcgtcatgtgggacacctctagttatggttacggtgacctcttcagcgacacatggaatgcctttaccgactatgatgtgattcacctgaagacttatgatagcaagagggtgtgcttcaaagaagcagtgtttagcctcttaccccggatgcgctacgggctattttacaacactccattaatttcaggttgtcaaaacacgggtctctttagagccttcgcccagcatgtcctacacagactgaatatcactcaggagggtccaaaagacggcaagatccgggtaacaattctggccagatccactgaatacagaaaaatcctcaatcagaatgaactggtaaacgccctcaagaccgtgtctactttcgaagtccagattgtcgattacaagtacagagagttgggcttcctggaccagcttcgtatcactcacaatactgacatattcatcgggatgcacggagccgggctcacgcacctgctgttccttccagactgggccgcagtctttgagctgtataattgcgaggacgaacgctgttatctagacctggcccggttgcggggagtacactacataacctggcgacgccaaaataaagtgttcccacaggacaaaggacaccatcctactctgggcgagcatccaaagttcaccaattatagctttgatgttgaggagtttatgtacctagttctccaggcggccgaccatgttcttcagcaccccaagtggcccttcaaaaagaagcacgacgaactgtag

SEQ ID NO: 99021 - DNA, 4731 bp, Artificial Sequence
  derived and/or modified sequence
ctttccggccctggtgagggagctggcggactcgcgcgaacgttcgcgggagaacgccaggaagggcagatggttcctcgactctgagcccctccctgctgcgctcgccgggtcgaggccgctcgccgggctgaagccgctccgagcgtcgggccccgcgccctggccctcctgggtgtagtcccggtcctgcctctgcggggcccgagcccgcccacggcgccggctggccaaggtgtcccagctgctccttggcgccccctggcccagctcccgcgcccgaggtttccggtgagcggcagtagccggttatgacgactccctcctctggaacagccgccgtctcctccgcctcctcctcggtagttcacggctgccccggctccaggcctgtggaaatcgaatcaagggtttctggagtggagtgattccagctgctttgagctgaaggaaaagtagcctggccagtaaagcgtccgtgtgctggaggagtgcagccacccatcccggcgggccttgcaggacgaccgacaccaggaaggctttgtgccaggcccagcagccacccccagccgccttatgcaagtgggtacatgccctcgccagacgccagctttctgatctgcgtctttagattttttccatcgcctaagcgttacttctccactgatcggttttagagacctgaaacatcacagaagcttctgagtggttctgaagattcaagaggtttgcaggttgctatgttaatgttgtttgtctttggagtcttacttcatgaagtctcactgagtggtcagaatgaagctcctcctaatactcacagcattccaggcgaacctctgtataactatgccagcatccgcttgccagaggagcacattcccttctttttgcacaacaataggcatattgccactgtctgtaggaaagactctctttgtccatataagaaacacctagagaagctaaagtactgctggggttatgagaaatcctgcaaaccagagttcaggtttggttacccagtttgcagctatgtcgacatgggatggacggacactcttgagtcagctgaggacatattttggaaacaagctgactttggatatgccagagagaggctggaggagatgcatgtgctctgtcagcctaaggaaacgagtgactcaagtctggtgtgttcccgttatcttcagtactgcagagcaaccaatctctatcttgatttaagaaacatcaagagaaatcatgacagatttaaggaggactttttccagagtggtgaaattggagggcactgtaaacttgacatccgtacattgacgtctgaaggtcagcgcaaaagccctctgcagtcatggtttgctgagctacaaagctatactcagctcaacttcagacctatagaagatgctaaatgtgacattgtcattgaaaaaccaacatatttcatgaaattagatgcaggtgttaacatgtatcaccacttctgtgatttcatcaatctttatattactcagcacgttaataactcattcagtactgacgtgtacatcgtgatgtgggacaccagttcttacggatatggtgacctattctccgacacatggaatgcatttactgattatgacgttatacatttgaaaacttatgattccaaaagggtatgttttaaagaagctgttttttcattactcccccgcatgaggtatgggctgttctataatactcctctgatatctggctgtcaaaatactggactattcagggcatttgcccagcatgtactacacagactaaacatcacacaagaaggacctaaggatggaaaaattcgagtcaccattcttgcacggagcacagaataccggaaaatccttaaccaaaatgagcttgtaaatgcactgaaaacagtatctacatttgaagtccagattgttgattacaagtatagagaacttgggtttttagatcaactaaggatcacacacaacacggacatatttattggaatgcatggagctggtctgacccatttacttttccttccagactgggctgctgtatttgaactgtacaactgtgaagatgaacgctgttacttagacttggccaggctgagaggcgttcactacatcacttggcgacggcagaacaaagtctttcctcaggataagggccaccatccaaccctgggggagcacccgaagttcaccaactactctttcgatgtagaagaatttatgtatcttgtccttcaggctgcagaccacgtattgcaacacccaaagtggccatttaagaagaaacatgatgagctataaatatgctgagtctgtttgcaaaaagagagtgtttaaacactccaacacccagacttagaattaaatcagtaaagcaatctgttatttcctatccccgaattaccttttctatgccaaaacataccttcaggatattgttatgtgttgtatagatgttaagtgtttcatgtggtttttgtgtcattgctatttatcaatagcaataattttgcactgaaaactttttatagttcaaaaattaagcatggactccccagtatactttaactttctttctttctttttttttttttggagacagagtctcactgtcacccaggctggagtgcagtggcatgatctcagtttatgcaacttctgcctccccaggttcaagcgattcttttgcctcagccacctgactagctgggattgcagcctgcaccaccacacctggctaaatttttgttgttgtcgttgagatacagtttcactctgtcacccaggctggagtgcagtggcatgatctcagctcactgcaacctctgccttctggattcaagtgattcttgtgccttagcctcccaagtagctgggattacaggcgtgcaccaccacgcccagttgatttttgtatttttgatagagacggagtttcaccatgttggccaggctggtctcgaactctgggttcaagaaatcctcccaccttgcctcccaaagtgctgggattacaggtgtgagccaccacgcatggccctgaactttctctttttaggaataccaaagttttcaactttttcagctttagaatttgtaaatatttttgtagaatatcatatgactgtaattccagagtgttccaacttgtttatgatatatttgggtaaatttacaactgttcttttatttgccataatctggttataacactgtttgtggtaggaaaggaaaacatgcaaaacatacacacacacacacacacacacacacacacgcagagttgtgattctcagtaccaagctataggaccatgttatagatcagcgtttagtcacctccaggttatatgcatcgagaacctgaataaatcatgccactatattaatttatattacatgtttcatatttaaatcatgttttcctaaaatgtagcaactacatgtgataaaagcaaattagaacattctgtaggactgtcttgcataccttctgtctggtttccactgattccttcttagccatggagagcatttgtgattaattaatttatatatgaaataatggtttccattttatgcgagtatttgtaactgcatataccagtgcgtgtgcgtctacctctgtcagcatgaaagtattccagtctttaatttcaaaaacttcaaattagcctcatgaagagaatttttccctgtgaaaagtaagaccaagaaaaaacaaactaaagacatgtgacttattcaatgaaagtgaaaaagaagctctaaaacagtgtcattgattaaaaagaatatctggaatgtagccccactctttgagtgggattcatttcttactgcttatgaactttcaatttagtagtcagaaaccatggatttattttactgcacaatgtgaagtttacattttattaacacttgagtagtctgatttagagactagttacttctattttttaaaataatggagtaacaaattacagaatagctaaataattttttaaaaatattttacagttgtaaaaaatatccatcagaaaaatgacacacaaaacaaaatatctggacctttacagaagacgtttgctgacccccactttaaaggattggaacagtcttctagaattgaggaatatttattaaaatacctgtaaagaaaatagtgaatcactgtagcaatggctttgattcagaccttaaaatcacataagaagaattacaacatgttatggatttttaagtggcaggtattgtaactgttttttgtgtgcaaaatactgagtaaccactgggaaaatatttcagatgaaagggatgacaaaagcatgttgcgctttgcatcagcaaggcattgacttctgaaaaaatgatctgaaaaaagtttcaccgtttgtcttcttacctcattttaagaagcatgtgaaaatgggatactatagactactgagaatttcagaaattgagaacaatttcataataaaacggctatatttgaagagagaatacattttatataaacaggaaaatacatttgacactttatggaattttatgagactttttgtgggaacagaaggtcttcaaattgtaaaatgtaaagattgctctttttattaagtctttaacagggatgtatttcattgtatgttttgggtatggctttggaataaatcattttatattttatttgaatatcagaacca

SEQ ID NO: 99022 - RNA, 1584 nt, Artificial Sequence
  derived and/or modified sequence
augcuaaugcucuucgucuuuggugugcugcugcacgaagugagccucucuggccagaacgaggccccacccaacacccauagcauccccggcgagcccuuguacaauuaugccucaauucgucucccugaagagcacauccccuuuuuucuccacaauaaucgccacauugccacagucugucggaaagauucacuguguccauacaagaaacacuuggagaagcugaaguacuguuggggauacgaaaaaaguugcaagcccgaguuucgguucggcuauccgguuugcagcuauguggacaugggcuggacugacacacuggaauccgcggaggauaucuuuuggaagcaagcugacuucggguacgcuagagagcgccuagaagagaugcacguucucugccaacccaaagaaacuuccgacagcucucuggugugcucccgauaccugcaguauugcagggcuaccaaccuguaucuggaccuucggaacaucaaaaggaaccacgacagauucaaggaagacuuuuuccagaguggagagaucggaggccacugcaaacuugacauuaggacucuuaccucagagggacaacgaaaauccccucuacagucaugguucgcugagcuccaaucauauacacaacugaacuuccgcccaauugaagaugcuaaaugugacauagugaucgagaaacccacuuacuuuaugaaauuagacgccggggugaauauguaccaucauuucugugacuucauaaaucuguacauaacgcagcacgucaauaacagcuucagcaccgacguguacauagugaugugggauacaagcaguuacggcuauggcgaucuguucagugacaccuggaaugcauuuaccgauuaugaugucauucaccugaaaacguacgauucuaaacgaguuuguuucaaagaggcuguguucagucuccucccuagaaugcgcuauggacucuucuacaacaccccucucauaucugggugccagaauacaggacuguuucgagcauuugcacagcauguguugcaccguuuaaacaucacacaggaagggcccaaggauggaaaaauuagaguuacaauucucgcuaggucuaccgaauaucggaaaauauugaaucagaaugaacuggucaaugcucuaaagacaguuuccacuuuugaggugcaaaucguugacuauaaguaccgagaacugggcuuucuagaccagcuuaggauuacacacaacacggacauuuucaucggcaugcacggggccggccuuacccaucuucuguuuuuaccugauugggcugcugucuuugagcuguauaauugcgaagacgagcgauguuaccuggaccucgcaagacugaggggcguacacuacaucacuuggcggcgucagaauaaagucuuuccacaggauaaaggucaccauccaacgcucggggagcauccuaaguuuacuaacuacucguuugacguagaggaguuuauguaccuuguauuacaggcagcugaucaugugcuccaacaccccaaguggccauuuaaaaagaaacacgacgaauuguag

SEQ ID NO: 99023 - RNA, 1281 nt, Artificial Sequence
  derived and/or modified sequence
auggguuggacagacaccuuagaaagugcugaggacaucuucuggaagcaagcugacuuuggcuacgcgcgggagcgacuggaggagaugcacguacuaugccaacccaaagaaacaucagacaguucacugguguguagccgguaccuucaguacugucgugcgaccaacuuauaucuugauuugaggaacauuaaaaggaaccacgaucgauucaaagaggauuuuuuucagucaggcgaaaucggcggccacuguaaacucgauauccggacccugacuagugaaggccagaggaagagcccucuccaaagcugguucgcugaguugcagagcuauacccaacugaacuucaggccaaucgaagacgcuaaaugcgacauugugauagagaaaccuaccuacuucaugaagcuagaugcaggggugaacauguaucaccacuuuugugacuuuauuaauuuauacauaacucaacacgucaacaacucuuuuucuacggacgucuacaucguuaugugggacacuagcagcuacggguauggugauuuguuuagugacacuuggaacgccuucacggacuaugacguuauucaucucaagaccuacgacuccaagcgggucuguuucaaggaagcaguuuuuucguuauuaccacggaugagauaugggcucuucuacaauacuccccuuaucuccggcugccagaauaccggucuguuccgugcuuucgcccaacauguccugcacaggcugaacauaacacaagaaggcccaaaggauggcaaaauaagggugaccauucuggcaaggagcacagaauacaggaaaauccucaaccagaacgaauuggugaacgcucugaaaaccgugucuaccuuugaggugcagaucguugauuauaaauaccgagaauuaggcuuccuugaccagcugcgcauaacacauaacacagacaucuucaucggcaugcauggugccgggcuuacgcaccugcucuuucugcccgacugggcagccguauucgagcuuuauaauugugaggacgaacgguguuaccuagaccuggccaggcuccgggggguucauuacauaacauggagaagacagaauaagguauucccacaagauaaggggcaucacccuacucugggcgagcauccaaaguuuacaaauuacagcuucgaugucgaggaguucauguacuuggugcugcaagcagcagaucacguacugcagcaucccaaauggcccuucaagaagaagcaugacgaacuuuag

SEQ ID NO: 99024 - RNA, 756 nt, Artificial Sequence
  derived and/or modified sequence
auguccuccuauggauacggagaccucuucuccgacaccuggaacgcauuuacugacuaugauguuauccaucugaagacuuacgauagcaaaagaguauguuucaaagaggcaguguucucccuacuccccaggaugcgcuauggucuguuuuacaacaccccccucauuucuggaugucagaauacaggccucuuccgagcuuuugcccaacaugucuuacacaggcuuaacauaacccaggagggaccuaaggacggaaagauccggguaacuauucuggcgcgcucuacugaauaccguaagaucuugaaccaaaacgaacuggucaaugcacugaagacugugagcacguucgagguucaaaucguagauuauaaguacagagaacucgguuuccuugaccagcuuagaaucacucauaacaccgacauauuuaucgggaugcacggagccggccucacacaucugcuuuuucucccagauugggccgccgucuuugaacuguacaacugcgaggaugaacggugcuauuuggaccuggcucgccuaaggggaguccauuacauuaccuggcgccgacagaacaagguauucccucaggacaaaggacaucacccuacuuugggagaacauccgaaauuuaccaacuauucuuucgacgucgaagaguucauguauuuagucuugcaggccgcugaccacguacuccagcacccgaaauggccuuuuaaaaaaaaacaugacgagcuguag

SEQ ID NO: 99025 - RNA, 1584 nt, Artificial Sequence
  derived and/or modified sequence
auguuaaugcuguucguuuucggcguuuuacugcacgaggucucacuuagcggccaaaacgaagcaccuccaaauacacacaguaucccgggcgaaccacucuacaauuacgccagcauuagauugccagaagaacacaucccguucuuucuccacaauaaccgccacaucgcaacugucugucgcaaagacucucugugucccuauaaaaagcaucuggagaaacuuaaauacuguugggguuaugaaaaguccugcaaacccgaguucagauucgguuacccuguauguuccuauguugauaugggauggaccgauacacuugaaucagcugaggacauauucuggaagcaagccgauuucggguaugcaagagagaggcuggaagagaugcacguucucugucaaccuaaagagaccagcgacagcucccugguuugcagccgcuaccugcaguacuguagagccacaaaucuguaucuggaucugcguaacauuaaaaggaaccacgauagauuuaaagaagacuuuuuccaauccggcgaaauaggaggccauuguaaacuggacauuaggacccuaaccuccgagggacaacguaagagcccucugcagagcugguuugcagaacuucagucauauacccaacucaacuuccggccaauagaggaugccaagugcgauaucgucauugaaaagcccacuuacuucaugaaacuggaugccggcgucaacauguaccaccacuucugcgacuucauuaaccucuacaucacccagcaugugaauaacucauuuucuaccgacguuuacaucguuaugugggacaccuccagcuacgguuacggagaucuguucucggacacuuggaacgcauuuacugacuaugaugucauccacuugaaaaccuaugacucaaaaagaguguguuucaaagaggcaguguucuccuuguuaccccggaugcgauaugggcuauuuuauaacacgccacugaucuccggcugccaaaacaccggccuuuucagagccuuugcacaacaugucuuacaucgccucaauauuacacaggaggguccaaaggauggaaagauucgcguaacaauccucgcacggucaacugaauacaggaagaucuugaaucagaacgagcucgugaacgcccugaagacaguauccaccuuugaaguacagauuguagacuacaaguaccgcgagcuaggauuucuugaccaauugcguauuacccacaauacagacaucuuuauuggaaugcauggcgcaggacuuacacaucuucuguuucuaccggacugggccgcaguuuuugaacucuauaacugcgaagaugaaagauguuaccuggaucuggcaagguugaggggcgugcacuacauuacauggcgacggcaaaacaaaguuuuuccgcaagacaaaggacaccauccuacacugggagagcacccaaaguuuacuaauuauagcuucgacgucgaggaguucauguaucucguacuccaggcagccgaccacguccuccaacacccuaaauggccauuuaagaagaaacacgaugaacucuag

SEQ ID NO: 99026 - RNA, 1281 nt, Artificial Sequence
  derived and/or modified sequence
augggauggaccgacacacuugaaucugcggaagacauauuuuggaaacaggcagauuuuggcuaugcaagggaacgucucgaagaaaugcauguacucugucagccaaaagagaccucagacagcagcuuagucuguagucgguaccuucaguacugucgagcaacaaaccucuaucuugaucugagaaacauuaaacgaaaucacgaucgcuuuaaagaggacuuuuuccagagcggcgaaaucggaggccacuguaaacucgacauuaggacauugacgucagaaggccagaggaagucuccuuugcagagcugguuugcugaauugcaaucuuauacucaguugaacuucagaccuaucgaagacgccaaaugcgauauagucaucgagaagccaacauacuuuaugaaacuggaugcuggcguaaacauguaccaucauuucugcgauuuuauuaaccucuacaucacccagcacgugaauaacucauuuaguacagauguuuacauugucaugugggacacuagcucguacggauacggagaccuguucagcgauacauggaaugccuucaccgauuacgacguuauucaucugaaaaccuaugauaguaaaagaguuugcuuuaaggaagcuguguucucccucuugccuaggaugcgguacggucucuuuuauaauaccccucugauaagcggcugucaaaauacuggacucuuucgggccuucgcccagcauguguugcaucgacucaacauuacgcaggaaggaccaaaagacggcaagauacgcgugaccauacuggcccguucuacugaauaucgcaaaauccucaaucagaaugagcuggugaacgcccugaaaaccguaucaacauuugaagugcagauugucgacuacaaguaccgugaacugggcuuucucgaccagcugcggaucacccacaauacagacaucuucauuggaaugcacggagcaggacucacccaucuccucuuucugccugacugggccgccguguuugaacucuauaauugcgaggacgagcgcugcuaccucgaccuggccaggcuccgcggagugcacuauauuacguggaggaggcaaaauaaagucuucccucaagacaaaggacaccauccuaccuuaggcgaacacccaaaauuuacaaacuacucuuuugauguugaagaauucauguauuuaguacugcaggccgccgaccacguuuuacaacacccuaaauggcccuuuaaaaagaaacacgaugagcuguag

SEQ ID NO: 99027 - RNA, 756 nt, Artificial Sequence
  derived and/or modified sequence
augucuucuuacggcuacggagaucuuuucagugauaccuggaaugcauuuacagacuaugauguaauacacuugaaaacuuacgauuccaagcgggucugcuuuaaagaagccguguucucauugcugccccgaaugcgcuaugggcucuuuuauaauacaccccuuauuuccggcugccaaaauacuggauuguuccgagccuuugcacagcacguccuucaccgacuuaacauaacacaggaagguccaaaggauggaaaaauuaggguuacaauuuuggcucgaaguaccgaauaucguaaaauacucaaucaaaaugaacugguaaaugcacuaaagaccguguccacauuugaggugcagaucgucgauuauaaauauagagagcuuggguuccuggaucagcuacgaaucacacacaauacagauaucuuuaucgggaugcacggcgcaggucucacacaccuguuguuucugcccgauugggccgcagucuuugaauuguacaacugcgaagacgaaagauguuaucucgaccuugcccggcugcguggaguacacuacauuacauggagaaggcagaacaagguauuuccacaggacaaagggcaccauccgacccuuggcgagcaucccaaauucacuaacuauucguucgauguagaggaauucauguaccugguccugcaagccgccgaccauguauuacaacaucccaaauggccauucaagaaaaaacaugacgaauuauag

SEQ ID NO: 99028 - protein, 364 aa, Artificial Sequence
  derived and/or modified sequence
MAATAAAVVAEEDTELRDLLVQTLENSGVLNRIKAELRAAVFLALEEQEKVENKTPLVNESLKKFLNTKDGRLVASLVAEFLQFFNLDFTLAVFQPETSTLQGLEGRENLARDLGIIEAEGTVGGPLLLEVIRRCQQKEKGPTTGEKANDEANQSDTSVSLSEPKSKSSLHLLSHETKIGSFLSNRTLDGKDKAGLCPDEDDMEGDSFFDDPIPKPEKTYGLRKEPRKQAGSLASLSDAPPLKSGLSSLAGAPSLKDSESKRGNTVLKDLKLISDKIGSLGLGTGEDDDYVDDFNSTSHRSEKSEISIGEEIEEDLSVEIDDINTSDKTITQLECLLSIGALHFKNTADIFKVIFILLNKILPI

SEQ ID NO: 99029 - DNA, 1391 bp, Artificial Sequence
  derived and/or modified sequence
ttgtcttggagaagcaagatggcggcgacggcggccgcagtggtggccgaggaggacacggagctgcgggacctgctggtgcagacgctggagaacagcggggtcctgaaccgcatcaaggctgaactccgagcagctgtgtttttagcactagaggagcaagaaaaagtagagaacaaaactcctttagttaatgagagcctgaaaaagtttttaaataccaaagacggtcgtttagtggctagtcttgttgcagaatttcttcagttttttaaccttgactttactttggctgtttttcaacctgaaactagcacactgcaaggtctcgaaggtcgagagaatttagcccgagatttaggtataattgaagcagaaggtactgtgggtggacccttattattagaagtgatcaggcgctgtcaacagaaagaaaaagggccaaccactggggaaaaggccaatgatgaggccaatcagagtgatacaagtgtctccttgtcagaacccaagagcaaaagcagccttcacttactgtcccatgaaacaaaaattggatcttttctaagcaacagaactttagatggcaaagacaaagctggcctttgtccagatgaagatgatatggaaggagattctttctttgatgatcccattcctaagccagagaaaacttacggtttgaggaaggaacctaggaagcaagcaggaagtctggcctcgctctcggatgcaccccccttaaaaagtggactcagctccctggcgggagccccttctttaaaagactctgagagtaaaaggggaaatacagttttgaaagatctgaaattgatcagtgataaaattggatcacttggattaggaactggagaagatgatgactatgttgatgattttaatagtaccagccatcgctcagagaaaagtgagataagtattggtgaagagatagaagaagacctttctgtggaaatagatgacatcaataccagtgataagacaatcactcagctggaatgtctgctctctattggtgccttgcatttcaaaaacactgcagatatttttaaagtaattttcattttactaaacaaaatacttcctatttgagcccatgtgtggaagatttaatattcttaatttaactgtacatttctttatggaaattgattatctacactcagtttcattacagggaaggaacccatgaaaacatcagtgttaagagcatgatgaaaggtgtcaataaagccgtaggatcgcgcaaccctttgtgtgtgtggctgctggtacgtgtgatctttgaaaaccttggctttagccctctggaatcagagcttacccaccatagtatattttgatattaggtggttctacacatagttggc

SEQ ID NO: 99030 - DNA, 1095 bp, Artificial Sequence
  derived and/or modified sequence
atggctgccactgccgctgcagttgtcgctgaagaagacaccgaacttcgagatttgctcgttcagaccctggaaaattccggagtgctcaatcgcattaaggcagaactccgggccgccgtattcttagcgctggaagagcaggaaaaggtcgagaataagactcctcttgttaatgaaagtctgaaaaagtttttaaatacaaaggacggccgcctggtggcttccctggtcgcggaattcctgcagttcttcaatctggactttacacttgcagtgtttcagcccgagacaagcactctccaaggcctggaggggcgggagaacctagctcgcgacctcggtattatcgaggctgagggaaccgtcggcggacccctgctcttggaggttataagacgttgccaacagaaggaaaagggtcctacaacaggggaaaaggctaacgacgaagctaaccaatcagacacttcagtttcactcagtgagccgaaatccaagtcctctctacatctgctcagccatgaaacaaagatcggatccttcttatctaaccgcacactcgacggcaaggacaaagcaggattgtgtcctgacgaagacgacatggagggtgatagcttctttgacgatcctataccaaaaccagagaagacttacgggctacggaaggagccgaggaagcaagcaggatccctggcttctctcagcgacgcacctcctcttaagagcggactctcaagcctggccggagcaccaagcctcaaagattctgagtcaaagaggggaaataccgtgctgaaagatctgaagctcataagtgacaaaatagggtcattgggcctaggaacaggcgaggacgacgactacgttgacgatttcaactccacatcccatagaagtgaaaagtccgaaatcagcattggtgaggagatcgaagaagatctttccgtggagatcgacgacataaatacctctgataagacaatcacccagctcgagtgtcttctgtcgatcggtgccctgcacttcaagaataccgccgacatctttaaagttatttttattctgctaaacaaaatcctgcctatttag

SEQ ID NO: 99031 - DNA, 1095 bp, Artificial Sequence
  derived and/or modified sequence
atggccgccacagctgctgctgtggtggccgaggaggacacagagctgcgggacctgctggtgcagaccctggagaacagcggcgtgctgaaccgcatcaaggccgagctgcgggctgctgtgttcctggccctggaggagcaggagaaggtggagaacaagacccccctggtgaatgaaagcctgaagaagttcctgaacaccaaggatggccgcctggtggccagcctggtggccgagttcctgcagttcttcaacctggacttcaccctggccgtgttccagcctgagaccagcaccctgcagggcctggagggccgggagaacctggcccgggacctgggcatcattgaagctgagggcaccgtgggcggccccctgctgctggaggtgatccgccgctgccagcagaaggagaagggccccaccaccggggagaaggccaatgatgaggccaaccagagcgacacctctgtgtccctgtctgagcccaagagcaagagcagcctgcacctgctgagccatgagaccaagattggcagcttcctgagcaacagaaccctggatggcaaggacaaggccggcctgtgcccagatgaagatgacatggagggggacagcttctttgatgaccccatccccaagccagagaagacctacggcctgaggaaggagcccaggaagcaggccggcagcctggccagcctgagtgatgccccacccctgaagagcggcctgagcagcctggccggggcccccagcctgaaggacagcgagagcaagaggggcaacacagtgctgaaggacctgaagctgatcagtgacaagattggcagcctgggcctgggcaccggggaggatgatgattatgtggatgacttcaacagcaccagccacaggtctgagaagtctgagatcagcatcggggaggagattgaggaggacctgtctgtggagattgatgacatcaacaccagtgacaagaccatcacccagctggagtgcctgctgagcattggagccctgcacttcaagaacacagctgacatcttcaaggtgatcttcatcctgctgaacaagatcctgcccatctag

SEQ ID NO: 99032 - DNA, 1095 bp, Artificial Sequence
  derived and/or modified sequence
atggccgccaccgccgccgccgtggtggccgaggaggacaccgagctccgggatctgctggtacagaccctggaaaactccggcgtactcaacaggatcaaggccgaattaagggccgctgtctttcttgctctcgaggagcaggaaaaggtggagaataagaccccacttgtcaacgagtccctcaagaagtttctgaatacaaaagacggtcgcttggtcgctagcctcgtggccgagttcctccaattctttaaccttgactttaccctagcggtgtttcagccagagacgagtacactccagggcttagagggacgagaaaacctggcgcgcgacctgggcattatcgaagcagagggaacggtgggtggccccctgctgctagaggttatccgtagatgtcagcagaaggagaagggaccaacaacaggtgagaaagctaatgacgaggccaaccaaagtgacaccagcgtgtcgcttagtgagccgaaatccaaatcttcattgcacttgctgtcccatgagactaaaatcggctcattcctgagcaatcggacgcttgacggtaaagataaagccggcttatgccccgatgaagatgatatggaaggagactccttctttgatgatcctattccaaagcctgagaaaacctatgggctccggaaggagcccaggaagcaggccgggtccctggcatccctgtccgatgcccctccactgaaatccggcctttcgagcctagctggagcccccagcctgaaagattcggagtcaaagaggggcaataccgtgctcaaagacctcaaactgattagtgataagataggcagtctgggtctaggcaccggggaggatgatgactatgtggacgactttaactcaacttctcaccgatcagagaagagtgaaatcagcatcggcgaggaaatcgaagaagacctgtcagtggaaatcgacgacatcaatacatctgataagacaattacacagctggagtgcttactttcaatcggggcactgcatttcaaaaacaccgcagatatttttaaggtgattttcattcttctcaataagatcttgccaatctag

SEQ ID NO: 99033 - DNA, 1095 bp, Artificial Sequence
  derived and/or modified sequence
atggctgccactgcagccgcagtggtggcagaagaggacacagaactacgggatttgctcgtgcagactctagagaactctggtgtgcttaatcgtataaaggcagagctccgagccgcagtgttcctcgctcttgaggaacaggaaaaggtcgagaacaagaccccgctcgtcaatgaatctctcaaaaagttcctcaataccaaggatggaagacttgttgcctccttagtggccgaattcttgcagttttttaatctcgattttacactagccgtatttcagccggagacatcaaccttgcaaggtttggaagggagggagaacctggcccgagatctgggaatcattgaagcagagggcacagtgggaggacccttgctactagaggtgatccgaagatgtcagcagaaagaaaaaggccctactactggtgaaaaagccaatgatgaggccaatcagtcagataccagtgtgagcctgtccgagccgaaatccaaatcttccctgcacctgcttagccatgagaccaagattgggtccttcctttcaaaccggacactggacggaaaagacaaggctggactttgtcctgacgaagatgacatggagggagacagcttctttgacgatcccatccccaagccagagaagacatatggcctgcggaaagagccgagaaaacaggccggtagtctggcatcgttgtccgatgcgcctcccctgaaaagtggcttgtcttcattagcaggcgcacccagcctgaaagattcggaatccaagagaggcaataccgttttaaaggatctgaagttgatttcggataaaattggtagtctgggactggggaccggggaagatgacgactacgtagacgattttaatagcacctcacaccgtagtgagaaaagtgagatatctattggcgaagagatcgaggaggaccttagcgttgagatcgacgatattaatacttcggacaagacgattactcagcttgaatgtctcctctccatcggagccctgcattttaaaaacaccgcagacattttcaaagtgatcttcatcctactcaacaagatcctcccaatctag

SEQ ID NO: 99034 - DNA, 1095 bp, Artificial Sequence
  derived and/or modified sequence
atggccgccaccgccgccgccgtggtggccgaggaggacaccgagctgagagacctgctggtgcagaccctggagaacagcggcgtgctgaacagaatcaaggccgagctgagagccgccgtgttcctggccctggaggagcaggagaaggtggagaacaagacccccctggtgaacgagagcctgaagaagttcctgaacaccaaggacggcagactggtggccagcctggtggccgagttcctgcagttcttcaacctggacttcaccctggccgtgttccagcccgagaccagcaccctgcagggcctggagggcagagagaacctggccagagacctgggcatcatcgaggccgagggcaccgtgggcggccccctgctgctggaggtgatcagaagatgccagcagaaggagaagggccccaccaccggcgagaaggccaacgacgaggccaaccagagcgacaccagcgtgagcctgagcgagcccaagagcaagagcagcctgcacctgctgagccacgagaccaagatcggcagcttcctgagcaacagaaccctggacggcaaggacaaggccggcctgtgccccgacgaggacgacatggagggcgacagcttcttcgacgaccccatccccaagcccgagaagacctacggcctgagaaaggagcccagaaagcaggccggcagcctggccagcctgagcgacgccccccccctgaagagcggcctgagcagcctggccggcgcccccagcctgaaggacagcgagagcaagagaggcaacaccgtgctgaaggacctgaagctgatcagcgacaagatcggcagcctgggcctgggcaccggcgaggacgacgactacgtggacgacttcaacagcaccagccacagaagcgagaagagcgagatcagcatcggcgaggagatcgaggaggacctgagcgtggagatcgacgacatcaacaccagcgacaagaccatcacccagctggagtgcctgctgagcatcggcgccctgcacttcaagaacaccgccgacatcttcaaggtgatcttcatcctgctgaacaagatcctgcccatctag

SEQ ID NO: 99035 - protein, 380 aa, Artificial Sequence
  derived and/or modified sequence
MCPMLLKNGYNGNATPVTTTAPWASLGLSAKTCNNVSFEESRIVLVVVYSAVCTLGVPANCLTAWLALLQVLQGNVLAVYLLCLALCELLYTGTLPLWVIYIRNQHRWTLGLLACKVTAYIFFCNIYVSILFLCCISCDRFVAVVYALESRGRRRRRTAILISACIFILVGIVHYPVFQTEDKETCFDMLQMDSRIAGYYYARFTVGFAIPLSIIAFTNHRIFRSIKQSMGLSAAQKAKVKHSAIAVVVIFLVCFAPYHLVLLVKAAAFSYYRGDRNAMCGLEERLYTASVVFLCLSTVNGVADPIIYVLATDHSRQEVSRIHKGWKEWSMKTDVTRLTHSRDTEELQSPVALADHYTFSRPVHPPGSPCPAKRLIEESC

SEQ ID NO: 99036 - DNA, 3658 bp, Artificial Sequence
  derived and/or modified sequence
agctaggactgcagggaggggtgcgaggctagccacgcaggcggggccctgggtcattttaaactctcagagtgaacgtcttgataggaccgacaagacgcatgacatgtacttagaaagcttatcttagagccacactgagattggaacccgcaaaatatgccagggaggaaggtgagcaagggacacgacactcacccggagaaacccagcaagcgcagcgaggctgtggggagaccggagccctgcacaccgccgggggaaggtgggccagcgccaccaccgtggagaacagcgcggaggcaccccacgagatgagacggaactgccgtgagatccagcaatgccaactgtgggtctgacccaggagaacggaaagcagggacgtgaacagccctcctcatgttcttgacaccgtcattctcagcagctcagctaaggcacagaggcagccgagcgtctgtcagcggagtcgtggctgagcagaacacgccacacgccacacgccacacgccacacgtgcaggattgctcaagatggaagggcacagtggaatatatatatatatttatatttttggcgagaccctggaggacacactgaatacaatggaataccatcccgcctttgaaaggaagggaaatcctggcacacgctgcaacaggagggagcttgaggacactgtggtgagtggagcacgtgagacacggaaggacacacgctgaagacacgcagagatgcccacccacgtggggaggtgacaggggagcccagcgcacagagacaaagtggaatggaggcctgggggctgggagcaaatgcggagcgagtgcttcctggggcagagtctccgtttgggaagatgagaaggttctgccgacggatgctggcgatggttgcagaagaatgtgaatgtgcccaatgctactgaaaaacggttacaatggaaacgccaccccagtgaccaccactgccccgtgggcctccctgggcctctccgccaagacctgcaacaacgtgtccttcgaagagagcaggatagtcctggtcgtggtgtacagcgcggtgtgcacgctgggggtgccggccaactgcctgactgcgtggctggcgctgctgcaggtactgcagggcaacgtgctggccgtctacctgctctgcctggcactctgcgagctgctgtacacaggcacgctgccactctgggtcatctatatccgcaaccagcaccgctggaccctaggcctgctggcctgcaaggtgaccgcctacatcttcttctgcaacatctacgtcagcatcctcttcctgtgctgcatctcctgcgaccgcttcgtggccgtggtgtacgcgctggagagtcggggccgccgccgccggaggaccgccatcctcatctccgcctgcatcttcatcctcgtcgggatcgttcactacccggtgttccagacggaagacaaggagacctgctttgacatgctgcagatggacagcaggattgccgggtactactacgccaggttcaccgttggctttgccatccctctctccatcatcgccttcaccaaccaccggattttcaggagcatcaagcagagcatgggcttaagcgctgcccagaaggccaaggtgaagcactcggccatcgcggtggttgtcatcttcctagtctgcttcgccccgtaccacctggttctcctcgtcaaagccgctgccttttcctactacagaggagacaggaacgccatgtgcggcttggaggaaaggctgtacacagcctctgtggtgtttctgtgcctgtccacggtgaacggcgtggctgaccccattatctacgtgctggccacggaccattcccgccaagaagtgtccagaatccataaggggtggaaagagtggtccatgaagacagacgtcaccaggctcacccacagcagggacaccgaggagctgcagtcgcccgtggcccttgcagaccactacaccttctccaggcccgtgcacccaccagggtcaccatgccctgcaaagaggctgattgaggagtcctgctgagcccactgtgtggcagggggatggcaggttgggggtcctggggccagcaatgtggttcctgtgcactgagcccaccagccacagtgcccatgtcccctctggaagacaaactaccaatttctcgttcctgaagccactccctccgtgaccactggccccaggctttcccacatggaaggtggctgcatgccaaggggaggagcgacacctccaggcttccgggagcccagagagcatgtggcaggcagtggggcctcttcatcagcagcctgcctggctggctcccttggctgtgggcaggtagcacgcctgctggcagaggtacctggtggctgccctgttcgcatcagtggcgatgactttatttgcggagcatttctgcaagcgttgcctggatgcggtggtgcattgtgggccctctgggctcctgcctcagaatgtcagtgagcaccatgctggaggtcacccagcactgtggcagcgcccaggagggcatagggcagcctaccacctccaagggggcaggcgccctcatctggggttgggtctgtgctgagctggagggcctctagggaaccgtggggcagggtggccagctgctggctcccagagcgcagcccaggcgtcctcaacggggagccccaaatgtccacgcccagaacaacagttggcaggacaggtgtgacacagccacagcagaggcaaggggtgccaggagtccccagcggcatcctcggggagatgctggtgaggggtccgtacagggtggggtccccacccctagccccttactgaggggggagtgcagcagttggcctgcttgtctggcggagaaagccagctccctgcaccctcggggctgagtcagatctgggtctgccgcaaaggccttgcctagaccaggtcacactgatgccctggtttccctatctgtaaaatggggccaatgacacctacctcactgggtcaccatcgagatcaatcctcctccctgccccgacacctcgggcacatcgcatgcactcagagcacagagccgggcagacgcagcacctgcatggggagcccagtgcccggcacagcacaggggcttccagggaggccgcgcagggccgtggggctgagccacgctctcgttttgtcaggcagctatgcagttgctcttccttgtttttgttttgtttttgtttttgtttttaatatttatttttttagagacagggccttgctctgttgcctgggctggagaacagtggcaccatcatagctcactgcagcctcaaactcctgggctcaagcgatcctccccgctcagcctcctgagtagctgggactacaggtgtgcaccaccacacccagccaaaacagccatcctccccttgagagtcatcagaaaaatacattaggaaaatgtgtttagaaataaaagcacaaggcagggcagtgctcacgcctgtcatcccagcactttgggaggccgagacgggaggatcagttgaggtcaggagtttgagaccagcctcggcaacatggcaaaatcttgtctcttttttttggtattaaaaaaatcataaaaataaaagaaataatgcaatttaacctt

SEQ ID NO: 99037 - DNA, 2779 bp, Artificial Sequence
  derived and/or modified sequence
agctaggactgcagggaggggtgcgaggctagccacgcaggcggggccctggctttataaaggtataattgacaaacaagaagagtacctaggccaggtgcggtggcttacgcctgtaatcccagcactttgggaggccgaggtcattttaaactctcagagtgaacgtcttgataggaccgacaagacgcatgacatgtacttagaaagcttatcttagagccacactgagattggaacccgcaaaatatgccagggaggaaggtgagcaagggacacgacactcacccggagaaacccagcaagcgcagcgaggctgtggggagaccggagccctgcacaccgccgggggaaggtgggccagcgccaccaccgtggagaacagcgcggaggcaccccacgagatgagacggaactgccgtgagatccagcaatgccaactgtgggtctgacccaggagaacggaaagcagggacgtgaacagccctcctcatgttcttgacaccgtcattctcagcagctcagctaaggcacagaggcagccgagcgtctgtcagcggagtcgtggctgagcagaacacgccacacgccacacgccacacgccacacgtgcaggattgctcaagatggaagggcacagtggaatatatatatatatttatatttttggcgagaccctggaggacacactgaatacaatggaataccatcccgcctttgaaaggaagggaaatcctggcacacgctgcaacaggagggagcttgaggacactgtggtgagtggagcacgtgagacacggaaggacacacgctgaagacacgcagagatgcccacccacgtggggaggtgacaggggagcccagcgcacagagacaaagtggaatggaggcctgggggctgggagcaaatgcggagcgagtgcttcctggggcagagtctccgtttgggaagatgagaaggttctgccgacggatgctggcgatggttgcagaagaatgtgaatgtgcccaatgctactgaaaaacggttacaatggaaacgccaccccagtgaccaccactgccccgtgggcctccctgggcctctccgccaagacctgcaacaacgtgtccttcgaagagagcaggatagtcctggtcgtggtgtacagcgcggtgtgcacgctgggggtgccggccaactgcctgactgcgtggctggcgctgctgcaggtactgcagggcaacgtgctggccgtctacctgctctgcctggcactctgcgagctgctgtacacaggcacgctgccactctgggtcatctatatccgcaaccagcaccgctggaccctaggcctgctggcctgcaaggtgaccgcctacatcttcttctgcaacatctacgtcagcatcctcttcctgtgctgcatctcctgcgaccgcttcgtggccgtggtgtacgcgctggagagtcggggccgccgccgccggaggaccgccatcctcatctccgcctgcatcttcatcctcgtcgggatcgttcactacccggtgttccagacggaagacaaggagacctgctttgacatgctgcagatggacagcaggattgccgggtactactacgccaggttcaccgttggctttgccatccctctctccatcatcgccttcaccaaccaccggattttcaggagcatcaagcagagcatgggcttaagcgctgcccagaaggccaaggtgaagcactcggccatcgcggtggttgtcatcttcctagtctgcttcgccccgtaccacctggttctcctcgtcaaagccgctgccttttcctactacagaggagacaggaacgccatgtgcggcttggaggaaaggctgtacacagcctctgtggtgtttctgtgcctgtccacggtgaacggcgtggctgaccccattatctacgtgctggccacggaccattcccgccaagaagtgtccagaatccataaggggtggaaagagtggtccatgaagacagacgtcaccaggctcacccacagcagggacaccgaggagctgcagtcgcccgtggcccttgcagaccactacaccttctccaggcccgtgcacccaccagggtcaccatgccctgcaaagaggctgattgaggagtcctgctgagcccactgtgtggcagggggatggcaggttgggggtcctggggccagcaatgtggttcctgtgcactgagcccaccagccacagtgcccatgtcccctctggaagacaaactaccaatttctcgttcctgaagccactccctccgtgaccactggccccaggctttcccacatggaaggtggctgcatgccaaggggaggagcgacacctccaggcttccgggagcccagagagcatgtggcaggcagtggggcctcttcatcagcagcctgcctggctggctcccttggctgtgggcaggtagcacgcctgctggcagaggtacctggtggctgccctgttcgcatcagtggcgatgactttatttgcggagcatttctgcaagcgttgcctggatgcggtggtgcattgtgggccctctgggctcctgcctcagaatgtcagtgagcaccatgctggaggtcacccagcactgtggcagcgcccaggagggcatagggcagcctaccacctccaagggggcaggcgccctcatctggggttgggtctgtgctgagctggagggcctctagggaaccgtggggcagggtggccagctgctggctcccagagcgcagcccaggcgtcctcaacg

SEQ ID NO: 99038 - DNA, 1143 bp, Artificial Sequence
  derived and/or modified sequence
atgtgtcccatgcttctcaaaaacggctacaatgggaatgcaacgcctgtcacgactaccgccccatgggcctccttaggccttagtgccaaaacttgcaataatgtctccttcgaggagtcccgcattgtcctggttgtcgtctactccgccgtgtgcacgctgggagtgcccgcaaattgcctgacagcttggttagctctgctacaggtccttcaaggtaacgtgctggctgtgtaccttctgtgcctcgcactgtgcgaactcctctacaccggaacgctccctctgtgggtgatatatataaggaatcagcataggtggacccttggtttactggcctgcaaggtgacagcatacatttttttttgcaacatttatgtgtctatacttttcctttgttgcataagctgtgataggttcgtcgcggtggtatacgccctcgaatcgcgcggaagacgtagacggcgaaccgccatcctgatctctgcatgtattttcattcttgtgggaatcgtgcattaccctgtgttccagaccgaagataaggaaacatgttttgacatgttgcagatggattcgcggatcgctggctactactatgcccggttcaccgtggggtttgccattcctttgagtatcatcgcgttcactaaccatagaatcttccgatctattaaacagagcatgggtctgtcagctgcccagaaagcaaaagtaaagcattctgctatcgctgtagtagtgattttcctggtttgttttgctccttatcatttagtactgttggtcaaagctgcagcgttctcctactaccgaggcgacaggaacgctatgtgcggcctggaggagagattgtacacagccagcgtggtgttcctgtgcttgagcactgttaacggcgtggctgatccaatcatctatgttctcgcaaccgatcactcacggcaggaggttagccgaattcacaagggctggaaggaatggagcatgaaaaccgacgtcacaagattaacccatagccgggacacagaggaactgcagtccccagtcgccctcgccgaccattatactttttcccggcccgtccatcccccaggctccccctgcccagccaagagactgatcgaggagtcatgctag

SEQ ID NO: 99039 - DNA, 1143 bp, Artificial Sequence
  derived and/or modified sequence
atgtgcccaatgcttttaaagaacggatataacggcaacgccacacctgtgacaaccactgcaccctgggccagccttggcctgtctgctaaaacgtgtaataatgtttctttcgaggagagcagaatcgtactggttgtcgtgtactcagccgtgtgtaccctgggggttccagcaaactgccttacagcgtggctcgcactgttgcaggtgctccagggaaatgttctcgcagtgtatctgctctgtttggctctgtgcgagctcctctacacagggacccttcccctgtgggtcatatacatccggaatcagcaccgttggacattaggtctcctggcttgtaaagtgaccgcctacatcttcttctgcaacatttatgtgagcattctttttctgtgctgcatctcttgtgaccggttcgtagccgtggtttacgccctggagagtcggggacgtaggcggagacgaacagccatcctgattagtgcgtgtattttcattcttgttggcatagtgcactatcctgtcttccaaactgaagataaagagacctgcttcgatatgctgcagatggattcacgtattgccggctattattatgcacgattcactgtgggcttcgccattcccctgtctattatcgcatttactaaccacagaatttttaggtctataaagcagtctatggggctctccgctgctcagaaggctaaggtgaaacactccgctatcgcagtggtagtcatcttcctggtgtgtttcgctccttatcacttggtgctccttgtgaaagcagctgccttttcttattataggggggatagaaatgccatgtgcggcttggaggaacgcctgtatacagctagcgtcgtttttttatgtctcagcacagtcaatggggtggccgatcccatcatttatgtcttggctacagaccacagtaggcaggaagtgtcccgtatacacaaggggtggaaggagtggagcatgaagacggatgtcacacggctcacacacagccgggacacagaggagctccagagccctgtcgcccttgccgatcactatacttttagtagacccgtgcatccccccggctctccatgtcccgcaaaaagactcatagaggagtcgtgttag

SEQ ID NO: 99040 - DNA, 33 bp, Artificial Sequence
  derived and/or modified sequence
atgtgtccaatgttactgaagaatggttactag

SEQ ID NO: 99041 - DNA, 1143 bp, Artificial Sequence
  derived and/or modified sequence
atgtgccccatgctgctgaagaatggctacaatggaaatgccacccctgtgaccaccacagccccctgggccagcctgggcctgagcgccaagacctgcaacaacgtgtcctttgaggagagcagaattgtgctggtggtggtgtacagcgctgtgtgcaccctgggcgtgcctgccaactgcctgacagcctggctggccctgctgcaggtgctgcagggcaatgtgctggccgtgtacctgctgtgcctggccctgtgtgagctgctgtacacaggcaccctgcccctgtgggtgatctacatccggaaccagcaccgctggaccctgggcctgctggcctgcaaggtgacagcctacatcttcttctgcaacatctacgtgtccatcctcttcctgtgctgcatcagctgtgacagatttgtggccgtggtgtatgccctggagagccggggcagaagaagaagaagaacagccatcctgatcagcgcctgcatcttcatcctggtgggcatcgtgcactaccctgtgttccagacagaggacaaggagacctgctttgacatgctgcagatggacagcagaattgctggctactactatgcccgcttcaccgtgggctttgccatccccctgagcatcatcgccttcaccaaccaccgcatcttccgcagcatcaagcagagcatgggcctgtctgctgcccagaaggccaaggtgaagcacagcgccatcgctgtggtggtgatcttcctggtgtgctttgccccctaccacctggtgctgctggtgaaggctgctgccttctcctactacagaggagacagaaatgccatgtgtggcctggaggagcggctgtacacagcctctgtggtgttcctgtgcctgagcacagtgaatggagtggccgaccccatcatctacgtgctggccacagaccacagccggcaggaggtgagccgcatccacaagggctggaaggagtggagcatgaagacagatgtgacccggctgacccacagccgggacacagaggagctgcagagccctgtggccctggccgaccactacaccttcagcaggcctgtgcaccccccaggcagcccctgcccagccaagaggctcatcgaggagagctgctag

SEQ ID NO: 99042 - DNA, 33 bp, Artificial Sequence
  derived and/or modified sequence
atgtgccccatgctgctgaagaatggctactag

SEQ ID NO: 99043 - DNA, 1143 bp, Artificial Sequence
  derived and/or modified sequence
atgtgccccatgctgctgaagaacggctacaacggcaacgccaccccagtcactacaacagcaccatgggccagcctgggactgtccgccaaaacctgcaacaatgtctcctttgaggaaagccggattgtcctagtggtcgtgtatagcgctgtgtgtacgctcggagtgccagccaactgtctaaccgcttggttggccctgttgcaggtcctgcagggcaacgtgttagcagtgtatttgctatgcctggctctctgtgagctcttgtataccgggacattaccactgtgggtaatttacataaggaaccagcataggtggacacttggcttgcttgcctgcaaagtgaccgcctacatttttttttgcaatatctatgtgtcgatactattcctctgctgtatttcttgtgaccggttcgtcgccgttgtgtatgccctcgagtcccgcgggcgtaggagacgtcggacagctatcctcatcagtgcctgtatttttatcttggtgggcatcgtgcattatccagttttccagacagaagacaaagaaacttgttttgatatgctgcagatggactcacggatcgccggatactattacgcccgcttcacagtgggctttgcgattccgcttagcatcatcgcatttacaaaccatcgcatctttagatcgatcaagcagagcatgggtctatcagctgcccaaaaagctaaggttaaacacagcgccatagcagtagtagtaatctttctggtatgttttgccccataccatctggtgctgttggtgaaggccgcagcattctcctactacagaggcgatcggaatgctatgtgcgggttagaagagcgtctgtataccgcttccgtggtatttctgtgcctgtcaaccgtcaatggggtggccgatcccattatatatgtcctggctactgaccattcccgacaggaagtgtcccgcattcataaagggtggaaggaatggtccatgaagaccgatgtgacgaggctgacacacagccgggatactgaagagcttcagtcacccgtcgccctggccgaccactacacctttagtcgtccagtgcatccacccgggagcccttgccccgctaaaagacttatcgaggagtcttgttag

SEQ ID NO: 99044 - DNA, 1143 bp, Artificial Sequence
  derived and/or modified sequence
atgtgccccatgctgctgaagaacggctacaacggcaacgccacccctgtgaccacaaccgctccatgggcctctctggggttatccgccaaaacctgcaacaatgtttcctttgaagagtcgcgaatagtgttggtggtcgtctacagtgctgtgtgcactcttggtgttcccgcaaattgtctcacagcatggctggccctccttcaggtgcttcagggaaacgttttggccgtctacctcctgtgtttggcgctgtgtgagctcctgtataccggcaccttaccgctctgggtcatctatattaggaatcagcacagatggacactgggactgctggcctgcaaagtaacggcctacatcttcttttgcaacatatacgtgtccatcttgttcctgtgttgcatctcatgtgacaggttcgtcgcggttgtgtatgctttagagagtcgcggccgcagacggagaaggacggccattcttatctctgcttgcatctttattctggtggggatcgtccattacccggtgttccagacagaagataaagagacctgctttgatatgcttcagatggactcccgaatagccggatactactacgcaaggtttactgtcgggtttgcgatccccctgagcatcattgcctttactaatcacaggatttttcgcagcatcaagcagtctatgggtctctcagccgcccagaaagctaaggtcaaacattccgcaatcgccgttgttgtgatattcctggtttgcttcgccccatatcatctggtcctcctggtgaaggccgccgccttcagctattatcgcggggacagaaacgccatgtgcggactcgaagagaggttgtacactgcatccgtggtctttctctgcctatccacggtgaacggcgtggctgatcccataatctacgtgctcgcaaccgaccacagccgtcaagaggtgtcccgaatccacaagggttggaaggagtggtcaatgaaaacagacgtgacaagactgacgcacagtagagacaccgaggagttgcagtctcccgtggccctggccgaccactacaccttctctcgacccgttcatcctccaggttccccatgccctgccaaaagactcatcgaggagagttgttag

SEQ ID NO: 99045 - DNA, 1143 bp, Artificial Sequence
  derived and/or modified sequence
atgtgtccaatgctgctgaaaaacggctataacgggaacgccacaccagtcaccaccaccgccccatgggcatctctgggcttgagcgctaagacctgtaacaatgtgagcttcgaagagagcagaatcgttttggtggttgtgtattctgcagtgtgtactctgggcgtgcccgctaactgccttaccgcatggctggccctactccaggttttgcagggaaatgtacttgccgtttacctgttgtgcctggccctatgcgagctgttgtacactggaaccctgcctctgtgggtgatttacattagaaaccagcatagatggactttaggactgctggcgtgtaaggtcacagcctacatttttttctgcaacatttacgtcagtatcctgttcctctgctgtatctcttgcgaccgcttcgtcgcagtggtgtatgctcttgaatctcggggtcgtagaagaaggagaactgccattctgatatcagcctgcatcttcattctggtaggcattgtgcactatccagtgttccagaccgaggacaaggaaacctgtttcgacatgctccagatggatagccgcatcgccggttattactatgcaaggttcaccgtgggatttgcaattcctctatcaatcatagcattcaccaaccacaggatctttcggtccataaagcagagcatgggtctgtcggccgcacaaaaggctaaggttaaacattctgctatcgccgtggttgtcatattcctcgtgtgttttgcaccataccacctggtgctgttagttaaggctgccgcattctcttactatagaggagacagaaatgcaatgtgtggtcttgaggaaaggctgtacaccgctagcgtggtattcctatgcctctccactgttaacggggtcgccgaccccattatctacgtactcgcaaccgatcacagcaggcaggaagtgagcaggatccacaaagggtggaaggagtggtccatgaagactgatgtgacgcggttaacacactcacgagacacagaggagcttcagtctcctgtggcactggcggatcactataccttttccagacctgttcaccctcctgggagcccctgccctgcgaaacgactcattgaggagagctgttag

SEQ ID NO: 99046 - DNA, 1143 bp, Artificial Sequence
  derived and/or modified sequence
atgtgtcctatgctgttgaagaacggatacaacggaaacgccaccccagtgacaacaacggctccgtgggcctctctggggctgagcgcgaagacctgtaacaatgttagctttgaagagagtcgcatcgtattagtggtggtttatagcgcggtatgcacgttgggagtgcctgctaactgcctgaccgcttggttagcactgctgcaggtgttgcagggaaacgtccttgccgtctatctcctgtgcctggcactttgcgaactgctgtacacaggaactctacctctgtgggtcatctatatccggaatcaacataggtggactctgggattgctggcttgtaaagttacagcttatatctttttctgcaatatttacgtcagtatactttttctctgttgtatcagctgcgacagattcgtagcagtggtctatgcccttgagagtcgaggaaggaggcggcgtaggactgccatactgattagcgcctgcatctttatactggtcggcatagtgcattatccagtcttccagacagaagacaaggaaacatgctttgatatgttacagatggattcacgtattgctgggtattattacgctcggttcacagtgggatttgccatccctctgtcaatcattgcatttaccaaccatagaatttttcgtagcatcaaacagtcaatgggcttgagcgccgcacagaaggccaaagtcaaacatagcgcaattgctgttgtagtgatctttcttgtgtgttttgctccctaccacctggtcttgctggttaaggccgcagcattttcatattatcggggtgataggaatgctatgtgcggtctggaggaacgcttatacacagcctcagtcgtttttctctgtcttagcactgtgaatggcgtcgcggatcctattatctacgtgctggcaaccgatcactctcgccaagaggtgtctcggatccataagggatggaaagagtggtcaatgaaaacagacgttactagactgacacactctcgagacactgaggagctgcaatctcctgtggccttggccgaccactatacattctcccgccctgtacaccccccaggttcaccatgtccagcaaagcggctgattgaggaatcctgctag

SEQ ID NO: 99047 - DNA, 33 bp, Artificial Sequence
  derived and/or modified sequence
atgtgtcccatgctgctcaagaacggctattag

SEQ ID NO: 99048 - DNA, 1143 bp, Artificial Sequence
  derived and/or modified sequence
atgtgccccatgctgctgaagaacggctacaacggcaacgccacccccgtgaccaccaccgccccctgggccagcctgggcctgagcgccaagacctgcaacaacgtgagcttcgaggagagcagaatcgtgctggtggtggtgtacagcgccgtgtgcaccctgggcgtgcccgccaactgcctgaccgcctggctggccctgctgcaggtgctgcagggcaacgtgctggccgtgtacctgctgtgcctggccctgtgcgagctgctgtacaccggcaccctgcccctgtgggtgatctacatcagaaaccagcacagatggaccctgggcctgctggcctgcaaggtgaccgcctacatcttcttctgcaacatctacgtgagcatcctgttcctgtgctgcatcagctgcgacagattcgtggccgtggtgtacgccctggagagcagaggcagaagaagaagaagaaccgccatcctgatcagcgcctgcatcttcatcctggtgggcatcgtgcactaccccgtgttccagaccgaggacaaggagacctgcttcgacatgctgcagatggacagcagaatcgccggctactactacgccagattcaccgtgggcttcgccatccccctgagcatcatcgccttcaccaaccacagaatcttcagaagcatcaagcagagcatgggcctgagcgccgcccagaaggccaaggtgaagcacagcgccatcgccgtggtggtgatcttcctggtgtgcttcgccccctaccacctggtgctgctggtgaaggccgccgccttcagctactacagaggcgacagaaacgccatgtgcggcctggaggagagactgtacaccgccagcgtggtgttcctgtgcctgagcaccgtgaacggcgtggccgaccccatcatctacgtgctggccaccgaccacagcagacaggaggtgagcagaatccacaagggctggaaggagtggagcatgaagaccgacgtgaccagactgacccacagcagagacaccgaggagctgcagagccccgtggccctggccgaccactacaccttcagcagacccgtgcacccccccggcagcccctgccccgccaagagactgatcgaggagagctgctag

SEQ ID NO: 99049 - DNA, 33 bp, Artificial Sequence
  derived and/or modified sequence
atgtgccccatgctgctgaagaacggctactag

SEQ ID NO: 99050 - protein, 371 aa, Artificial Sequence
  derived and/or modified sequence
MPGNATPVTTTAPWASLGLSAKTCNNVSFEESRIVLVVVYSAVCTLGVPANCLTAWLALLQVLQGNVLAVYLLCLALCELLYTGTLPLWVIYIRNQHRWTLGLLACKVTAYIFFCNIYVSILFLCCISCDRFVAVVYALESRGRRRRRTAILISACIFILVGIVHYPVFQTEDKETCFDMLQMDSRIAGYYYARFTVGFAIPLSIIAFTNHRIFRSIKQSMGLSAAQKAKVKHSAIAVVVIFLVCFAPYHLVLLVKAAAFSYYRGDRNAMCGLEERLYTASVVFLCLSTVNGVADPIIYVLATDHSRQEVSRIHKGWKEWSMKTDVTRLTHSRDTEELQSPVALADHYTFSRPVHPPGSPCPAKRLIEESC

SEQ ID NO: 99051 - DNA, 2887 bp, Artificial Sequence
  derived and/or modified sequence
acttcctgaaacctcagctaggactgcagggaggggtgcgaggctagccacgcaggcggggccctgggtcattttaaactctcagagtgaacgtcttgataggaccgacaagacgcatgacatgtacttagaaagcttatcttagagccacactgagattggaacccgcaaaatatgccaggaaacgccaccccagtgaccaccactgccccgtgggcctccctgggcctctccgccaagacctgcaacaacgtgtccttcgaagagagcaggatagtcctggtcgtggtgtacagcgcggtgtgcacgctgggggtgccggccaactgcctgactgcgtggctggcgctgctgcaggtactgcagggcaacgtgctggccgtctacctgctctgcctggcactctgcgagctgctgtacacaggcacgctgccactctgggtcatctatatccgcaaccagcaccgctggaccctaggcctgctggcctgcaaggtgaccgcctacatcttcttctgcaacatctacgtcagcatcctcttcctgtgctgcatctcctgcgaccgcttcgtggccgtggtgtacgcgctggagagtcggggccgccgccgccggaggaccgccatcctcatctccgcctgcatcttcatcctcgtcgggatcgttcactacccggtgttccagacggaagacaaggagacctgctttgacatgctgcagatggacagcaggattgccgggtactactacgccaggttcaccgttggctttgccatccctctctccatcatcgccttcaccaaccaccggattttcaggagcatcaagcagagcatgggcttaagcgctgcccagaaggccaaggtgaagcactcggccatcgcggtggttgtcatcttcctagtctgcttcgccccgtaccacctggttctcctcgtcaaagccgctgccttttcctactacagaggagacaggaacgccatgtgcggcttggaggaaaggctgtacacagcctctgtggtgtttctgtgcctgtccacggtgaacggcgtggctgaccccattatctacgtgctggccacggaccattcccgccaagaagtgtccagaatccataaggggtggaaagagtggtccatgaagacagacgtcaccaggctcacccacagcagggacaccgaggagctgcagtcgcccgtggcccttgcagaccactacaccttctccaggcccgtgcacccaccagggtcaccatgccctgcaaagaggctgattgaggagtcctgctgagcccactgtgtggcagggggatggcaggttgggggtcctggggccagcaatgtggttcctgtgcactgagcccaccagccacagtgcccatgtcccctctggaagacaaactaccaatttctcgttcctgaagccactccctccgtgaccactggccccaggctttcccacatggaaggtggctgcatgccaaggggaggagcgacacctccaggcttccgggagcccagagagcatgtggcaggcagtggggcctcttcatcagcagcctgcctggctggctcccttggctgtgggcaggtagcacgcctgctggcagaggtacctggtggctgccctgttcgcatcagtggcgatgactttatttgcggagcatttctgcaagcgttgcctggatgcggtggtgcattgtgggccctctgggctcctgcctcagaatgtcagtgagcaccatgctggaggtcacccagcactgtggcagcgcccaggagggcatagggcagcctaccacctccaagggggcaggcgccctcatctggggttgggtctgtgctgagctggagggcctctagggaaccgtggggcagggtggccagctgctggctcccagagcgcagcccaggcgtcctcaacggggagccccaaatgtccacgcccagaacaacagttggcaggacaggtgtgacacagccacagcagaggcaaggggtgccaggagtccccagcggcatcctcggggagatgctggtgaggggtccgtacagggtggggtccccacccctagccccttactgaggggggagtgcagcagttggcctgcttgtctggcggagaaagccagctccctgcaccctcggggctgagtcagatctgggtctgccgcaaaggccttgcctagaccaggtcacactgatgccctggtttccctatctgtaaaatggggccaatgacacctacctcactgggtcaccatcgagatcaatcctcctccctgccccgacacctcgggcacatcgcatgcactcagagcacagagccgggcagacgcagcacctgcatggggagcccagtgcccggcacagcacaggggcttccagggaggccgcgcagggccgtggggctgagccacgctctcgttttgtcaggcagctatgcagttgctcttccttgtttttgttttgtttttgtttttgtttttaatatttatttttttagagacagggccttgctctgttgcctgggctggagaacagtggcaccatcatagctcactgcagcctcaaactcctgggctcaagcgatcctccccgctcagcctcctgagtagctgggactacaggtgtgcaccaccacacccagccaaaacagccatcctccccttgagagtcatcagaaaaatacattaggaaaatgtgtttagaaataaaagcacaaggcagggcagtgctcacgcctgtcatcccagcactttgggaggccgagacgggaggatcagttgaggtcaggagtttgagaccagcctcggcaacatggcaaaatcttgtctcttttttttggtattaaaaaaatcataaaaataaaagaaataatgcaattt

SEQ ID NO: 99052 - DNA, 1116 bp, Artificial Sequence
  derived and/or modified sequence
atgccaggtaacgccactccggtaacaaccaccgcaccatgggcaagcctgggcttgtctgccaaaacgtgtaacaatgtgtccttcgaagagtccagaatagtgcttgtggtcgtctactcagcagtctgtaccctcggcgtcccagcaaattgccttaccgcatggctcgcccttctgcaggtgttgcagggcaacgtgttggcagtctatctgttatgcttagccctgtgtgaactcttatacacgggaaccctgccactttgggtcatatacatcagaaatcaacacaggtggacattgggtctcctggcttgtaaggtgacagcttacatctttttttgtaacatctatgtatccattttgttcctttgttgcatttcttgtgatcgcttcgtcgccgtggtttacgctctcgagtcccgtggcaggcgacggcgacgcaccgctatcctgatctctgcttgcatcttcatcctggtcggcatcgtccattatcctgtatttcagacggaagacaaagagacatgctttgacatgctgcagatggactctcggattgctggatattactatgctaggtttacggttgggtttgccatccccctcagcatcatagcttttaccaaccaccggatctttagatccatcaagcagtctatgggtctttcggccgctcagaaagccaaggtgaaacactccgccatcgctgtggtggtcatctttctggtctgtttcgctccataccacctggtgcttctcgtgaaggcggcagcgttttcttactatcggggtgatcgaaatgccatgtgtggtctggaagagagactttacactgcatctgttgtgtttctctgtctatccactgttaacggtgtggcggacccaataatttacgtgttagctactgaccattctagacaggaggtgagtcggatccacaagggctggaaggagtggtccatgaagactgacgtcacaagattaacccactcacgtgacacggaggagctgcagtcccccgtagctctggcggaccactatacattctctagacccgtgcaccctccaggctcgccttgtccggcaaagcgcctaattgaggaaagctgttag

SEQ ID NO: 99053 - DNA, 1116 bp, Artificial Sequence
  derived and/or modified sequence
atgcctggaaatgccacccctgtgaccaccacagccccctgggccagcctgggcctgagcgccaagacctgcaacaacgtgtcctttgaggagagccgcatcgtgctggtggtggtgtacagcgctgtgtgcaccctgggcgtgcctgccaactgcctgacagcctggctggccctgctgcaggtgctgcagggcaatgtgctggccgtgtacctgctgtgcctggccctgtgtgagctgctgtacacaggcaccctgcccctgtgggtgatctacatccggaaccagcaccgctggaccctgggcctgctggcctgcaaggtgacagcctacatcttcttctgcaacatctacgtgtccatcctcttcctgtgctgcatcagctgtgacagatttgtggccgtggtgtatgccctggagagccggggcagaagaagaagaagaacagccatcctgatcagcgcctgcatcttcatcctggtgggcatcgtgcactaccctgtgttccagacagaggacaaggagacctgctttgacatgctgcagatggacagcagaattgctggctactactatgcccgcttcaccgtgggctttgccatccccctgagcatcatcgccttcaccaaccaccgcatcttccgcagcatcaagcagagcatgggcctgtctgctgcccagaaggccaaggtgaagcacagcgccatcgctgtggtggtgatcttcctggtgtgctttgccccctaccacctggtgctgctggtgaaggccgccgccttctcctactacagaggagacagaaatgccatgtgtggcctggaggagcggctgtacacagcctctgtggtgttcctgtgcctgagcacagtgaatggagtggccgaccccatcatctacgtgctggccacagaccacagccggcaggaggtgagccgcatccacaagggctggaaggagtggagcatgaagacagatgtgacccggctgacccacagccgggacacagaggagctgcagagccctgtggccctggccgaccactacaccttcagcaggcctgtgcaccccccaggcagcccctgcccagccaagaggctgattgaggagagctgctag

SEQ ID NO: 99054 - DNA, 1116 bp, Artificial Sequence
  derived and/or modified sequence
atgcccggcaacgccacccccgtgaccaccaccgccccctgggcctctctcggcctgagcgctaaaacatgcaataacgtgtcatttgaagaaagccgtatagtgcttgttgtagtgtactcagccgtgtgtacccttggcgttcctgcaaattgccttactgcctggctggccctgttgcaggtcttgcaggggaatgtacttgcggtctacttattgtgcctggctctttgtgaactgctgtacacaggcactctgcctctctgggtgatttacatcagaaaccagcatcggtggacactaggtctacttgcttgcaaggtgacagcttatatctttttctgtaacatatatgtgtccattctgttcctatgctgtatatcatgcgatcggtttgtcgccgttgtttacgccttagaatctcgaggacgaagaagacggcgaacggctatcttaatttccgcctgtatctttatccttgtcggcatagttcactatcccgtgtttcaaactgaggataaagaaacctgcttcgacatgttacagatggattcacggatagctggctactactatgcacggttcaccgtgggattcgcgattcccctttcaatcatcgccttcaccaatcaccgcatctttcggtccatcaagcagtccatgggcctgtctgctgcccagaaggctaaggtgaagcactcagcgatcgccgtggtggtcatctttctggtctgtttcgcgccttaccacctcgtactcttggttaaggctgccgcattttcatattatcgtggagaccggaacgctatgtgcggcctcgaggagcggctttataccgctagcgtggtgtttctgtgcctgagtacagtcaatggagtggcagatcctatcatctatgtactggccacagatcatagccggcaggaagtgtcgcgcattcacaaaggctggaaggagtggagtatgaaaacggatgtcacacgccttacgcacagcagagacacagaggaacttcaatccccggttgccctggccgatcactacactttttcgcgcccggttcatccaccaggatctccatgccctgctaaaaggctgatcgaagagagctgctag

SEQ ID NO: 99055 - DNA, 1116 bp, Artificial Sequence
  derived and/or modified sequence
atgcccggtaacgctacacccgtgacaaccactgccccatgggcttcattaggtctgtccgctaaaacgtgcaacaacgtatcgttcgaagagagtcggatcgtcctggtggtggtctattcggccgtctgcacgcttggagtgccggcaaattgtcttacagcctggctggcccttctccaggtgttacaggggaacgttctcgctgtatatctgctgtgcctcgccttatgcgaactcctatatacaggaaccttgccactgtgggttatttatattcggaaccaacaccggtggaccctgggccttttagcctgtaaagtgacagcatacatatttttttgtaacatttacgtgtcaatcttgttcctatgctgcatctcctgtgaccggttcgtggccgtggtttacgcccttgagagcagaggcagacgccgacgccgtacagccattttaatctctgcttgcatcttcatcctcgtaggtattgtgcactatccagtctttcagactgaggacaaagagacgtgttttgatatgttgcagatggacagcagaattgccggatattactacgcgcgtttcacagtggggtttgcaatccccctgagcatcatcgcctttacaaatcaccgcattttccgtagcattaaacagagcatggggctctcagctgcccagaaagctaaagtgaagcactcggcaatcgctgtcgtggtgatcttccttgtgtgtttcgcaccatatcacttggtccttttagtgaaagcagccgctttttcctactacagaggagaccgaaatgccatgtgtgggcttgaggaaagattatatacagcgagtgtcgtgttcctgtgcctgtccacggtgaatggggtcgcagatcctattatttacgtgttggccaccgaccatagtagacaagaagtgagtaggatccataaggggtggaaggagtggtcgatgaaaacagacgtcactcggctgacacacagccgggatacagaagaacttcagagcccagtggccttggccgatcactatacattttctcggcctgtacaccccccaggctccccttgtccagccaagagacttattgaggagagctgctag

SEQ ID NO: 99056 - DNA, 1116 bp, Artificial Sequence
  derived and/or modified sequence
atgcccggcaacgccacccccgtgaccaccaccgccccctgggccagcctgggcctgagcgccaagacctgcaacaacgtgagcttcgaggagagcagaatcgtgctggtggtggtgtacagcgccgtgtgcaccctgggcgtgcccgccaactgcctgaccgcctggctggccctgctgcaggtgctgcagggcaacgtgctggccgtgtacctgctgtgcctggccctgtgcgagctgctgtacaccggcaccctgcccctgtgggtgatctacatcagaaaccagcacagatggaccctgggcctgctggcctgcaaggtgaccgcctacatcttcttctgcaacatctacgtgagcatcctgttcctgtgctgcatcagctgcgacagattcgtggccgtggtgtacgccctggagagcagaggcagaagaagaagaagaaccgccatcctgatcagcgcctgcatcttcatcctggtgggcatcgtgcactaccccgtgttccagaccgaggacaaggagacctgcttcgacatgctgcagatggacagcagaatcgccggctactactacgccagattcaccgtgggcttcgccatccccctgagcatcatcgccttcaccaaccacagaatcttcagaagcatcaagcagagcatgggcctgagcgccgcccagaaggccaaggtgaagcacagcgccatcgccgtggtggtgatcttcctggtgtgcttcgccccctaccacctggtgctgctggtgaaggccgccgccttcagctactacagaggcgacagaaacgccatgtgcggcctggaggagagactgtacaccgccagcgtggtgttcctgtgcctgagcaccgtgaacggcgtggccgaccccatcatctacgtgctggccaccgaccacagcagacaggaggtgagcagaatccacaagggctggaaggagtggagcatgaagaccgacgtgaccagactgacccacagcagagacaccgaggagctgcagagccccgtggccctggccgaccactacaccttcagcagacccgtgcacccccccggcagcccctgccccgccaagagactgatcgaggagagctgctag

SEQ ID NO: 99057 - protein, 223 aa, Artificial Sequence
  derived and/or modified sequence
MNGDDAFARRPTVGAQIPEKIQKAFDDIAKYFSKEEWEKMKASEKIFYVYMKRKYEAMTKLGFKATLPPFMCNKRAEDFQGNDLDNDPNRGNQVERPQMTFGRLQGISPKIMPKKPAEEGNDSEEVPEASGPQNDGKELCPPGKPTTSEKIHERSGNREAQEKEERRGTAHRWSSQNTHNIGRFSLSTSMGAVHGTPKTITHNRDPKGGNMPGPTDCVRENSW

SEQ ID NO: 99058 - DNA, 1466 bp, Artificial Sequence
  derived and/or modified sequence
gcatgctctgactttctctctctttcgattcttccatactcagagtacgcacggtctgattttctctttggattcttccaaaatcagagtcagactgctcccggtgccatgaacggagacgacgcctttgcaaggagacccacggttggtgctcaaataccagagaagatccaaaaggccttcgatgatattgccaaatacttctctaaggaagagtgggaaaagatgaaagcctcggagaaaatcttctatgtgtatatgaagagaaagtatgaggctatgactaaactaggtttcaaggccaccctcccacctttcatgtgtaataaacgggccgaagacttccaggggaatgatttggataatgaccctaaccgtgggaatcaggttgaacgtcctcagatgactttcggcaggctccagggaatctccccgaagatcatgcccaagaagccagcagaggaaggaaatgattcggaggaagtgccagaagcatctggcccacaaaatgatgggaaagagctgtgccccccgggaaaaccaactacctctgagaagattcacgagagatctggaaatagggaggcccaagaaaaggaagagagacgcggaacagctcatcggtggagcagtcagaacacacacaacattggtcgattcagtttgtcaacttctatgggtgcagttcatggtacccccaaaacaattacacacaacagggacccaaaaggggggaacatgcctggacccacagactgcgtgagagaaaacagctggtgatttatgaagagatcagcgaccctgaggaagatgacgagtaactcccctcagggatacgacacatgcccatgatgagaagcagaacgtggtgacctttcacgaacatgggcatggctgcggacccctcgtcatcaggtgcatagcaagtgaaagcaagtgttcacaacagtgaaaagttgagcgtcatttttcttagtgtgccaagagttcgatgttagcgtttacgttgtattttcttacactgtgtcattctgttagatactaacattttcattgatgagcaagacatacttaatgcatattttggtttgtgtatccatgcacctaccttagaaaacaagtattgtcggttacctctgcatggaacagcattaccctcctctctccccagatgtgactactgagggcagttctgagtgtttaatttcagattttttcctctgcatttacacacacacgcacacaaaccacaccacacacacacacacacacacacacacacacacacacacacaccaagtaccagtataagcatctgccatctgcttttcccattgccatgcgtcctggtcaagctcccctcactctgtttcctggtcagcatgtactcccctcatccgattcccctgtagcagtcactgacagttaataaacctttgcaaacgttcaaaaaaaaaaaaaaaaaa

SEQ ID NO: 99059 - DNA, 672 bp, Artificial Sequence
  derived and/or modified sequence
atgaacggcgatgatgcattcgcccgccgaccaaccgtcggtgcacaaatcccggagaagatccagaaggccttcgacgacattgccaaatatttcagcaaagaagaatgggagaagatgaaggctagcgaaaaaatcttctatgtttatatgaagaggaagtacgaggccatgacgaaactgggctttaaggcaacgctacccccctttatgtgcaataaacgcgccgaggactttcagggcaatgaccttgacaatgacccaaatagaggaaaccaggtcgagcggccgcagatgacctttggaagactccaaggtatcagccccaaaataatgcccaagaaacccgccgaagaggggaatgattccgaggaggttcctgaggcaagtggccctcaaaatgatggaaaagaactctgccccccaggaaaaccaacaacatccgagaagatccacgaaaggtccgggaatcgggaagcccaagagaaggaggagcgccgaggcacggcccatcgttggtcaagccagaacactcacaacatcggcaggttctctctgagtacaagcatgggggctgtgcacggcaccccgaaaactataacacataatagggaccccaaaggcggtaacatgccaggtccaaccgattgtgtgagggaaaacagctggtag

SEQ ID NO: 99060 - DNA, 672 bp, Artificial Sequence
  derived and/or modified sequence
atgaatggagatgatgcctttgcccggcggcccaccgtgggcgcccagatccctgagaagatccagaaggcctttgatgacatcgccaagtacttcagcaaggaggagtgggagaagatgaaggccagcgagaagatcttctacgtgtacatgaagaggaaatatgaggccatgaccaagctgggcttcaaggccaccctgccccccttcatgtgcaacaagagagctgaggacttccagggcaatgacctggacaatgaccccaacagaggcaaccaggtggagcggccccagatgaccttcggccgcctgcagggcatcagccccaagatcatgcccaagaagccagctgaggagggcaatgattctgaggaggtgcctgaggccagcggcccccagaatgatggcaaggagctgtgccccccaggcaagcccaccaccagcgagaagatccacgagaggagcggcaaccgggaggcccaggagaaggaggagcggcggggcacagcccaccgctggagcagccagaacacccacaacatcggccgcttcagcctgagcacctccatgggcgctgtgcacggcacccccaagaccatcacccacaacagagaccccaagggcggcaacatgcctggccccacagactgtgtgcgggagaacagctggtag

SEQ ID NO: 99061 - DNA, 672 bp, Artificial Sequence
  derived and/or modified sequence
atgaacggcgacgacgccttcgcccggcggcccaccgtgggcgcccaaattccagaaaaaatccagaaagcctttgacgatatcgcaaaatactttagcaaggaggagtgggagaaaatgaaggcgagtgaaaaaatcttttacgtttatatgaagagaaaatatgaggctatgaccaaacttggatttaaggccacattgcctccctttatgtgtaacaagcgtgctgaggatttccaggggaatgatcttgacaacgatcccaataggggcaatcaagtggaacggcctcagatgaccttcggaaggcttcagggcattagcccaaagatcatgccgaaaaagccagcagaggaaggcaacgactccgaagaagtcccagaagcttccggtccccagaatgacggcaaggagctttgtcctcctgggaagcccaccacgagcgagaaaattcacgagaggagcggcaaccgtgaagctcaagaaaaggaagaacggcgagggaccgcccacaggtggtctagtcagaatacacataatataggtcgattttccctttctaccagcatgggggctgtgcatggtacaccaaaaaccattacacacaaccgggatcctaaggggggtaacatgcccggtcccacggactgcgtcagagagaactcatggtag

SEQ ID NO: 99062 - DNA, 1414 bp, Artificial Sequence
  derived and/or modified sequence
ctcagagtacgcacggtctgattttctctttggattcttccaaaatcagagtcagactgctcccggtgccatgaacggagacgacgcctttgcaaggagacccacggttggtgctcaaataccagagaagatccaaaaggccttcgatgatattgccaaatacttctctaaggaagagtgggaaaagatgaaagcctcggagaaaatcttctatgtgtatatgaagagaaagtatgaggctatgactaaactaggtttcaaggccaccctcccacctttcatgtgtaataaacgggccgaagacttccaggggaatgatttggataatgaccctaaccgtgggaatcaggttgaacgtcctcagatgactttcggcaggctccagggaatctccccgaagatcatgcccaagaagccagcagaggaaggaaatgattcggaggaagtgccagaagcatctggcccacaaaatgatgggaaagagctgtgccccccgggaaaaccaactacctctgagaagattcacgagagatctggaaatagggaggcccaagaaaaggaagagagacgcggaacagctcatcggtggagcagtcagaacacacacaacattggtcgattcagtttgtcaacttctatgggtgcagttcatggtacccccaaaacaattacacacaacagggacccaaaaggggggaacatgcctggacccacagactgcgtgagagaaaacagctggtgatttatgaagagatcagcgaccctgaggaagatgacgagtaactcccctcagggatacgacacatgcccatgatgagaagcagaacgtggtgacctttcacgaacatgggcatggctgcggacccctcgtcatcaggtgcatagcaagtgaaagcaagtgttcacaacagtgaaaagttgagcgtcatttttcttagtgtgccaagagttcgatgttagcgtttacgttgtattttcttacactgtgtcattctgttagatactaacattttcattgatgagcaagacatacttaatgcatattttggtttgtgtatccatgcacctaccttagaaaacaagtattgtcggttacctctgcatggaacagcattaccctcctctctccccagatgtgactactgagggcagttctgagtgtttaatttcagattttttcctctgcatttacacacacacgcacacaaaccacaccacacacacacacacacacacacacacacacacacacacacacacaccaagtaccagtataagcatctgccatctgcttttcccattgccatgcgtcctggtcaagctcccctcactctgtttcctggtcagcatgtactcccctcatccgattcccctgtagcagtcactgacagttaataaacctttgcaaacgttc

SEQ ID NO: 99063 - DNA, 672 bp, Artificial Sequence
  derived and/or modified sequence
atgaacggggatgatgcatttgctaggagacctaccgttggggcacagataccagaaaagattcagaaagcgtttgacgatatcgccaaatattttagcaaggaggagtgggaaaagatgaaggcaagtgagaaaatcttctacgtgtacatgaaacggaagtacgaagcaatgactaaactgggcttcaaggctaccctcccaccttttatgtgcaataagcgcgctgaggatttccagggaaatgaccttgacaatgatccgaaccggggaaaccaagtggaaagacctcaaatgacatttggtaggctgcaggggatctctcctaagatcatgcccaaaaagcctgctgaagagggcaatgatagcgaagaagtcccagaagccagcggaccccagaatgacggcaaagaactgtgtccaccagggaaacccaccacgtcagagaaaatccatgaacgaagtggcaacagggaagcccaagagaaggaagagaggcgtggcactgctcaccggtggtcctcacagaacacccacaacataggacggtttagcctgtctacttccatgggcgctgtgcatggcaccccgaaaactatcactcacaatcgcgatcccaaaggcggaaacatgccaggcccaacggactgtgtgcgggaaaacagctggtag

SEQ ID NO: 99064 - DNA, 672 bp, Artificial Sequence
  derived and/or modified sequence
atgaacggcgacgacgccttcgccagaagacccaccgtgggcgcccagatccccgagaagatccagaaggccttcgacgacatcgccaagtacttcagcaaggaggagtgggagaagatgaaggccagcgagaagatcttctacgtgtacatgaagagaaagtacgaggccatgaccaagctgggcttcaaggccaccctgccccccttcatgtgcaacaagagagccgaggacttccagggcaacgacctggacaacgaccccaacagaggcaaccaggtggagagaccccagatgaccttcggcagactgcagggcatcagccccaagatcatgcccaagaagcccgccgaggagggcaacgacagcgaggaggtgcccgaggccagcggcccccagaacgacggcaaggagctgtgcccccccggcaagcccaccaccagcgagaagatccacgagagaagcggcaacagagaggcccaggagaaggaggagagaagaggcaccgcccacagatggagcagccagaacacccacaacatcggcagattcagcctgagcaccagcatgggcgccgtgcacggcacccccaagaccatcacccacaacagagaccccaagggcggcaacatgcccggccccaccgactgcgtgagagagaacagctggtag

SEQ ID NO: 99065 - DNA, 672 bp, Artificial Sequence
  derived and/or modified sequence
atgaacggtgacgatgccttcgcaagacgcccaacagtgggggctcagatccccgaaaagatccaaaaagcctttgatgacatcgctaagtactttagtaaggaagagtgggaaaaaatgaaagcttcagaaaaaattttctatgtctatatgaaacgaaaatatgaggctatgacaaagctcggattcaaagccacacttccacctttcatgtgtaataaacgagccgaggatttccaagggaacgacctggacaatgatccaaatcggggaaaccaggtcgaaaggccgcagatgacgttcggcaggctgcagggcatttcgcccaagatcatgcctaagaaaccggccgaagaaggcaacgactcagaggaggtgcccgaagcctcagggccacaaaatgacggaaaagaactgtgtcctcctggtaagcccacaacatcggaaaaaatccatgaaagatcaggaaaccgcgaagctcaggagaaggaggaacgccggggcaccgcccatcgctggagttctcagaatacccataatatagggagatttagtctgagtacttctatgggcgcggtgcacggaacaccgaagaccattactcataaccgtgatcctaagggggggaatatgcctggacctaccgattgcgttagagagaattcgtggtag

SEQ ID NO: 99066 - DNA, 672 bp, Artificial Sequence
  derived and/or modified sequence
atgaacggcgacgacgccttcgcccggcggcccaccgtgggcgcccagatacccgagaaaatccagaaagcgtttgatgacatcgcgaagtacttctccaaggaagagtgggagaagatgaaagcttccgagaaaatcttttatgtgtatatgaaacgtaaatacgaggcaatgactaaactcgggtttaaagcaaccctccctccttttatgtgcaataaaagggcagaggacttccagggaaacgacctggacaatgatcccaatcgcggtaaccaagtcgagcggcctcagatgacgttcgggaggctgcaaggcatctctccaaagattatgcccaagaagcctgctgaggaagggaatgattcagaagaagttccagaggccagcggcccacagaatgatggcaaggagctctgcccgcctggaaagcccacaacatccgaaaaaatccacgagcgatccggcaatagggaagctcaggagaaggaggaacggcgcggtactgcacaccgctggtccagccagaacacgcacaatataggaaggttcagcctgtccaccagtatgggcgctgtccacggaactcctaagacgattacacataaccgcgatcccaaaggtggaaatatgcccgggcctaccgactgtgtgcgggagaacagctggtag

SEQ ID NO: 99067 - DNA, 672 bp, Artificial Sequence
  derived and/or modified sequence
atgaacggagacgacgccttcgctaggcgtcccactgtcggtgctcaaatacccgaaaagattcagaaagccttcgacgacattgcgaagtatttctccaaggaggagtgggagaagatgaaggcaagcgaaaaaattttctacgtctacatgaaaaggaagtacgaggccatgacaaagcttgggtttaaggccacccttccgcctttcatgtgtaacaaacgggctgaggactttcaaggcaatgacctggataatgatcctaacagagggaatcaggtggagcgaccccagatgactttcggtcgactccagggaattagccctaaaattatgccaaaaaagcctgcagaggagggaaacgatagcgaagaggttcctgaggcctccggcccacaaaatgatggcaaggagctctgccccccaggtaagcccacaacttccgaaaaaatccacgaaagatctggcaacagggaggcccaagaaaaggaagagcgacggggtactgcccatagatggtcctctcagaatacgcacaacatcggaaggttttcactttcaaccagcatgggcgctgttcacggcacacctaagacaatcactcacaaccgagaccccaagggtggaaatatgcctggtccgacagactgtgtgcgcgaaaattcctggtag

SEQ ID NO: 99068 - DNA, 1410 bp, Artificial Sequence
  derived and/or modified sequence
ctcagagtacgcacggtctgattttctctttggattcttccaaaatcagagtcagactgctcccggtgccatgaacggagacgacgcctttgcaaggagacccacggttggtgctcaaataccagagaagatccaaaaggccttcgatgatattgccaaatacttctctaaggaagagtgggaaaagatgaaagcctcggagaaaatcttctatgtgtatatgaagagaaagtatgaggctatgactaaactaggtttcaaggccaccctcccacctttcatgtgtaataaacgggccgaagacttccaggggaatgatttggataatgaccctaaccgtgggaatcaggttgaacgtcctcagatgactttcggcaggctccagggaatctccccgaagatcatgcccaagaagccagcagaggaaggaaatgattcggaggaagtgccagaagcatctggcccacaaaatgatgggaaagagctgtgccccccgggaaaaccaactacctctgagaagattcacgagagatctggaaatagggaggcccaagaaaaggaagagagacgcggaacagctcatcggtggagcagtcagaacacacacaacattggtcgattcagtttgtcaacttctatgggtgcagttcatggtacccccaaaacaattacacacaacagggacccaaaaggggggaacatgcctggacccacagactgcgtgagagaaaacagctggtgatttatgaagagatcagcgaccctgaggaagatgacgagtaactcccctcagggatacgacacatgcccatgatgagaagcagaacgtggtgacctttcacgaacatgggcatggctgcggacccctcgtcatcaggtgcatagcaagtgaaagcaagtgttcacaacagtgaaaagttgagcgtcatttttcttagtgtgccaagagttcgatgttagcgtttacgttgtattttcttacactgtgtcattctgttagatactaacattttcattgatgagcaagacatacttaatgcatattttggtttgtgtatccatgcacctaccttagaaaacaagtattgtcggttacctctgcatggaacagcattaccctcctctctccccagatgtgactactgagggcagttctgagtgtttaatttcagattttttcctctgcatttacacacacacgcacacaaaccacaccacacacacacacacacacacacacacacacacacacacacaccaagtaccagtataagcatctgccatctgcttttcccattgccatgcgtcctggtcaagctcccctcactctgtttcctggtcagcatgtactcccctcatccgattcccctgtagcagtcactgacagttaataaacctttgcaaacgttc

SEQ ID NO: 99069 - DNA, 800 bp, Artificial Sequence
  derived and/or modified sequence
ctctctctttcgattcttccatactcaagagtacgcacggtctgattttctctttggattcttccaaaatcagagtcagactactccctgtgccatgaacggagatgacacctttgcaaggagacccacggttggtgctcaaataccagagaagatacaaaaggccttcgatgatattgccaaatacttctctaaggaagagtgggaaaagatgaaagtctcggagaaaatcgtctatgtgtatatgaagagaaagtatgaggccatgactaaactaggtttcaaggccatcctcccatctttcatgcgtaataaacgggtcacagacttccaggggaatgattttgataatgaccctaaccgtgggaatcaggttcaacgtcctcagatgactttcggcaggctccagggaatcttcccgaagatcatgcccaagaagccagcagaggaaggaaatgtttcgaaggaagtgccagaagcatctggcccacaaaacgatgggaaacagctgtgccccccgggaaaaccaactacctctgagaagattaacatgatatctggtgtccttcagagatactgcaggttcggttccagaccactgcaataaagaaatagggaggcccaagaaaaggaagagagacgcggaacagctcatcggtggagcagtcagaagacacaaaacattaatcgattaagtttgtcatattctatgggtgcagttcctggtacccccaaaacaattacacacaacagggtgattatagtcaataataacttaattgtacttaaaaaaactaaaa

SEQ ID NO: 99070 - protein, 580 aa, Artificial Sequence
  derived and/or modified sequence
QCTAQQQLLGLSSGAGHHGAQLMLQNPPREQQVWGQWLSGGLCPHEPGLLFCEWLCECSFWDKLLTDDGNKWLYKNKDHGMLSAAASLGMILLWDVDGGLTQIDKYLYSSEDYIKSGALLACGIVNSGVRNECDPALALLSDYVLHNSNTMRLGSIFGLGLAYAGSNREDVLTLLLPVMGDSKSSMEVAGVTALACGMIAVGSCNGDVTSTILQTIMEKSETELKDTYARWLPLGLGLNHLGKGEAIEAILAALEVVSEPFRSFANTLVDVCAYAGSGNVLKVQQLLHICSEHFDSKEKEEDKDKKEKKDKDKKEAPADMGAHQGVAVLGPLLLWGRRLVQRWHYEPYHQLRYGEPTLRRAVPLALALISVSNPRLNILDTLSKFSHDADPEVSYNSIFAMGMVGSGTNNARLAAMLRQLAQYHAKDPNNLFMVRLAQGLTHLGKGTLTLCPYHSDRQLMSQVAVAGLLTVLVSFLDVRNIILGKSHYVLYGLVAAMQPRMLVTFDEELRPLPVSVRVGQAVDVVGQAGKPKTITGFQTHTTPVLLAHGERAELATEEFLPVTPILEGFVFGRTPIMISK

SEQ ID NO: 99071 - DNA, 1743 bp, Artificial Sequence
  derived and/or modified sequence
caatgtactgcccagcagcagctgttaggtctatcatcaggagcaggacatcatggagcgcagttaatgctccagaatcccccaagagagcagcaagtgtgggggcagtggctttccggagggctgtgcccccacgaaccgggactgctcttctgcgaatggctgtgcgagtgctccttttgggataagttactcaccgatgatggcaacaaatggttgtataagaacaaagaccacggaatgctgtcagcggcagcctctttgggcatgatcctgctctgggatgtggatggaggacttacacagatcgataagtacctctattctagcgaggattacatcaaaagtggagcactgctggcttgtggcattgttaactcaggggtgcgaaatgagtgtgatccggcattagctctcctgagcgattacgttctacacaactcaaacacaatgcgactcggatccatcttcggactgggacttgcctacgccgggtcaaaccgagaagacgtactgactttactgctgcccgtcatgggagatagcaaaagcagcatggaggtggccggggtcaccgccctggcttgtggtatgatagccgtagggtcttgtaacggtgacgtgacctcaactattctccagactattatggagaaaagtgaaactgagttaaaagacacgtacgcgagatggctgccactcggcctcggccttaaccatcttggaaaaggcgaagcaattgaggccattctggccgccctggaggtggtctccgaaccattccgcagctttgctaacacgttagtagacgtctgcgcatatgctggcagcgggaacgtcctgaaagttcaacagcttctgcatatctgcagcgaacactttgacagcaaggaaaaagaggaggacaaggacaagaaggagaagaaggacaaggataaaaaggaagctcccgccgacatgggagctcaccagggcgtggccgtccttggccccttactactgtgggggcgccgactggtgcagaggtggcactacgagccttaccatcagctgaggtacggcgagccgactctgaggagggccgtgcctttggccttggctttgatcagcgtaagcaatccaaggctcaatatcctggatacacttagcaaattctcacacgacgctgatcctgaagtctcgtacaactccatttttgccatggggatggtgggctcgggaacaaataacgcacgactcgccgccatgctccgtcaactggcgcaataccacgcgaaggatcccaacaacctgttcatggtccggttagcacagggtctcactcatctggggaaggggaccctcaccctgtgcccctatcactctgatcgtcagctgatgagccaagtcgccgtggccggattactcacagtgcttgtatcattcctggacgtcagaaacatcattctggggaagtctcattacgtactctacggcttggtagccgccatgcaaccccgaatgttagtgactttcgacgaggagctaagacctctgccagtgtcagtgcgggtagggcaggctgtggacgttgtagggcaggcaggtaaaccaaagactatcactgggtttcagacacacactactccggtgctcctggctcatggtgaaagggccgagttagcaacggaagaattcctaccagtgacaccaatcctggaagggtttgtttttggaaggacacctatcatgatctcaaagtag

SEQ ID NO: 99072 - DNA, 1743 bp, Artificial Sequence
  derived and/or modified sequence
cagtgcacagcccagcagcagctgctgggcctgagcagtggagctggccaccacggggcccagctgatgctgcagaaccccccccgggagcagcaggtgtggggccagtggctgagcggcggcctgtgcccccatgagcccggcctgctcttctgtgagtggctgtgtgaatgttccttctgggacaagctgctgacagatgatggcaacaagtggctgtacaagaacaaggaccacggcatgctgtctgctgctgccagcctgggcatgatcctgctgtgggatgtggatggcggcctgacccagattgacaagtacctgtacagcagcgaggactacatcaagagcggggccctgctggcctgtggcatcgtgaacagcggcgtgagaaatgaatgtgaccctgccctggccctgctgagtgactatgtgctgcacaacagcaacaccatgaggctgggcagcatcttcggcctgggcctggcctatgccggcagcaacagagaagatgtgctgaccctgctgctgcctgtgatgggagacagcaagagctccatggaggtggccggcgtgacagccctggcctgtggcatgattgctgtgggcagctgcaatggagatgtgaccagcaccatcctgcagaccatcatggagaagtcagaaacagagctgaaggacacctacgcccgctggctgcccctgggcctgggcctgaaccacctgggcaaaggagaggccatcgaggccatcctggccgccctggaggtggtgtctgagcccttccgcagctttgccaacaccctggtggatgtgtgtgcctatgccggcagcggaaatgtgctgaaggtgcagcagctgctgcacatctgcagcgagcactttgacagcaaggagaaggaggaggacaaggacaagaaggagaagaaggacaaggacaagaaggaggccccagctgacatgggcgcccaccagggcgtggccgtgctgggccccctgctgctgtggggccgccgcctggtgcagcgctggcactatgagccctaccaccagctgcgctatggagagcccaccctgcggcgggctgtgcccctggccctggccctgatctctgtgagcaacccccggctgaacatcctggacaccctgagcaagttcagccatgatgctgaccctgaggtgtcctacaacagcatctttgccatgggcatggtgggcagcggcaccaacaatgcccggctggccgccatgctgcggcagctggcccagtaccacgccaaggaccccaacaacctcttcatggtgcggctggcccagggcctgacccacctgggcaagggcaccctgaccctgtgcccctaccacagcgaccggcagctgatgagccaggtggccgtggccggcctgctgactgtgctggtgtccttcctggatgtgaggaacatcatcctgggcaagagccactacgtgctgtatggcctggtggccgccatgcagcccaggatgctggtgacctttgatgaggagctgcggcccctgcctgtgtctgtgcgggtgggccaggccgtggatgtggtgggccaggccggcaagcccaagaccatcaccggcttccagacccacaccacccctgtgctgctggcccacggggagcgggcagagctggccacagaggagttcctgcctgtgacccccatcctggagggctttgtgtttggaagaacacccatcatgatcagcaagtag

SEQ ID NO: 99073 - DNA, 1743 bp, Artificial Sequence
  derived and/or modified sequence
cagtgcaccgcccagcagcagctgctgggcctgagcagcggcgccggccaccatggggcccagctgatgctgcagaatccccccagggagcaacaagtttggggacagtggctgtcagggggactttgccctcatgagcccggcctgctgttctgtgaatggctgtgcgaatgtagcttttgggataaactgttgaccgacgacgggaacaagtggctatacaagaacaaagaccacggcatgctatctgccgccgcctcactcggaatgatcctactgtgggatgtggatggcgggctgacgcagattgataaatacttgtattctagtgaggactacattaaatctggcgcccttctggcttgcgggattgtaaattccggcgttcgtaatgaatgcgacccagcactggccttgctcagcgactatgtactgcataacagtaatactatgagacttggctccatctttggactggggctagcttacgcaggtagcaatcgcgaggacgtcttaactctcttactccccgtaatgggtgattccaagtcaagcatggaggtggccggcgtcacagccctggcttgtggaatgatcgccgttggctcctgtaatggcgacgtgacttctacaatcctgcagactattatggaaaaatcagagaccgaactgaaagacacttacgctcgatggcttcccctgggcttaggactcaaccacctgggcaaaggtgaggcaatagaagcaatactggcggccctcgaagtagtgagtgagccatttaggagcttcgctaacacattagtagacgtgtgtgcctacgcaggatccgggaacgtccttaaggtgcaacagctactgcacatctgtagcgaacacttcgatagcaaagagaaggaagaagataaagacaaaaaggagaagaaggataaggacaaaaaagaggcaccggcagatatgggcgcccatcagggtgttgccgtcctcggcccgcttttgctgtggggtaggcggctggttcagcgctggcattatgagccatatcaccaacttcgctatggcgaaccaaccttaaggcgggctgtgccgctagctttggccttgatttcagtgtctaatcccagactcaacattctcgatactctgtccaagttttctcacgacgctgacccagaagtgtcatacaattcaatctttgccatgggaatggttggatccggcactaacaacgcacgcctcgcagcaatgctgaggcaactggcacaataccatgctaaggaccccaataacctctttatggttcgccttgctcaaggcttgacacacttaggcaaaggaacactcacactgtgcccttaccattctgatagacagttaatgagccaggtggccgtcgctggcctgctgactgtgctcgtctcatttctagacgtgcggaacatcatcctgggcaagtcgcattatgttctctacgggctcgtggctgcaatgcaacctcggatgctagttaccttcgatgaggaactgcgacctctgcccgtaagtgtgagggtcgggcaggccgtagacgtagtcggtcaagctgggaagcccaaaacgattaccggcttccaaacacacacgacaccagtgttgctggcccatggagagcgcgcagaactggctacagaggaatttctccccgtaactccgatcctggaaggttttgtcttcggtaggacccctatcatgatctcgaagtag

SEQ ID NO: 99074 - DNA, 1743 bp, Artificial Sequence
  derived and/or modified sequence
cagtgcacagcacagcagcaactactcggcttgagtagcggggctggccatcacggtgcccagctcatgctacagaaccctcccagagagcagcaagtgtggggccagtggctcagcggcggtctgtgcccacatgagcctgggctgctcttttgcgagtggttgtgtgagtgtagtttttgggacaaactgctcactgatgacggaaacaagtggctgtataaaaacaaagaccatggcatgctctccgccgctgcttcactaggtatgatcctgctgtgggatgtcgacggtgggttgactcagatcgacaagtacctttattcaagcgaagattatatcaagagcggcgcacttctggcttgtggcattgtgaatagcggcgtccgaaatgaatgcgacccagctctggccttactgagcgactacgtgctccataattcaaataccatgagactggggtctatctttggccttggcctggcatatgcgggttcgaaccgtgaggacgtgctcaccctgctgctgccagtgatgggagactctaaaagttctatggaggtggcaggagtcacagcactcgcctgtggaatgatagctgtgggttcttgcaacggggatgttaccagtactattttacagaccatcatggaaaaatcagagaccgagctgaaagacacatacgccaggtggctgccacttggtctcggcctgaaccatctgggaaagggagaagccatcgaagccatcttagctgccctcgaagtggtgtctgagcccttcagatccttcgcgaacaccctggtagacgtatgtgcctacgccggtagcggaaacgtactcaaggtgcagcagcttctgcacatttgctcagaacacttcgactccaaggagaaggaggaggacaaggacaaaaaggagaaaaaagataaagacaagaaggaagctcccgctgacatgggggctcatcagggggtagccgtgctgggcccactgctgctctggggcagacggctggtgcagcgctggcattatgagccctatcaccagcttcgatacggagaacctactctccggagagcagtgcctcttgcactggctttgatctcagtatccaaccctcgccttaatatcctggataccttgagcaaatttagccacgacgccgacccggaagtcagctacaactcaatattcgccatggggatggtaggcagcggcaccaacaatgctagactggccgcaatgctgaggcagctggcccaataccacgccaaagacccgaataatctgttcatggtgcgcttggcccaggggctcacacacctgggaaaaggtacacttactttatgcccttaccatagtgatcggcagctgatgtctcaggttgccgtggccggactgcttaccgtactggtgtcttttctagatgtgcgcaacataattctaggaaagagccactacgtgctctacggtctcgtggccgctatgcagcccaggatgctagttacatttgatgaagagctaagacccttgcctgtgagcgtcagggtaggacaggcagtggatgtcgtgggccaagccggaaaacccaagactatcaccggtttccagactcatactacccctgtactcctcgctcatggcgaacgcgcagaattggcaaccgaggaatttctgcccgtgactcccattcttgagggcttcgtattcggcaggactccaatcatgataagtaaatag

SEQ ID NO: 99075 - DNA, 1743 bp, Artificial Sequence
  derived and/or modified sequence
cagtgcaccgcccagcagcagctgctgggcctgagcagcggcgccggccaccacggcgcccagctgatgctgcagaacccccccagagagcagcaggtgtggggccagtggctgagcggcggcctgtgcccccacgagcccggcctgctgttctgcgagtggctgtgcgagtgcagcttctgggacaagctgctgaccgacgacggcaacaagtggctgtacaagaacaaggaccacggcatgctgagcgccgccgccagcctgggcatgatcctgctgtgggacgtggacggcggcctgacccagatcgacaagtacctgtacagcagcgaggactacatcaagagcggcgccctgctggcctgcggcatcgtgaacagcggcgtgagaaacgagtgcgaccccgccctggccctgctgagcgactacgtgctgcacaacagcaacaccatgagactgggcagcatcttcggcctgggcctggcctacgccggcagcaacagagaggacgtgctgaccctgctgctgcccgtgatgggcgacagcaagagcagcatggaggtggccggcgtgaccgccctggcctgcggcatgatcgccgtgggcagctgcaacggcgacgtgaccagcaccatcctgcagaccatcatggagaagagcgagaccgagctgaaggacacctacgccagatggctgcccctgggcctgggcctgaaccacctgggcaagggcgaggccatcgaggccatcctggccgccctggaggtggtgagcgagcccttcagaagcttcgccaacaccctggtggacgtgtgcgcctacgccggcagcggcaacgtgctgaaggtgcagcagctgctgcacatctgcagcgagcacttcgacagcaaggagaaggaggaggacaaggacaagaaggagaagaaggacaaggacaagaaggaggcccccgccgacatgggcgcccaccagggcgtggccgtgctgggccccctgctgctgtggggcagaagactggtgcagagatggcactacgagccctaccaccagctgagatacggcgagcccaccctgagaagagccgtgcccctggccctggccctgatcagcgtgagcaaccccagactgaacatcctggacaccctgagcaagttcagccacgacgccgaccccgaggtgagctacaacagcatcttcgccatgggcatggtgggcagcggcaccaacaacgccagactggccgccatgctgagacagctggcccagtaccacgccaaggaccccaacaacctgttcatggtgagactggcccagggcctgacccacctgggcaagggcaccctgaccctgtgcccctaccacagcgacagacagctgatgagccaggtggccgtggccggcctgctgaccgtgctggtgagcttcctggacgtgagaaacatcatcctgggcaagagccactacgtgctgtacggcctggtggccgccatgcagcccagaatgctggtgaccttcgacgaggagctgagacccctgcccgtgagcgtgagagtgggccaggccgtggacgtggtgggccaggccggcaagcccaagaccatcaccggcttccagacccacaccacccccgtgctgctggcccacggcgagagagccgagctggccaccgaggagttcctgcccgtgacccccatcctggagggcttcgtgttcggcagaacccccatcatgatcagcaagtag

SEQ ID NO: 99076 - protein, 142 aa, Artificial Sequence
  derived and/or modified sequence
MGLKLNGRYISLILAVQIAYLVQAVRAAGKCDAVFKGFSDCLLKLGDSMANYPQGLDDKTNIKTVCTYWEDFHSCTVTALTDCQEGAKDMWDKLRKESKNLNIQGSLFELCGSGNGAAGSLLPAFPVLLVSLSAALATWLSF

SEQ ID NO: 99077 - DNA, 429 bp, Artificial Sequence
  derived and/or modified sequence
atgggtcttaagctaaacggtaggtatatcagcttaatcctggcagtgcagattgcctatttagtccaggcagtccgagccgcaggtaaatgcgacgctgtgttcaaggggttttctgattgcctgctcaaattgggagactccatggccaattatcctcaggggctggacgataaaactaatattaaaacggtgtgcacctattgggaagactttcactcctgtactgttaccgccttaacggattgccaagaaggtgcgaaggatatgtgggataagctgcggaaggagtctaagaatctcaacatccagggctctctgtttgaactgtgcggctccggcaatggcgccgccgggtccctgctgccagctttccctgtactgcttgtcagcctgagtgccgcattagcaacctggttatcattttag

SEQ ID NO: 99078 - DNA, 429 bp, Artificial Sequence
  derived and/or modified sequence
atgggcctgaagctgaatggccgctacatcagcctcatcctggccgtgcagatcgcctacctggtgcaggccgtgcgggccgccgggaaatgtgatgctgtgttcaagggcttcagtgactgcctgctgaagctgggggacagcatggccaactacccccagggcctggatgacaagaccaacatcaagacagtgtgcacctactgggaggacttccacagctgcaccgtgacagccctgacagactgccaggagggcgccaaggacatgtgggacaagctgaggaaggagagcaagaacctgaacatccagggcagcctgtttgagctgtgtggcagcggaaatggagctgctggcagcctgctgcctgccttccctgtgctgctggtgtccctgtctgctgccctggccacctggctgtccttctag

SEQ ID NO: 99079 - DNA, 429 bp, Artificial Sequence
  derived and/or modified sequence
atgggcctgaagctgaacggccggtacatcagcctgatcctggccgtacagatagcttacctcgtgcaggcggtgcgagctgcaggcaagtgtgatgctgtgtttaaggggttttccgactgcctcctgaaactgggagacagtatggccaactatcctcaagggctggatgacaaaactaacattaagacagtatgcacgtactgggaagattttcactcctgcaccgtcacagcccttaccgattgccaggagggcgcaaaagacatgtgggataagctgcggaaggaaagcaaaaatttgaacatccaaggcagcctgttcgagctctgcggcagcggcaacggagcggcgggatcactccttccagctttcccagtcctcctggtaagtctttccgccgcgctcgcaacgtggctgtccttctag

SEQ ID NO: 99080 - DNA, 1624 bp, Artificial Sequence
  derived and/or modified sequence
ccccctcagcctctctctctctctctctttctctctctctctctctttctgtctcttcctcgctccctctctttctctcctccctctgccttcccagtgcataaagtctctgtcgctcccggaacttgttggcaatgcctattttttggctttcccccgcgttctctaaactaactatttaaaggtctgcggtcgcaaatggtttgactaaacgtaggatgggacttaagttgaacggcagatatatttcactgatcctcgcggtgcaaatagcgtatctggtgcaggccgtgagagcagcgggcaagtgcgatgcggtcttcaagggcttttcggactgtttgctcaagctgggcgacagcatggccaactacccgcagggcctggacgacaagacgaacatcaagaccgtgtgcacatactgggaggatttccacagctgcacggtcacagcccttacggattgccaggaaggggcgaaagatatgtgggataaactgagaaaagaatccaaaaacctcaacatccaaggcagcttattcgaactctgcggcagcggcaacggggcggcggggtccctgctcccggcgttcccggtgctcctggtgtctctctcggcagctttagcgacctggctttccttctgagcgtggggccagctccccccgcgcgcccacccacactcactccatgctcccggaaatcgagaggaagatccattagttctttggggacgttgtgattctctgtgatgctgaaaacactcatataggattgtgggaaatcctgattctcttttttatttcgtttgatttcttgtgttttatttgccaaatgttaccaatcagtgagcaagcaagcacagccaaaatcggacctcagctttagtccgtcttcacacacaaataagaaaacggcaaacccaccccattttttaattttattattattaattttttttgttggcaaaagaatctcaggaacggccctgggccacctactatattaatcatgctagtaacatgaaaaatgatgggctcctcctaataggaaggcgaggagaggagaaggccaggggaatgaattcaagagagatgtccacggacgaaacatacggtgaataattcacgctcacgtcgttcttccacagtatcttgttttgatcatttccactgcacatttctcctcaagaaaagcgaaaggacagactgttggctttgtgtttggaggataggagggagagagggaaggggctgaggaaatctctggggtaagagtaaaggcttccagaagacatgctgctatggtcactgaggggttagctttatctgctgttgttgatgcatccgtccaagttcactgcctttattttccctcctccctcttgttttagctgttacacacacagtaatacctgaatatccaacggtatagatcacaagggggggatgttaaatgttaatctaaaatatagctaaaaaaagattttgacataaaagagccttgattttaaaaaaaaaagagagagagatgtaatttaaaaagtttattataaattaaattcagcaaaaaaagatttgctacaaagtatagagaagtataaaataaaagttattgtttgaaa

SEQ ID NO: 99081 - DNA, 429 bp, Artificial Sequence
  derived and/or modified sequence
atgggcctcaaacttaacggcagatacataagcctgatcctggccgtacagatcgcttacctcgtccaggccgttcgcgctgccggaaagtgcgacgccgtgttcaagggtttcagcgattgtctcttgaagctgggcgactcaatggccaattatccccagggactcgatgacaaaacaaatattaagactgtgtgcacctattgggaggacttccactcctgcaccgtcacagcccttacagactgccaggagggcgctaaggacatgtgggacaagctgcgcaaagagagcaagaacttgaatatccaggggagcttatttgagctctgcgggtccggcaacggggctgccggttccctattgccagcattccccgttcttcttgtaagtctgtcagctgcactggccacctggttgtcattctag

SEQ ID NO: 99082 - DNA, 429 bp, Artificial Sequence
  derived and/or modified sequence
atgggcctgaagctgaacggcagatacatcagcctgatcctggccgtgcagatcgcctacctggtgcaggccgtgagagccgccggcaagtgcgacgccgtgttcaagggcttcagcgactgcctgctgaagctgggcgacagcatggccaactacccccagggcctggacgacaagaccaacatcaagaccgtgtgcacctactgggaggacttccacagctgcaccgtgaccgccctgaccgactgccaggagggcgccaaggacatgtgggacaagctgagaaaggagagcaagaacctgaacatccagggcagcctgttcgagctgtgcggcagcggcaacggcgccgccggcagcctgctgcccgccttccccgtgctgctggtgagcctgagcgccgccctggccacctggctgagcttctag

SEQ ID NO: 99083 - DNA, 39 bp, Artificial Sequence
  derived and/or modified sequence
atggctggtattcttttcgaggatatcttcgacgtgtag

SEQ ID NO: 99084 - DNA, 39 bp, Artificial Sequence
  derived and/or modified sequence
atggccggcatcctgtttgaggacatctttgatgtgtag

SEQ ID NO: 99085 - DNA, 39 bp, Artificial Sequence
  derived and/or modified sequence
atggccggaattctgttcgaagacatcttcgatgtctag

SEQ ID NO: 99086 - DNA, 39 bp, Artificial Sequence
  derived and/or modified sequence
atggccggcatcctgttcgaggacatcttcgacgtgtag

SEQ ID NO: 99087 - protein, 621 aa, Artificial Sequence
  derived and/or modified sequence
MSPVFPMLTVLTMFYYICLRRRARTATRGEMMNTHRAIESNSQTSPLNAEVVQYAKEVVDFSSHYGSENSMSYTMWNLAGVPNVFPSSGDFTQTAVFRTYGTWWDQCPSASLPFKRTPPNFQSQDYVELTFEQQVYPTAVHVLETYHPGAVIRILACSANPYSPNPPAEVRWEILWSERPTKVNASQARQFKPCIKQINFPTNLIRLEVNSSLLEYYTELDAVVLHGVKDKPVLSLKTSLIDMNDIEDDAYAEKDGCGMDSLNKKFSSAVLGEGPNNGYFDKLPYELIQLILNHLTLPDLCRLAQTCKLLSQHCCDPLQYIHLNLQPYWAKLDDTSLEFLQSRCTLVQWLNLSWTGNRGFISVAGFSRFLKVCGSELVRLELSCSHFLNETCLEVISEMCPNLQALNLSSCDKLPPQAFNHIAKLCSLKRLVLYRTKVEQTALLSILNFCSELQHLSLGSCVMIEDYDVIASMIGAKCKKLRTLDLWRCKNITENGIAELASGCPLLEELDLGWCPTLQSSTGCFTRLAHQLPNLQKLFLTANRSVCDTDIDELACNCTRLQQLDILGTRMVSPASLRKLLESCKDLSLLDVSFCSQIDNRAVLELNASFPKVFIKKSFTQ

SEQ ID NO: 99088 - DNA, 1866 bp, Artificial Sequence
  derived and/or modified sequence
atgagccccgtgttccccatgctgaccgtgctgaccatgttctactacatctgcctgagaagaagagccagaaccgccaccagaggcgagatgatgaacacccacagagccatcgagagcaacagccagaccagccccctgaacgccgaggtggtgcagtacgccaaggaggtggtggacttcagcagccactacggcagcgagaacagcatgagctacaccatgtggaacctggccggcgtgcccaacgtgttccccagcagcggcgacttcacccagaccgccgtgttcagaacctacggcacctggtgggaccagtgccccagcgccagcctgcccttcaagagaaccccccccaacttccagagccaggactacgtggagctgaccttcgagcagcaggtgtaccccaccgccgtgcacgtgctggagacctaccaccccggcgccgtgatcagaatcctggcctgcagcgccaacccctacagccccaacccccccgccgaggtgagatgggagatcctgtggagcgagagacccaccaaggtgaacgccagccaggccagacagttcaagccctgcatcaagcagatcaacttccccaccaacctgatcagactggaggtgaacagcagcctgctggagtactacaccgagctggacgccgtggtgctgcacggcgtgaaggacaagcccgtgctgagcctgaagaccagcctgatcgacatgaacgacatcgaggacgacgcctacgccgagaaggacggctgcggcatggacagcctgaacaagaagttcagcagcgccgtgctgggcgagggccccaacaacggctacttcgacaagctgccctacgagctgatccagctgatcctgaaccacctgaccctgcccgacctgtgcagactggcccagacctgcaagctgctgagccagcactgctgcgaccccctgcagtacatccacctgaacctgcagccctactgggccaagctggacgacaccagcctggagttcctgcagagcagatgcaccctggtgcagtggctgaacctgagctggaccggcaacagaggcttcatcagcgtggccggcttcagcagattcctgaaggtgtgcggcagcgagctggtgagactggagctgagctgcagccacttcctgaacgagacctgcctggaggtgatcagcgagatgtgccccaacctgcaggccctgaacctgagcagctgcgacaagctgcccccccaggccttcaaccacatcgccaagctgtgcagcctgaagagactggtgctgtacagaaccaaggtggagcagaccgccctgctgagcatcctgaacttctgcagcgagctgcagcacctgagcctgggcagctgcgtgatgatcgaggactacgacgtgatcgccagcatgatcggcgccaagtgcaagaagctgagaaccctggacctgtggagatgcaagaacatcaccgagaacggcatcgccgagctggccagcggctgccccctgctggaggagctggacctgggctggtgccccaccctgcagagcagcaccggctgcttcaccagactggcccaccagctgcccaacctgcagaagctgttcctgaccgccaacagaagcgtgtgcgacaccgacatcgacgagctggcctgcaactgcaccagactgcagcagctggacatcctgggcaccagaatggtgagccccgccagcctgagaaagctgctggagagctgcaaggacctgagcctgctggacgtgagcttctgcagccagatcgacaacagagccgtgctggagctgaacgccagcttccccaaggtgttcatcaagaagagcttcacccagtag

SEQ ID NO: 99089 - DNA, 1866 bp, Artificial Sequence
  derived and/or modified sequence
atgtcccctgtgtttcccatgctgacagtgcttacaatgttttattatatctgcctcaggagacgggcgcgcacggccactcggggtgaaatgatgaatactcaccgggccatcgagagcaacagccagacctccccactgaatgctgaagtcgtgcagtacgcaaaggaggtagttgacttctcaagtcattacggctctgaaaactctatgtcatacacaatgtggaatttggccggggtgccgaatgtgttcccatcctctggagactttacgcagacagccgtgttccgcacctacggtacctggtgggaccaatgtcctagcgcatccctccctttcaaaaggacccccccgaactttcagagccaggactacgtggagctgacttttgagcaacaggtctatcctacagccgtgcatgtgctggagacttaccacccaggcgcagtgatacgcatcttggcctgcagcgccaacccatattccccgaaccccccggcagaagtccgttgggaaatcctgtggtccgaacgccctacaaaagtaaacgcctcacaagcccgccagttcaagccttgtattaagcagatcaatttccccacgaacctcattcgcctcgaagtgaactctagcctgctggaatactacacagaattagatgcagtcgtgttgcatggcgtcaaggataaaccagtactcagcctgaaaactagcctgatcgatatgaatgacattgaggacgatgcgtatgcagagaaagacggatgcgggatggacagcctgaacaagaaatttagctccgccgttctcggtgagggccctaacaatgggtatttcgataaactcccctacgaacttatccagctgatcctgaatcatctgaccctgcccgacctgtgcaggctggcccagacctgcaagctgttgagccagcactgctgcgaccccctgcagtatatccacttaaatcttcagccctactgggcaaaactcgacgacacatcactggagtttctgcaatcgaggtgcacactcgttcagtggttgaatctctcctggactgggaatagagggttcatctctgtggcagggttctcaaggttcctgaaagtttgcggcagtgagctggtgagactcgaattatcctgcagtcattttcttaacgagacctgtctcgaggtgatctctgaaatgtgtcctaacctgcaggcactgaacttgtctagctgtgacaaactgccgccgcaagccttcaaccatattgccaaactgtgttccctgaaaaggctggtgctctatagaaccaaggtggagcagacggctctgctgtctattctgaacttctgcagcgaactgcagcatttatcactggggagttgtgtgatgatagaggactacgacgtgattgccagtatgatcggtgccaagtgcaagaaactgcgcactctagacttgtggcgatgcaaaaatattactgaaaatggtatcgccgagctggcctcagggtgtcccctgctcgaggagcttgatctgggctggtgccctacactacagtcctcaaccgggtgctttaccaggctcgcccaccagttgcctaatctgcagaaacttttcctgaccgccaaccggagtgtgtgtgatacagacatcgatgaacttgcctgcaactgtacaaggttacagcagctggacatcttgggcacgaggatggtttcccctgcgtctctccgtaaactgctcgaatcctgtaaggatctgagtctcctcgacgtgagtttttgtagtcaaattgataaccgtgcggttctggaactcaatgcttccttcccaaaggtgttcattaagaagagttttacccagtag

SEQ ID NO: 99090 - DNA, 1866 bp, Artificial Sequence
  derived and/or modified sequence
atgagccctgtgttccccatgctgactgtgctgaccatgttctactacatctgcctgcggcggcgggccaggacagccaccagaggagagatgatgaacacccaccgggccatcgagagcaacagccagaccagccccctgaatgctgaggtggtgcagtatgccaaggaggtggtggacttcagcagccactacggcagcgagaacagcatgagctacaccatgtggaacctggccggcgtgcccaacgtgttccccagcagcggggacttcacccagacagctgtgttccgcacctacggcacctggtgggaccagtgccccagcgccagcctgcccttcaagaggaccccacccaacttccagagccaggactatgtggagctgacctttgagcagcaggtgtaccccacagctgtgcacgtgctggagacctaccaccctggggccgtcatccgcatcctggcctgcagcgccaacccctacagccccaaccccccagctgaggtgcgctgggagatcctgtggagcgagcggcccaccaaggtgaatgccagccaggcccggcagttcaagccctgcatcaagcagatcaacttccccaccaacctgatccggctggaggtgaacagcagcctgctggagtactacacagagctggatgctgtggtgctgcacggcgtgaaggacaagcctgtgctgagcctgaagaccagcctgattgacatgaatgacattgaagatgatgcctatgcagagaaggatggctgcggcatggacagcctgaacaagaagttcagcagcgctgtgctgggggagggccccaacaacggctactttgacaagctgccctatgagctgatccagctgatcctgaaccacctgaccctgcctgacctgtgccgcctggcccagacctgcaagctgctgagccagcactgctgtgaccccctgcagtacatccacctgaacctgcagccctactgggccaagctggatgacaccagcctggagttcctgcagagccgctgcaccctggtgcagtggctgaacctgtcctggacaggcaacagaggcttcatctctgtggccggcttcagccgcttcctgaaggtgtgtggcagcgagctggtgcggctggagctgagctgcagccacttcctgaatgagacctgcctggaggtgatcagcgagatgtgccccaacctgcaggccctgaacctgagcagctgtgacaagctgcccccccaggccttcaaccacatcgccaagctgtgcagcctgaagaggctggtgctgtaccgcaccaaggtggagcagacagccctgctgagcatcctgaacttctgcagcgagctgcagcacctgagcctgggcagctgtgtgatgattgaagattatgatgtgattgcctccatgattggagccaagtgcaagaagctgcggaccctggacctgtggcgctgcaagaacatcacagaaaatggaattgctgagctggccagcggctgccccctgctggaggagctggacctgggctggtgccccaccctgcagagcagcacaggctgcttcacccggctggcccaccagctgcccaacctgcagaagctgttcctgacagccaacagatctgtgtgtgacacagacattgatgagctggcctgcaactgcacccggctgcagcagctggacatcctgggcaccaggatggtgtccccagccagcctgaggaagctgctggagagctgcaaggacctgagcctgctggatgtgtccttctgcagccagattgacaacagagctgtgctggagctgaatgccagcttccccaaggtgttcatcaagaagagcttcacccagtag

SEQ ID NO: 99091 - DNA, 1866 bp, Artificial Sequence
  derived and/or modified sequence
atgagccccgtgttccccatgctgaccgtgctgaccatgttctactatatctgtctccgtcggcgggcccggaccgccacacgtggagagatgatgaacacacaccgtgccattgagtcaaacagccagacatcccctctcaacgctgaggtggttcagtatgccaaggaggtcgtggacttctcctctcactatggaagcgaaaactcaatgtcgtataccatgtggaacctagccggggtgcctaatgtcttcccaagctcaggcgactttacacagaccgcagtgtttcgcacatacggtacatggtgggaccagtgtccctctgcttccttacctttcaagagaactccacccaactttcagtcccaggactacgttgagttaacatttgagcagcaggtttaccctactgctgtccacgttctcgaaacttaccatcccggggccgtaattcgtatcctggcttgcagcgcaaatccgtactcccccaacccccctgctgaagtccgctgggaaatcctgtggtcagagcgtccaaccaaagttaacgcctcccaagccaggcagttcaagccgtgtatcaagcagatcaattttcctacaaatctgatcaggctggaggtgaatagttctctgctggaatactataccgagttggacgccgtggtgctccatggcgtcaaggacaagcccgtgctgtctctgaagacatcacttattgatatgaatgatatcgaagacgatgcctacgctgaaaaggatggctgcggaatggattctctcaataagaaattctcgtctgctgtactgggggaagggccaaacaacggttatttcgataaactgccgtatgagctgatccagctcattctgaatcatctgacactccccgatctctgccgtttagcccagacgtgtaagttgctcagccagcactgctgtgacccactgcaatatatccacctaaacctacaaccctattgggctaagttggacgatactagcctcgagtttttacagtcccgctgtacgctcgtgcagtggctgaatctttcatggactgggaacaggggctttatttccgtagcaggatttagccggtttctaaaagtatgtggttccgaattggtgcggctggaacttagctgcagtcacttcctgaacgaaacatgcttggaagtgatcagcgagatgtgtccgaatctccaagcactcaacctgagttcctgtgataaactccctccacaggcatttaaccacattgcgaagctgtgctctttaaagcgacttgtcctctacagaaccaaggtcgagcagaccgctcttctatctatactcaacttttgcagtgaactgcaacacttgtcattaggctcctgtgtgatgattgaagactatgacgtgattgcttcaatgattggcgccaaatgcaaaaagttgaggaccttggatttgtggagatgcaaaaacattactgaaaatgggatcgctgagctcgcgagcggatgcccgctacttgaagagttagacttggggtggtgtcccacactgcagagcagtacaggttgtttcacaagactggcccaccagcttccaaacctgcagaaactgttccttacagccaaccggagtgtctgcgacaccgacatagacgagttggcctgcaattgtacccggttgcagcaactggacatattagggactaggatggtcagcccagcatccctaaggaaactactggaatcatgcaaggatctaagtctccttgatgtgagcttctgtagccagatcgacaatagggccgttctggagctgaatgctagttttccaaaggttttcattaagaagagcttcactcagtag

SEQ ID NO: 99092 - DNA, 1866 bp, Artificial Sequence
  derived and/or modified sequence
atgtcacccgtgttccctatgttgaccgtgctgaccatgttctactatatctgtttgagacgcagagcacgcaccgccaccaggggagaaatgatgaacactcaccgggctatcgaatccaactcacagacctctccattgaacgctgaggttgtgcagtacgcgaaagaagtggtggacttctccagtcattatggctccgaaaattctatgagctacacgatgtggaacctggcaggggtgcctaacgtatttcccagctctggcgactttacgcagacagctgtctttcggacctatggcacatggtgggaccagtgcccatctgcaagtctgcccttcaaaagaacacctcccaactttcagagccaagactatgtggagctcaccttcgagcagcaggtctatcctactgccgtgcatgttttagaaacttatcacccaggcgctgtgatccgcattcttgcttgttcagcaaacccatattcacccaacccccctgccgaggtccgatgggagatcctctggtcagagcgtccaacaaaagttaacgccagtcaggcacgccagtttaaaccgtgtattaaacaaataaatttccctaccaacctgatccgactggaggtcaatagttcattgcttgaatactacaccgaacttgacgcagtcgtgctgcacggagtgaaagataaacccgtactctccctgaagaccagcctgatagacatgaacgatatcgaagacgacgcttatgctgaaaaagacggttgcggcatggactccctgaacaaaaaattttcttctgcggtgctgggcgaaggccctaataatgggtacttcgacaaactgccatatgaactgatacagctcatccttaaccatctgaccctgccggacctgtgccgactggcccagacatgtaagctactgtcacagcactgctgtgacccgcttcaatatatccaccttaatctccagccttactgggctaagttggatgatacatcactcgagttcttacagtcacgctgtacgctggtgcagtggcttaatctttcctggaccggaaaccgaggatttatatcagtcgctggattttcacgcttcctcaaagtgtgcgggagcgaattagtgcggctagaactgtcttgctctcactttctcaatgagacatgtctggaagtcattagtgaaatgtgtccaaatttacaagctctcaatttaagttcatgcgacaaactgcctcctcaggcattcaatcacattgccaaattatgttctctcaagaggctcgtcctgtacaggacaaaagtggagcagaccgccctgctcagtatactgaatttctgttctgagctgcagcatctatcccttggcagctgtgtaatgattgaggattatgatgtcatcgcatctatgatcggcgctaagtgcaaaaaactgcggaccctcgacttgtggcgatgtaaaaacataactgaaaatgggatagcagagttggcctctgggtgtcctctgctggaggagctggatctgggatggtgccccacattacagagttctactggctgtttcactcgcctggcccatcagctccctaacctgcagaaacttttccttaccgcaaatcgatctgtatgtgatactgatatcgatgagttagcttgcaactgtacgcgccttcaacaactagatattcttggcacaaggatggtgtctcctgcttccctgcgaaaattgctggagtcatgtaaggacctgtccctcctcgacgtttctttttgcagtcaaatcgacaaccgcgcagtcctagagctcaatgcttccttccctaaggtatttatcaaaaagagtttcacccagtag

SEQ ID NO: 99093 - DNA, 2777 bp, Artificial Sequence
  derived and/or modified sequence
cgccgctcctcgcggcctccgcgtcttccttccgggtcgcgctaggccgggcttgcggcggttgtgccgcatctagagagtcggggagccgcccccgcacccaggccttctcgcgctgcctggtcgctggtgaagcccgcggcgcgcgcctctcccggaccctgcagggtaaaagaatgtcacatgtcagcatttgtacctgaagtcagcatgcaaagttcagggtacctggatgaatgccaacttttgcatttcccatgtgtatcctgtgaccattctatctgggaacatccttcaaagagttcatgcatcttactgaggacacctgaccttttgaagcttcataattcacatctagatgtcaccggtctttcccatgttaacagttctgaccatgttttattatatatgccttcggcgccgagccaggacagctacaagaggagaaatgatgaacacccatagagctatagaatcaaacagccagacttcccctctcaatgcagaggtagtccagtatgccaaagaagtagtggatttcagttcccattatggaagtgagaatagtatgtcctatactatgtggaatttggctggtgtaccaaatgtattcccaagttctggtgactttactcagacagctgtgtttcgaacttatgggacatggtgggatcagtgtcctagtgcttccttgccattcaagaggacgccacctaattttcagagccaggactatgtggaacttacttttgaacaacaggtgtatcctacagctgtacatgttctagaaacctatcatcccggagcagtcattagaattctcgcttgttctgcaaatccttattccccaaatccaccagctgaagtaagatgggagattctttggtcagagagacctacgaaggtgaatgcttcccaagctcgccagtttaaaccttgtattaagcagataaatttccccacaaatcttatacgactggaagtaaatagttctcttctggaatattacactgaattagatgcagttgtgctacatggtgtgaaggacaagccagtgctttctctcaagacttcacttattgacatgaatgatatagaagatgatgcctatgcagaaaaggatggttgtggaatggacagtcttaacaaaaagtttagcagtgctgtcctcggggaagggccaaataatgggtattttgataaactaccttatgagcttattcagctgattctgaatcatcttacactaccagacctgtgtagattagcacagacttgcaaactactgagccagcattgctgtgatcctctgcaatacatccacctcaatctgcaaccatactgggcaaaactagatgacacttctctggaatttctacagtctcgctgcactcttgtccagtggcttaatttatcttggactggcaatagaggcttcatctctgttgcaggatttagcaggtttctgaaggtttgtggatccgaattagtacgccttgaattgtcttgcagccactttcttaatgaaacttgcttagaagttatttctgagatgtgtccaaatctacaggccttaaatctctcctcctgtgataagctaccacctcaagctttcaaccacattgccaagttatgcagccttaaacgacttgttctctatcgaacaaaagtagagcaaacagcactgctcagcattttgaacttctgttcagagcttcagcacctcagtttaggcagttgtgtcatgattgaagactatgatgtgatagctagcatgataggagccaagtgtaaaaaactccggaccctggatctgtggagatgtaagaatattactgagaatggaatagcagaactggcttctgggtgtccactactggaggagcttgaccttggctggtgcccaactctgcagagcagcaccgggtgcttcaccagactggcacaccagctcccaaacttgcaaaaactctttcttacagctaatagatctgtgtgtgacacagacattgatgaattggcatgtaattgtaccaggttacagcagctggacatattaggaacaagaatggtaagtccggcatccttaagaaaactcctggaatcttgtaaagatctttctttacttgatgtgtccttctgttcgcagattgataacagagctgtgctagaactgaatgcaagctttccaaaagtgttcataaaaaagagctttactcagtgacttaatatatgttctgtattaaaattaatgtgctttgttggggtttaattttgggattggttttgggttttgtttttagttgttttaatggtaagaattaagacatttgtagattttaaagaaaaatatgaaattgtccattaaatcaagtaaaaatgtgcacaaatgttttcataaaatactgcaagcacttctcttcaagaatatgagtggatattatttttaccttatgttaatcagtgatatgctttagtcaataatatgattgataaaagaataacatggaatcatgctaacttattttcaaaggaacactgagcaataaagtatcgtggcatttatgcaaaaaaaaaagttaattttttacaccttcatgtaaggatgtcttattaagcctgtgacctggcaagtgttttgtttggtatgtacaaaatggtcagagctagttggagaatgagacatgcttttccagctgtttggttatttctctggattaactgttcaactggaaaatttttagtttttctagccaggtgtggtggcacacacttgt

SEQ ID NO: 99094 - DNA, 3115 bp, Artificial Sequence
  derived and/or modified sequence
cgggcttgcggcggttgtgccgcatctagagagtcggggagccgcccccgcacccaggccttctcgcgctgcctggtcgctggtgaagcccgcggcgcgcgcctctcccggaccctgcaggatttttcttcctggcctggttcccttgccttctccatttgcttcattcgcttggattttcaagaagctttgaagctggataggagtctccagtcttcctcttgatccatatgtttcaggtaaaagaatgtcacatgtcagcatttgtacctgaagtcagcatgcaaagttcagggtacctggatgaatgccaacttttgcatttcccatgtgtatcctgtgaccattctatctgggaacatccttcaaagagttcatgcatcttactgaggacacctgaccttttgaagcttcataattcacatctagatgtcaccggtctttcccatgttaacagttctgaccatgttttattatatatgccttcggcgccgagccaggacagctacaagaggagaaatgatgaacacccatagagctatagaatcaaacagccagacttcccctctcaatgcagaggtagtccagtatgccaaagaagtagtggatttcagttcccattatggaagtgagaatagtatgtcctatactatgtggaatttggctggtgtaccaaatgtattcccaagttctggtgactttactcagacagctgtgtttcgaacttatgggacatggtgggatcagtgtcctagtgcttccttgccattcaagaggacgccacctaattttcagagccaggactatgtggaacttacttttgaacaacaggtgtatcctacagctgtacatgttctagaaacctatcatcccggagcagtcattagaattctcgcttgttctgcaaatccttattccccaaatccaccagctgaagtaagatgggagattctttggtcagagagacctacgaaggtgaatgcttcccaagctcgccagtttaaaccttgtattaagcagataaatttccccacaaatcttatacgactggaagtaaatagttctcttctggaatattacactgaattagatgcagttgtgctacatggtgtgaaggacaagccagtgctttctctcaagacttcacttattgacatgaatgatatagaagatgatgcctatgcagaaaaggatggttgtggaatggacagtcttaacaaaaagtttagcagtgctgtcctcggggaagggccaaataatgggtattttgataaactaccttatgagcttattcagctgattctgaatcatcttacactaccagacctgtgtagattagcacagacttgcaaactactgagccagcattgctgtgatcctctgcaatacatccacctcaatctgcaaccatactgggcaaaactagatgacacttctctggaatttctacagtctcgctgcactcttgtccagtggcttaatttatcttggactggcaatagaggcttcatctctgttgcaggatttagcaggtttctgaaggtttgtggatccgaattagtacgccttgaattgtcttgcagccactttcttaatgaaacttgcttagaagttatttctgagatgtgtccaaatctacaggccttaaatctctcctcctgtgataagctaccacctcaagctttcaaccacattgccaagttatgcagccttaaacgacttgttctctatcgaacaaaagtagagcaaacagcactgctcagcattttgaacttctgttcagagcttcagcacctcagtttaggcagttgtgtcatgattgaagactatgatgtgatagctagcatgataggagccaagtgtaaaaaactccggaccctggatctgtggagatgtaagaatattactgagaatggaatagcagaactggcttctgggtgtccactactggaggagcttgaccttggctggtgcccaactctgcagagcagcaccgggtgcttcaccagactggcacaccagctcccaaacttgcaaaaactctttcttacagctaatagatctgtgtgtgacacagacattgatgaattggcatgtaattgtaccaggttacagcagctggacatattaggaacaagaatggtaagtccggcatccttaagaaaactcctggaatcttgtaaagatctttctttacttgatgtgtccttctgttcgcagattgataacagagctgtgctagaactgaatgcaagctttccaaaagtgttcataaaaaagagctttactcagtgacttaatatatgttctgtattaaaattaatgtgctttgttggggtttaattttgggattggttttgggttttgtttttagttgttttaatggtaagaattaagacatttgtagattttaaagaaaaatatgaaattgtccattaaatcaagtaaaaatgtgcacaaatgttttcataaaatactgcaagcacttctcttcaagaatatgagtggatattatttttaccttatgttaatcagtgatatgctttagtcaataatatgattgataaaagaataacatggaatcatgctaacttattttcaaaggaacactgagcaataaagtatcgtggcatttatgcaaaaaaaaaagttaattttttacaccttcatgtaaggatgtcttattaagcctgtgacctggcaagtgttttgtttggtatgtacaaaatggtcagagctagttggagaatgagacatgcttttccagctgtttggttatttctctggattaactgttcaactggaaaatttttagtttttctagccaggtgtggtggcacacacttgtagtcctagcgacacaggaggtggaggcaggaggattacttgagatgggattttgagactctagtgtacttatgattgcacctgtgagcagccactgcactccaacctgggcaatatagcaagtccctttctcttaaaaaaaattgtagtgtttccacttttcttctgatatttttgtctatttcactactggataatgccaatataaaaatttgggtataatcaagaataagaggtaaactactaaataaaaaaagctttccaactg

SEQ ID NO: 99095 - DNA, 1866 bp, Artificial Sequence
  derived and/or modified sequence
atgtcacccgtgttcccaatgctcacggtgctgacaatgttctactacatctgtctcaggagaagggctcgaacagccacacggggagaaatgatgaatactcaccgagctattgagtccaacagccagacctcacctcttaatgctgaggtggtccaatatgccaaggaggtggtggacttcagtagccactacgggtctgaaaactctatgagttataccatgtggaatctggcaggcgtccccaacgtgttcccttcctctggagattttacacaaacagccgtgttcagaacctacggcacctggtgggaccagtgccccagtgccagcctgcctttcaagcggacgccgcccaacttccaaagccaggactacgtggagctcacgttcgagcagcaagtgtaccccactgccgtccatgtgttggaaacgtatcacccgggtgctgttatcagaatactggcgtgttctgctaatccctattctccaaatcccccggctgaggtgcgatgggaaatcctctggagcgaacgaccaacaaaggttaatgcctcccaggcacgccagtttaaaccatgtattaaacaaatcaatttcccgacaaatcttatccggcttgaagttaattctagcttgcttgagtactacacagagcttgacgcagtggtgttacacggcgtgaaagataagccggttctgtccctgaaaaccagcttgatagacatgaatgacatagaggatgacgcatacgccgagaaagatggttgcgggatggactctcttaataaaaagttcagctctgcagtgctcggcgaaggcccaaacaacgggtacttcgacaagctgccttacgaactgatccagctcatcctcaaccacctaacgctccctgacctgtgtcgcctcgctcagacctgcaagctgctcagtcagcattgctgtgatccattacagtacatccatctcaatctgcagccttactgggctaagctggacgacacttccctggagtttctccagagcaggtgtactttggtgcaatggctgaatttgagctggaccgggaaccgtggtttcatttccgtagcaggattttcgcggtttctgaaagtgtgcgggtctgaactggtacgattagagctttcatgctcccatttcctaaatgaaacctgtcttgaggtgatctcagaaatgtgtcccaatctccaagccctgaacctgtcatcttgtgataagcttcccccacaggcttttaatcacatcgccaagctgtgcagtctaaagaggctagtactgtatcggaccaaggtggagcaaacagcattactgtctatcctaaacttttgtagcgagctgcaacacctgagccttgggagctgcgtgatgatagaggactacgacgtgatcgcctctatgattggtgccaagtgtaagaagctccggaccctggacctctggcgctgcaagaatattacagaaaatggtatcgcggaactggcgtctgggtgccccctcctggaagagctcgacctggggtggtgcccaaccctacagtcctcgaccggctgttttaccaggctggctcatcagctccccaatctgcagaaactgttcctaacggccaaccgttccgtttgcgacactgatatcgacgaactcgcctgcaattgcacgaggttacagcagctggacatcttgggaaccaggatggtcagtccagcttccttacgcaaactgctggagagctgtaaggacctatcccttcttgacgtttccttctgctcccagattgataatcgggctgttttggagctcaatgcaagtttccctaaggtctttatcaaaaagagcttcacacagtag

SEQ ID NO: 99096 - DNA, 1866 bp, Artificial Sequence
  derived and/or modified sequence
atgagccccgtgttccccatgctgaccgtgctgaccatgttctactatatatgtctgaggcgccgagccaggaccgcgacaaggggcgaaatgatgaatacacacagagccatcgaaagtaacagccagacgagtcctctgaacgcagaggttgtgcaatacgctaaagaagttgtggactttagtagccactacggatccgaaaactctatgtcctacaccatgtggaatcttgctggtgtgcccaatgtgtttccttcgagcggcgattttacacaaacagccgtgtttagaacatatggcacatggtgggatcagtgtcctagtgccagtctgccttttaagaggacgccaccgaacttccagtctcaggattacgttgagctcacattcgagcagcaggtttaccccactgctgtgcacgtactggagacctaccatcccggcgccgtgattcgcatcctagcctgctctgccaatccatactctccaaaccctccagctgaagtgagatgggagatcctatggagcgaaaggcccactaaggttaacgcatcccaggctagacaatttaagccatgcatcaagcaaataaattttcccacaaacttgatccggctggaggtgaattcatctctgttagaatactatacagagttggacgccgtggtgttgcacggcgtgaaggataaaccagtgctgtctctgaaaacgtcgcttatagatatgaatgacatcgaggacgatgcctacgcagaaaaagatggctgcggaatggatagcttgaataagaagttcagttctgccgtcctgggggagggccctaataacggttacttcgacaagctgccctacgagctgattcagttgatcctcaatcacctcaccctccctgacctctgcagactcgcccagacctgcaagctgcttagccagcactgttgtgaccctctgcaatatattcacctcaatcttcagccctattgggccaagctggatgatacctctctggaattccttcaatccaggtgcaccctcgtgcagtggcttaatctcagctggactggaaatcgaggattcatctctgtggccggattttcccggtttctgaaagtatgtggtagtgagctcgtgcggctggagctcagctgcagccactttcttaatgagacctgtctggaggtaatatccgagatgtgtccgaatctacaggccctcaatctgtcatcatgcgacaaactgcccccccaggccttcaatcacatcgccaaactttgtagtttaaagagattggtgctttaccggaccaaagtggagcagaccgcgctgctgtccattctcaacttttgtagtgaactgcaacatctatcgttaggcagctgcgttatgatagaagactatgacgtgatagccagcatgataggggctaaatgcaaaaaactgcgtacccttgatctctggcggtgcaaaaatattaccgaaaacggaatcgccgagttggccagcggatgccctctactggaggagctcgacctaggctggtgccctaccctacaaagcagcactggttgtttcacaaggctggcacatcaactccctaatcttcagaaactgttcttaaccgcgaacagaagtgtgtgcgacactgatattgatgagctggcctgcaactgtaccagactccagcagctcgatattctcgggacccggatggtgagtccagctagtctacggaagttgctggaaagctgcaaggatctatctctgctcgatgtgagcttctgctcgcagatcgacaatcgcgccgtattggagctgaacgcctccttccctaaggtcttcattaaaaaatctttcacccagtag

SEQ ID NO: 99097 - DNA, 1866 bp, Artificial Sequence
  derived and/or modified sequence
atgagcccagtgtttcctatgctgaccgtgttgacaatgttttactacatttgcctgcgccgaagggccaggactgcgacacgcggtgagatgatgaatacccacagggccatcgaatcaaatagtcagacatcacctctcaatgccgaagtggtgcaatacgcgaaggaggtggtcgacttctctagccactacgggtctgagaactctatgagttacacgatgtggaacttagcgggtgtcccaaatgtgtttccaagcagtggcgacttcacccagaccgctgtgttccggacttatggaacctggtgggaccagtgccctagcgcttcattgccctttaaacgaaccccgcctaatttccagtcacaggactacgtggaactgacattcgaacaacaggtttaccctacagccgtgcatgtgctagagacataccacccaggtgccgtcattcgaattctggcgtgcagcgcgaatccttattcccccaatccgcctgccgaggtccgatgggagatactctggtccgaaagacccactaaggtgaatgccagccaggcaaggcagttcaaaccctgcattaagcagattaattttcctacaaacctcatccgactggaggtgaactcttctctgctggagtactataccgagctggacgcagtggttctgcatggagtcaaagataagcctgtgttatcactgaagacttccctcattgacatgaatgatatagaggacgacgcctacgcggaaaaggatggatgcggaatggatagcctgaacaagaagttctctagtgccgtcctgggcgagggcccaaataacggctattttgacaaactgccttacgagctgatacagctgattctgaatcatctgaccttgcccgacctgtgcaggcttgctcagacgtgcaagctgctgagccagcactgctgtgatccactgcagtacatccatctcaatttacagccgtactgggcgaagctggatgacacgagccttgagtttctgcaatctagatgtaccctcgtgcaatggttgaacctctcttggacaggcaaccgcggattcatctcagtagccggtttctccaggtttctgaaggtgtgcgggtccgaactagtgaggctcgagctctcatgcagccactttctcaacgagacctgcctggaggtgatcagtgagatgtgcccgaatctacaggccctgaacctgagttcttgcgacaagttaccaccccaggcttttaatcacattgcaaagctctgttctctgaaaagattagtgctctatagaacaaaggtggagcagaccgcactgttgtctatactgaacttctgctctgaacttcaacacttgagcctggggtcatgtgtcatgatagaagactatgatgtgattgccagtatgattggcgcaaagtgcaaaaagctacgcaccctggacctttggcggtgcaaaaacattacggaaaacggaatcgctgaactggcttcaggttgccccctcttggaagaactggatctgggatggtgccccacactgcagtccagcaccgggtgctttactcggcttgcgcaccagctgccaaatttgcagaagctgttcctgaccgcaaatcgttcggtttgtgacacagacatcgatgagctcgcatgcaattgtacacgcctgcagcagctggatatcctaggtaccaggatggtgagcccggcttccctgcgaaaactgctagagagctgtaaggatctaagtcttttggatgtgagcttttgcagccaaatcgataatagagcagtactcgaattgaatgcctcctttccgaaagtgtttatcaagaagtcattcactcagtag

SEQ ID NO: 99098 - protein, 92 aa, Artificial Sequence
  derived and/or modified sequence
MASLGHILVFCVGLLTMAKAESPKEHDPFTYDYQSLQIGGLVIAGILFILGILIVLSRRCRCKFNQQQRTGEPDEEEGTFRSSIRRLSTRRR

SEQ ID NO: 99099 - DNA, 576 bp, Artificial Sequence
  derived and/or modified sequence
aaagtgctcagcccccggggcacagcaggacgtttgggggccttctttcagcaggggacagcccgattggggacaatggcgtctcttggccacatcttggttttctgtgtgggtctcctcaccatggccaaggcagaaagtccaaaggaacacgacccgttcacttacgactaccagtccctgcagatcggaggcctcgtcatcgccgggatcctcttcatcctgggcatcctcatcgtgctgagcagaagatgccggtgcaagttcaaccagcagcagaggactggggaacccgatgaagaggagggaactttccgcagctccatccgccgtctgtccacccgcaggcggtagaaacacctggagcgatggaatccggccaggactcccctggcacctgacatctcccacgctccacctgcgcgcccaccgccccctccgccgccccttccccagccctgcccccgcagactccccctgccgccaagacttccaataaaacgtgcgttcctctcgacagcactttgtcggtctcggtccctcagcgcgaaacgccagcgccactgggccccagca

SEQ ID NO: 99100 - DNA, 547 bp, Artificial Sequence
  derived and/or modified sequence
gtggcagctgggcctcaccccggcagggctgtgcgtgaccccctgagtgggggaaggcaggctgttgccatggtggcctgagcgagcagaattcctccagggacaatggcgtctcttggccacatcttggttttctgtgtgggtctcctcaccatggccaaggcagaaagtccaaaggaacacgacccgttcacttacgactaccagtccctgcagatcggaggcctcgtcatcgccgggatcctcttcatcctgggcatcctcatcgtgctgagcagaagatgccggtgcaagttcaaccagcagcagaggactggggaacccgatgaagaggagggaactttccgcagctccatccgccgtctgtccacccgcaggcggtagaaacacctggagcgatggaatccggccaggactcccctggcacctgacatctcccacgctccacctgcgcgcccaccgccccctccgccgccccttccccagccctgcccccgcagactccccctgccgccaagacttccaataaaacgtgcgttcctctcga

SEQ ID NO: 99101 - DNA, 279 bp, Artificial Sequence
  derived and/or modified sequence
atggccagcttgggacacattctggtgttttgtgtgggcctgctgactatggccaaggccgaatctcctaaagaacatgaccccttcacatacgattatcaatccctgcaaatcggaggattagtgattgccggaattctcttcatcctagggattctgatcgttctttcacggagatgtagatgcaaattcaaccagcagcagcgtactggggaacccgatgaggaggaggggacgttcagatcatctatcaggcgattgtcaacaaggcgaaggtag

SEQ ID NO: 99102 - DNA, 279 bp, Artificial Sequence
  derived and/or modified sequence
atggcaagtctgggccacatcttggtgttttgcgttggcttgctcaccatggcaaaggctgagtcccctaaggaacacgacccctttacctatgattaccagagccttcaaataggtgggcttgtgattgcagggatattgtttattctgggcattctgatcgtgttgtcacgccgatgccggtgtaaattcaatcagcagcaaagaacaggggaacccgatgaagaggagggtacctttcgcagttcaatccgcaggctttccacgagacgaaggtag

SEQ ID NO: 99103 - DNA, 279 bp, Artificial Sequence
  derived and/or modified sequence
atggccagcctgggccacatcctggtgttctgtgtgggcctgctgaccatggccaaggccgagagccccaaggagcatgaccccttcacctatgactaccagagcctgcagatcggcggcctggtgattgctggcatcctcttcatcctgggcatcctgattgtgctgagccgccgctgccgctgcaagttcaaccagcagcagaggactggagagccagatgaggaggagggcaccttccgcagcagcatccggcggctgagcaccaggagaagatag

SEQ ID NO: 99104 - DNA, 279 bp, Artificial Sequence
  derived and/or modified sequence
atggccagcctgggccacatcctggtgttctgcgtgggcctgctgacaatggcaaaggctgaatctcccaaagagcacgatcccttcacctacgactaccagagtctgcagatcggtgggctcgtgatcgctggaatcttgttcatactgggtattctgatcgttctgagcaggagatgtcgctgtaaattcaaccagcagcaacgcacaggcgagcccgatgaagaggaaggtacattcagaagtagcatccgccggcttagcactagacgacgatag

SEQ ID NO: 99105 - DNA, 279 bp, Artificial Sequence
  derived and/or modified sequence
atggccagcctgggccacatcctggtgttctgcgtgggcctgctgacaatggcaaaggctgagtcacccaaagagcacgacccttttacttacgactatcaatccctgcaaattggcgggctggttatcgcggggattctcttcattctcggcattctgatagtgttatctagaagatgccgatgcaagtttaatcagcagcagagaaccggagagcctgatgaggaagaaggcacatttaggtccagtattcggaggctaagcacgcggaggagatag

SEQ ID NO: 99106 - DNA, 279 bp, Artificial Sequence
  derived and/or modified sequence
atggcctctctgggccacattctcgtgttttgtgtaggactcttaactatggcaaaggcggagagtccaaaagagcatgatccctttacctatgactaccagtcactccagattggcggactggtcatcgccggtattttattcattctcggtatcttgattgtcctgagcaggcggtgccgctgcaaattcaatcagcaacaacggacgggtgagcccgacgaagaggagggtacctttagaagctctattagaaggctgtccacccggcgtcggtag

SEQ ID NO: 99107 - DNA, 279 bp, Artificial Sequence
  derived and/or modified sequence
atggccagcttagggcatattctggtattctgtgtgggcctgctcactatggccaaggccgagtctccaaaagagcatgacccgttcacctatgattaccagagcctgcagatcggaggactggtcattgcaggcatacttttcattctgggtatcctcattgttctgtctaggaggtgccggtgcaagtttaatcagcaacagcgcacaggtgagcccgacgaggaagaggggacctttcgctcttccatacgacggctgtccacccggagacggtag

SEQ ID NO: 99108 - DNA, 279 bp, Artificial Sequence
  derived and/or modified sequence
atggccagcctgggccacatcctggtgttctgcgtgggcctgctgaccatggccaaggccgagagccccaaggagcacgaccccttcacctacgactaccagagcctgcagatcggcggcctggtgatcgccggcatcctgttcatcctgggcatcctgatcgtgctgagcagaagatgcagatgcaagttcaaccagcagcagagaaccggcgagcccgacgaggaggagggcaccttcagaagcagcatcagaagactgagcaccagaagaagatag

SEQ ID NO: 99109 - protein, 373 aa, Artificial Sequence
  derived and/or modified sequence
MDRSSLLQLIQEQQLDPENTGFIGADTFTGLVHSHELPLDPAKLDMLVALAQSNEQGQVCYQELVDLISSKRSSSFKRAIANGQRALPRDGPLDEPGLGVYKRFVRYVAYEILPCEVDRRWYFYRHRSCPPPVFMASVTLAQIIVFLCYGARLNKWVLQTYHPEYMKSPLVYHPGHRARAWRFLTYMFMHVGLEQLGFNALLQLMIGVPLEMVHGLLRISLLYLAGVLAGSLTVSITDMRAPVVGGSGGVYALCSAHLANVVMNWAGMRCPYKLLRMVLALVCMSSEVGRAVWLRFSPPLPASGPQPSFMAHLAGAVVGVSMGLTILRSYEERLRDQCGWWVVLLAYGTFLLFAVFWNVFAYDLLGAHIPPPP

SEQ ID NO: 99110 - protein, 310 aa, Artificial Sequence
  derived and/or modified sequence
MDRSSLLQLIQEQQLDPENTGFIGADTFTGLVHSHELPLDPAKLDMLVALAQSNEQGQVCYQELVDLISSKRSSSFKRAIANGQRALPRDGPLDEPGLGVYKRFVRYVAYEILPCEVDRRWYFYRHRSCPPPVFMASVTLAQIIVFLCYGARLNKWVLQTYHPEYMKSPLVYHPGHRARAWRFLTYMFMHVGLEQLGFNALLQLMIGVPLEMVHGLLRISLLYLAGVLAGSLTVSITDMRAPVVGGSGGVYALCSAHLANVVMVTGLPGGGRGEGPQVSLTTSRLHTPIELGWDEMSLQVAEDGAGLGVQ

SEQ ID NO: 99111 - DNA, 1122 bp, Artificial Sequence
  derived and/or modified sequence
atggacagaagcagcctgctgcagctgatccaggagcagcagctggaccccgagaacaccggcttcatcggcgccgacaccttcaccggcctggtgcacagccacgagctgcccctggaccccgccaagctggacatgctggtggccctggcccagagcaacgagcagggccaggtgtgctaccaggagctggtggacctgatcagcagcaagagaagcagcagcttcaagagagccatcgccaacggccagagagccctgcccagagacggccccctggacgagcccggcctgggcgtgtacaagagattcgtgagatacgtggcctacgagatcctgccctgcgaggtggacagaagatggtacttctacagacacagaagctgccccccccccgtgttcatggccagcgtgaccctggcccagatcatcgtgttcctgtgctacggcgccagactgaacaagtgggtgctgcagacctaccaccccgagtacatgaagagccccctggtgtaccaccccggccacagagccagagcctggagattcctgacctacatgttcatgcacgtgggcctggagcagctgggcttcaacgccctgctgcagctgatgatcggcgtgcccctggagatggtgcacggcctgctgagaatcagcctgctgtacctggccggcgtgctggccggcagcctgaccgtgagcatcaccgacatgagagcccccgtggtgggcggcagcggcggcgtgtacgccctgtgcagcgcccacctggccaacgtggtgatgaactgggccggcatgagatgcccctacaagctgctgagaatggtgctggccctggtgtgcatgagcagcgaggtgggcagagccgtgtggctgagattcagcccccccctgcccgccagcggcccccagcccagcttcatggcccacctggccggcgccgtggtgggcgtgagcatgggcctgaccatcctgagaagctacgaggagagactgagagaccagtgcggctggtgggtggtgctgctggcctacggcaccttcctgctgttcgccgtgttctggaacgtgttcgcctacgacctgctgggcgcccacatccccccccccccctag

SEQ ID NO: 99112 - DNA, 933 bp, Artificial Sequence
  derived and/or modified sequence
atggacagaagcagcctgctgcagctgatccaggagcagcagctggaccccgagaacaccggcttcatcggcgccgacaccttcaccggcctggtgcacagccacgagctgcccctggaccccgccaagctggacatgctggtggccctggcccagagcaacgagcagggccaggtgtgctaccaggagctggtggacctgatcagcagcaagagaagcagcagcttcaagagagccatcgccaacggccagagagccctgcccagagacggccccctggacgagcccggcctgggcgtgtacaagagattcgtgagatacgtggcctacgagatcctgccctgcgaggtggacagaagatggtacttctacagacacagaagctgccccccccccgtgttcatggccagcgtgaccctggcccagatcatcgtgttcctgtgctacggcgccagactgaacaagtgggtgctgcagacctaccaccccgagtacatgaagagccccctggtgtaccaccccggccacagagccagagcctggagattcctgacctacatgttcatgcacgtgggcctggagcagctgggcttcaacgccctgctgcagctgatgatcggcgtgcccctggagatggtgcacggcctgctgagaatcagcctgctgtacctggccggcgtgctggccggcagcctgaccgtgagcatcaccgacatgagagcccccgtggtgggcggcagcggcggcgtgtacgccctgtgcagcgcccacctggccaacgtggtgatggtgaccggcctgcccggcggcggcagaggcgagggcccccaggtgagcctgaccaccagcagactgcacacccccatcgagctgggctgggacgagatgagcctgcaggtggccgaggacggcgccggcctgggcgtgcagtag

SEQ ID NO: 99113 - DNA, 1122 bp, Artificial Sequence
  derived and/or modified sequence
atggatcgttcctcactcctgcagctgatccaggagcaacagctggatcccgagaacactggtttcattggcgcagacaccttcaccggcctcgtccattctcatgagcttccgctggatccggccaagttagacatgctggttgccttagcgcagtcgaacgaacaaggacaagtgtgctaccaggagctggtcgatctgatttccagcaagcgttcctcatcctttaagcgcgccattgccaacggtcagcgggctctgccaagagatggacccctggacgagcccggcctcggtgtgtataagaggttcgttcgctacgtggcgtatgaaatattgccctgtgaggtggacagacgttggtacttctacaggcatcggtcgtgtccgccccctgtcttcatggcctccgtaacacttgcccagattatcgtttttctctgctatggagcccgcctgaataagtgggtgcttcaaacctatcatcccgaatacatgaagtctcctctcgtttaccacccaggacacagggcaagggcatggaggttcctcacctacatgttcatgcacgttgggctggagcaactgggttttaatgctctgcttcagttaatgatcggagtgcctttggaaatggtgcacggtctccttagaattagcctgctgtatctcgctggggtcttggccggctctcttacagtttctatcacggacatgagggcacctgtggtcgggggaagcggaggggtctatgctctatgctcagcgcacctggctaacgtggtcatgaactgggccggcatgcgctgcccatataaactactccgtatggttttggcgctggtatgtatgtcaagtgaagtaggtagagctgtgtggctccgattctcaccaccgctcccagcctccggaccccagccaagttttatggcacacctggccggcgccgttgtgggtgtttctatggggctcaccatactcagaagttacgaggagaggctgcgagaccaatgcggatggtgggttgtgttgctagcttacggaacctttctgctgttcgcagttttctggaacgtgtttgcttacgacctattaggcgcccacatcccccctcccccttag

SEQ ID NO: 99114 - DNA, 933 bp, Artificial Sequence
  derived and/or modified sequence
atggacaggtcctcactcttgcaactgatccaggaacagcaacttgaccccgaaaacacaggctttattggggcagacactttcactggtcttgtgcacagccatgaactgcccctcgacccagcaaaactggatatgttggtggctctcgcccagtcaaatgagcaagggcaggtgtgttaccaggagctcgttgatctcattagctctaagaggtcctctagttttaaaagggccatcgcaaatggtcaacgggctctgccccgtgacgggcccttggatgagccgggtctgggtgtgtacaagcgtttcgtgaggtacgttgcatatgagatccttccttgtgaggttgatcgacgttggtacttttatcggcacagaagctgtcccccccctgtgtttatggccagcgtgacattggctcagatcatcgtcttcctgtgctatggagcccgcctgaataagtgggtcctgcagacgtatcacccagaatatatgaaatctccactcgtgtaccaccctgggcaccgcgcccgagcttggaggtttctgacttacatgtttatgcacgtgggcctggagcagcttggctttaatgccctacttcagctcatgataggggtgcctctggaaatggtccacggcctgctacggatatccctgttgtacctcgccggtgtcctcgcaggctccctgaccgtgagtatcacagatatgcgcgcaccggtcgtcggcggtagcggtggcgtatatgctctgtgctctgctcacctggccaatgttgttatggtcactggcctgccaggaggagggaggggggaaggcccacaagtttctcttaccaccagtcgcctgcacacccccatcgagttaggctgggacgagatgtccctgcaagtagccgaagacggagctggactgggcgtacagtag

SEQ ID NO: 99115 - DNA, 1122 bp, Artificial Sequence
  derived and/or modified sequence
atggacaggagcagcctgctgcagctgatccaggagcagcagctggaccctgagaacacaggcttcatcggggctgacaccttcaccggcctggtgcacagccatgagctgcccctggaccctgccaagctggacatgctggtggccctggcccagagcaatgagcagggccaggtgtgctaccaggagctggtggacctgatcagcagcaagaggagcagcagcttcaagagggccatcgccaacggccagagggccctgcccagagatggccccctggatgagcccggcctgggcgtgtacaagagatttgtgcgctacgtggcctatgagatcctgccctgtgaggtggaccggcgctggtacttctaccgccacaggagctgccccccacctgtgttcatggcctctgtgaccctggcccagatcatcgtgttcctgtgctatggagcccggctgaacaagtgggtgctgcagacctaccaccctgagtacatgaagagccccctggtgtaccaccctggccaccgggcccgggcctggaggttcctgacctacatgttcatgcacgtgggcctggagcagctgggcttcaatgccctgctgcagctgatgattggagtgcccctggagatggtgcacggcctgctgcgcatcagcctgctgtacctggccggcgtgctggccggcagcctgactgtgtccatcacagacatgagggcccctgtggtgggcggcagcggaggagtgtatgccctgtgcagcgcccacctggccaacgtggtgatgaactgggccggcatgcgctgcccctacaagctgctgaggatggtgctggccctggtgtgcatgagcagcgaggtgggccgggctgtgtggctgcgcttcagcccccccctgcctgccagcggcccccagcccagcttcatggcccacctggccggggctgtggtgggcgtgtccatgggcctgaccatcctgcggagctatgaggagcggctgcgggaccagtgtggctggtgggtggtgctgctggcctacggcaccttcctgctgtttgctgtgttctggaatgtgtttgcctatgacctgctgggcgcccacatccccccaccaccctag

SEQ ID NO: 99116 - DNA, 933 bp, Artificial Sequence
  derived and/or modified sequence
atggacaggagcagcctgctgcagctgatccaggagcagcagctggaccctgagaacacaggcttcatcggggctgacaccttcaccggcctggtgcacagccatgagctgcccctggaccctgccaagctggacatgctggtggccctggcccagagcaatgagcagggccaggtgtgctaccaggagctggtggacctgatcagcagcaagaggagcagcagcttcaagagggccatcgccaacggccagagggccctgcccagagatggccccctggatgagcccggcctgggcgtgtacaagagatttgtgcgctacgtggcctatgagatcctgccctgtgaggtggaccggcgctggtacttctaccgccacaggagctgccccccacctgtgttcatggcctctgtgaccctggcccagatcatcgtgttcctgtgctatggagcccggctgaacaagtgggtgctgcagacctaccaccctgagtacatgaagagccccctggtgtaccaccctggccaccgggcccgggcctggaggttcctgacctacatgttcatgcacgtgggcctggagcagctgggcttcaatgccctgctgcagctgatgattggagtgcccctggagatggtgcacggcctgctgcgcatcagcctgctgtacctggccggcgtgctggccggcagcctgactgtgtccatcacagacatgagggcccctgtggtgggcggcagcggaggagtgtatgccctgtgcagcgcccacctggccaacgtggtgatggtgacaggcctgcccggcggcggccgcggggagggcccccaggtgtccctgaccaccagccggctgcacacccccatcgagctgggctgggatgagatgagcctgcaggtggccgaggatggagctggcctgggcgtgcagtag

SEQ ID NO: 99117 - DNA, 1122 bp, Artificial Sequence
  derived and/or modified sequence
atggaccggagcagcctgctgcagctgatccaggagcagcagctggaccctgaaaatactggcttcataggagccgacacattcaccggacttgtgcacagccacgagctgcccctcgatccagctaaactggatatgctagtcgccctggcgcagagcaacgaacagggtcaggtgtgctaccaagagctggtagacctcatcagctctaagagaagctctagctttaagagagctatcgccaatggccagcgtgccctgccaagagacgggccactagatgagccagggctcggcgtttacaaaaggtttgtgagatatgttgcctatgagatcctgccctgtgaagtggataggaggtggtatttttataggcaccgttcctgccccccccccgtcttcatggcctcagtcaccctcgcccaaattattgtgttcctttgctatggggctcgattgaataaatgggttcttcagacctaccaccccgaatacatgaaatctcccttggtgtaccaccccgggcatcgcgccagagcctggaggtttctcacttacatgttcatgcatgtaggtttggagcagctgggattcaatgccctgctccaattgatgatcggcgttccgttagagatggtccatggcttattaaggatctctctgttgtatcttgccggcgtgctagccggctccctcactgtgtctatcaccgacatgcgggcgcccgtcgtaggcggctcaggaggcgtgtacgctctctgctccgctcaccttgctaacgtggttatgaattgggctgggatgaggtgcccctacaagctgctacggatggtccttgctcttgtatgcatgtctagcgaagtgggaagggccgtttggctccgttttagtcctccgctgcctgccagcggacctcaacccagttttatggcacacctggccggagccgtcgtgggagtcagcatgggattgaccattctgcgttcgtacgaggagcgactacgtgaccagtgtggttggtgggttgtcctgctggcgtatggtacattcctgcttttcgctgttttttggaacgtctttgcctatgatctactgggagcgcatataccccctcccccctag

SEQ ID NO: 99118 - DNA, 933 bp, Artificial Sequence
  derived and/or modified sequence
atggaccggagcagcctgctgcagctgatccaggagcagcagctggatccagagaatactgggtttattggggcagacacgtttacaggactggtgcactcgcatgagctgcctcttgatccagctaagcttgatatgctcgtggcccttgcacagagtaacgagcaagggcaggtctgctaccaggaactcgtcgaccttatttcctcaaagaggtcctcaagtttcaagagagccatcgccaatggacagcgggctctcccacgcgatggtcccctggacgaacccgggttgggggtgtacaagcggtttgttcgttatgtcgcttacgaaattctgccttgtgaagttgatcggcgttggtacttctatcgccatagatcttgcccacctccagtgttcatggcgagtgtaacactagctcagattatcgtctttctgtgttacggagcaagactgaacaagtgggtactgcaaacttatcaccctgagtatatgaagtccccgctagtttatcatcccggacatagagctcgggcatggcggttcctcacgtacatgtttatgcacgtggggctggaacagctgggctttaacgcgctgctccagctgatgataggcgttcctctggaaatggttcatggcctgctaagaataagcctcctttacctggccggagtgctggcaggctcgctaacagtgagcatcacagatatgcgggccccggtggtagggggtagcggcggagtctacgctctctgtagcgcccacttggctaacgtagtgatggtaacaggtctgcccggagggggtcggggcgaagggcctcaagtctctctcacaaccagcagattacatacccccatagaacttggctgggacgaaatgagtctccaggtggccgaagacggggcaggactgggcgtgcagtag

SEQ ID NO: 99119 - DNA, 1122 bp, Artificial Sequence
  derived and/or modified sequence
atggatagatcaagtttactccagttaattcaagagcagcagctggatccggagaacacgggcttcatcggcgcagatacctttacaggcctggtgcattcccatgaactgcctctggatcctgcgaagttggacatgctcgtggctctggcacaaagcaatgaacagggtcaggtttgttaccaggaactggtagatctcataagcagtaagagatcctcgagctttaaacgggctatcgccaacggacagcgggctctccctcgggacggacctctggacgagccaggactcggcgtgtataagcgattcgtacgatatgtggcatatgagatccttccctgtgaggttgacaggcgctggtacttttatcgacaccgaagctgtcctccacccgtctttatggctagtgtgactctcgcccagataatagtattcctgtgctatggggcacgattgaataaatgggtactgcagacctatcaccccgagtacatgaaaagcccactcgtctatcaccccggtcatcgtgctagggcttggcggttcctgacatatatgtttatgcacgtgggtctggagcagctcggtttcaacgctctcctccaactcatgatcggcgtgcccttggaaatggttcatggactcctgcgcatttcattactatacctagccggtgtgctggcagggtccctaacagtgtctattaccgacatgcgggctcccgtggttgggggttcgggtggggtgtacgccctgtgcagtgctcatctggctaacgttgtgatgaactgggcaggtatgagatgcccctacaagctgctccgtatggttcttgccttggtgtgtatgtcatccgaagtggggagagcagtgtggcttcggtttagtccacctttacccgcaagtggtccccaacccagtttcatggcccatttggctggtgcggtcgtgggcgtgagcatggggttgactatcctaagatcctacgaagaaaggctgcgggatcagtgtggttggtgggttgtgcttctcgcctatggaacctttctgctgtttgccgtgttttggaatgtctttgcttacgatcttctcggagcccacatcccgcctcctccatag

SEQ ID NO: 99120 - DNA, 933 bp, Artificial Sequence
  derived and/or modified sequence
atggatcgtagctccctcttgcaattaatacaggaacagcagctggatcctgaaaacacggggttcatcggcgctgataccttcactggcttggtgcatagtcacgaattgcctctcgaccccgcaaagctcgatatgctggtcgccttggcccagagcaacgagcagggacaggtctgctatcaggagctggtggacctcatttctagtaaacggtcatcgagttttaaacgcgcaatcgcaaatggacagagagccttgccacgagatggccctctggatgaaccagggttgggcgtatacaaacgattcgtgcggtacgttgcatacgaaatactgccttgcgaggtggatcggagatggtatttttataggcatagatcctgcccgcctcccgtattcatggccagcgttaccctcgcacagatcattgtgttcctgtgctatggtgccagactgaacaagtgggtactgcagacatatcaccccgaatatatgaaatctcccctggtttaccatccaggacaccgcgcacgagcatggagattcctgacttacatgtttatgcacgtcggcctggaacaactgggctttaacgctttattgcagctcatgatcggagtgccactggagatggttcacggtctgctgcggattagcctgctgtatttggctggagtcctggccggaagcctcaccgtgtccattaccgacatgcgggctcccgtggtgggcggttcgggtggagtgtatgcgctctgttccgcccacctagcgaacgtcgtgatggtgaccgggctgcctggcggtggcagaggggaagggccacaagtgagcttgaccactagtagattgcacacacccatagagctgggatgggacgaaatgagcctccaggtcgccgaggacggggcagggctgggcgttcagtag

SEQ ID NO: 99121 - DNA, 1463 bp, Artificial Sequence
  derived and/or modified sequence
ggcccaagcgcggcgccgagcggagcgggcggagcgggccggctggggcggagcggagtcgtccgcagagcagcccctcccggccgcggccgccgaccccggaccccggcccccggccaggctctatggacaggagctcgctgctgcagctcatccaggagcagcagctggaccccgagaacacaggcttcatcggtgcggacaccttcactggcctggtgcacagccatgagctgcccctggacccggccaagctggacatgctggtggccctggctcagagcaacgagcagggccaggtctgctaccaggagctggtggacctgatcagcagcaagcgctccagcagtttcaagcgggccattgctaacggacagcgggcactgccccgggacgggccgctggatgagccaggcctaggtgtctacaagcggtttgtgcgttacgtggcctacgagatcctgccttgtgaggtggaccgccgctggtacttctaccgtcaccgcagctgcccaccccccgtgttcatggcctcggtcactcttgcccagatcatcgtgttcctgtgttacggggcccgcctcaacaagtgggtgctgcagacctaccaccccgagtacatgaagagcccccttgtgtaccaccccgggcaccgtgcccgcgcctggcgcttcctcacctacatgttcatgcacgttgggctggagcagctggggttcaacgccctcctgcagctgatgatcggggtgcccctggagatggtgcacggcctgctccgcatcagcctgctctacctggcaggcgtgctggcaggctccctaaccgtctccatcaccgacatgcgggccccggtggtgggaggctccggcggggtctacgccctgtgctcggcacacctggccaacgttgtcatgaactgggctgggatgagatgtccctacaagttgctgaggatggtgctggccttggtgtgcatgagctccgaggtgggccgggccgtgtggctgcgcttctccccgccgctgcccgcctcgggcccacagcccagcttcatggcgcacctggcaggcgcggtggtgggggtgagcatgggcctgaccatcctgcggagctacgaggagcgcctgcgggaccagtgcggctggtgggtggtgctgctggcctacggcaccttcctgctcttcgccgtcttctggaacgtcttcgcctacgacctgctgggcgcccacatccccccaccgccctgaccggctacctgaggctgcacaggccagggctcgggcatgtggtggccgcccaccaggggccttcacgtctgccctttgtgaacggacgtctcagggctgctgtgccccttgggtgtgggtggcctcaaaggaggccctgtcccagccacccaccccccactcccaggacttgcggtctgagcctttttggataattaataaatattttacacagca

SEQ ID NO: 99122 - DNA, 1566 bp, Artificial Sequence
  derived and/or modified sequence
agtcgtccgcagagcagcccctcccggccgcggccgccgaccccggaccccggcccccggccaggctctatggacaggagctcgctgctgcagctcatccaggagcagcagctggaccccgagaacacaggcttcatcggtgcggacaccttcactggcctggtgcacagccatgagctgcccctggacccggccaagctggacatgctggtggccctggctcagagcaacgagcagggccaggtctgctaccaggagctggtggacctgatcagcagcaagcgctccagcagtttcaagcgggccattgctaacggacagcgggcactgccccgggacgggccgctggatgagccaggcctaggtgtctacaagcggtttgtgcgttacgtggcctacgagatcctgccttgtgaggtggaccgccgctggtacttctaccgtcaccgcagctgcccaccccccgtgttcatggcctcggtcactcttgcccagatcatcgtgttcctgtgttacggggcccgcctcaacaagtgggtgctgcagacctaccaccccgagtacatgaagagcccccttgtgtaccaccccgggcaccgtgcccgcgcctggcgcttcctcacctacatgttcatgcacgttgggctggagcagctggggttcaacgccctcctgcagctgatgatcggggtgcccctggagatggtgcacggcctgctccgcatcagcctgctctacctggcaggcgtgctggcaggctccctaaccgtctccatcaccgacatgcgggccccggtggtgggaggctccggcggggtctacgccctgtgctcggcacacctggccaacgttgtcatggtaacgggcctgcccggtggggggcgtggggaggggccccaggtgagcctcaccacttctcgtctgcacacacccatagaactgggctgggatgagatgtccctacaagttgctgaggatggtgctggccttggtgtgcagtgagtaggggccggggggagggccggggggcctctcagcctgcagccagggcacctcccacctgccgcgtccctctgcagtgagctccgaggtgggccgggccgtgtggctgcgcttctccccgccgctgcccgcctcgggcccacagcccagcttcatggcgcacctggcaggcgcggtggtgggggtgagcatgggcctgaccatcctgcggagctacgaggagcgcctgcgggaccagtgcggctggtgggtggtgctgctggcctacggcaccttcctgctcttcgccgtcttctggaacgtcttcgcctacgacctgctgggcgcccacatccccccaccgccctgaccggctacctgaggctgcacaggccagggctcgggcatgtggtggccgcccaccaggggccttcacgtctgccctttgtgaacggacgtctcagggctgctgtgccccttgggtgtgggtggcctcaaaggaggccctgtcccagccacccaccccccactcccaggacttgcggtctgagcctttttggataattaataaatattttacacagc

SEQ ID NO: 99123 - protein, 504 aa, Artificial Sequence
  derived and/or modified sequence
MKNVLQWTPPEGLQGVKVTYTVQYFIYGQKKWLNKSECRNINRTYCDLSAETSDYEHQYYAKVKAIWGTKCSKWAESGRFYPFLETQIGPPEVALTTDEKSISVVLTAPEKWKRNPEDLPVSMQQIYSNLKYNVSVLNTKSNRTWSQCVTNHTLVLTWLEPNTLYCVHVESFVPGPPRRAQPSEKQCARTLKDQSSEFKAKIIFWYVLPVSITVFLFSVMGYSIYRYIHVGKEKHPANLILIYGNEFDKRFFVPAEKIVINFITLNISDDSKISHQDMSLLGKSSDVSSLNDPQPSGNLRPPQEEEEVKHLGYASHLMEIFCDSEENTEGTSLTQQESLSRTIPPDKTVIEYEYDVRTTDICAGPEEQELSLQEEVSTQGTLLESQAALAVLGPQTLQYSYTPQLQDLDPLAQEHTDSEEGPEEEPSTTLVDWDPQTGRLCIPSLSSFDQDSEGCEPSEGDGLGEEGLLSRLYEEPAPDRPPGENETYLMQFMEEWGLYVQMEN

SEQ ID NO: 99124 - protein, 238 aa, Artificial Sequence
  derived and/or modified sequence
MELTQPAEDLIQTQQTPASELGDPEDPGEEAADGSDTVVLSLFPCTPEPVNPEPDASVSSPQAGSSLKHSTTLTNRQRGNEVSALPATLDCDNLVNKPDERGFTPLIWASAFGEIETVRFLLEWGADPHILAKERESALSLASTGGYTDIVGLLLERDVDINIYDWNGGTPLLYAVRGNHVKCVEALLARGADLTTEADSGYTPMDLAVALGYRKVQQVIENHILKLFQSNLVPADPE

SEQ ID NO: 99125 - DNA, 192 bp, Artificial Sequence
  derived and/or modified sequence
atggaactgacgcagcccgctgaggatctgatccagactcagcaaactcctgcttccgagctgggagatcccgaagatccgggagaagaggccgcggatgggtcagacaccgtcgtcctttctttgtttccttgtacaccagagccagtgaatccagagcctgatgcctccgtgtcttcccctcaggcgtag

SEQ ID NO: 99126 - DNA, 717 bp, Artificial Sequence
  derived and/or modified sequence
atggagctgacccagccagcagaagatctaatccaaacacagcagacccctgcatctgagctgggggatccggaagaccccggcgaagaagcagcagatgggtccgacaccgttgtgttgtcattattcccatgtacacccgagcccgtgaaccctgaacctgatgcttccgtgagcagcccccaagctggttcatccctgaaacactctacaacactgacaaatagacagagaggaaacgaagtctcagcactgcccgcgacccttgattgcgacaatctcgtgaataagccagacgagaggggcttcactccactgatttgggcctcagcctttggagagattgagacggtccgctttttactggaatggggcgccgaccctcacatcttagccaaggaaagggagtcagcactgtctcttgcaagtacagggggatacacagatatcgtggggctcctactggagcgcgacgttgatattaatatttacgattggaacggcggtactcccctgctctacgcagtccgcggcaaccacgtgaagtgtgtggaggctctgctggccagaggagccgatctcaccactgaagctgactctggatatacacctatggacctggctgtcgcactcggctatcggaaggtgcaacaggtgattgaaaatcatatccttaagctgttccaatctaatctcgttcccgccgacccagaatag

SEQ ID NO: 99127 - DNA, 192 bp, Artificial Sequence
  derived and/or modified sequence
atggagctgacccagcctgctgaggacctgatccagacccagcagaccccagccagcgagctgggggaccctgaagatcctggagaggaggccgcagatggcagtgacacagtggtgctgagcctcttcccctgcaccccagagcctgtgaaccctgagccagatgcctctgtgagcagcccccaggcctag

SEQ ID NO: 99128 - DNA, 717 bp, Artificial Sequence
  derived and/or modified sequence
atggagctgacccagcctgctgaggacctgatccagacccagcagaccccagccagcgagctgggggaccctgaagatcctggagaggaggccgcagatggcagtgacacagtggtgctgagcctcttcccctgcaccccagagcctgtgaaccctgagccagatgcctctgtgagcagcccccaggccggcagcagcctgaagcacagcaccaccctgaccaaccggcagagaggaaatgaggtgtctgccctgcctgccaccctggactgtgacaacctggtgaacaagccagatgagcggggcttcacccccctcatctgggccagcgccttcggggagattgaaacagtgcgcttcctgctggagtggggcgctgacccccacatcctggccaaggagcgggagagcgccctgagcctggccagcactggaggctacacagacatcgtgggcctgctgctggagagagatgtggacatcaacatctatgactggaatggaggcacccccctgctgtatgctgtgcggggcaaccacgtgaagtgtgtggaggccctgctggcccggggagctgacctgaccacagaggccgacagcggctacacccccatggacctggccgtggccctgggctacaggaaggtgcagcaggtgattgagaaccacatcctgaagctgttccagagcaacctggtgcctgctgaccctgagtag

SEQ ID NO: 99129 - DNA, 192 bp, Artificial Sequence
  derived and/or modified sequence
atggagctgacccagcccgccgaggacctgatccagacccagcagactcccgcttccgaactcggcgatcctgaggacccaggagaagaggcagccgatggctcagacacggtggtgttatcgttatttccctgcactcctgagccagtgaatcctgagcccgacgcaagcgtctctagtccccaggcatag

SEQ ID NO: 99130 - DNA, 717 bp, Artificial Sequence
  derived and/or modified sequence
atggagctgacccagcccgccgaggacctgatccagacccagcagacccctgcaagtgagctcggggaccccgaggatccaggcgaagaggctgccgatggatcagacacggttgtgcttagcttgtttccttgcacacccgaacccgttaatccagagccagacgccagcgtgtcaagccctcaggcggggtcatctcttaaacacagcacaaccttaaccaatcggcaacgggggaacgaggttagcgcgctgccagctacactggattgcgataacttagtgaataagccggatgagcgaggatttacaccccttatatgggcctctgcatttggggagatcgagactgtgaggtttttactggagtggggcgctgatccacacatcctggccaaagagagagaatctgcgctgtccctggcaagtacgggcgggtataccgacattgttggattgctgttggagcgtgatgttgacataaatatctatgattggaacggtggtacccccctgctctatgcggtgcgcggaaatcacgttaaatgcgttgaggcattgctggcccgaggtgctgatctgactaccgaagctgatagcggctacacaccaatggacctggccgtggctttaggatacaggaaagtacaacaggttattgagaaccatatcctgaagctcttccagagcaatttggtgccggctgatcccgaatag

SEQ ID NO: 99131 - DNA, 192 bp, Artificial Sequence
  derived and/or modified sequence
atggaactcactcagccagctgaggatctcatccaaactcagcagacccccgcttctgagctgggagaccctgaagatcccggtgaagaagccgctgacggaagcgacacagtggtgctgagcctcttcccttgcaccccagaacccgtgaatcctgaacctgacgcctccgtgtcttctccccaggcttag

SEQ ID NO: 99132 - DNA, 717 bp, Artificial Sequence
  derived and/or modified sequence
atggagttgactcagcctgcagaggacctgattcagacacaacagacacccgcaagcgagttaggcgatcccgaagacccaggggaagaagccgcagacggatctgacaccgtggtgctctctctgttcccatgcactccggagcccgtgaatcccgagcctgacgccagtgtttcctctccacaggcaggttcaagcctgaagcatagcaccactctgactaataggcagcgtggtaacgaagtctctgctctgcccgctacccttgattgtgacaacttggtgaataagcctgacgaaagggggtttacacccctgatttgggcctctgcattcggcgagattgagaccgtgcggtttctcctagagtggggagcagaccctcacattctagcaaaagagagggaatccgcgctcagtctggcctctactggaggctataccgacatcgttggacttctgctcgaacgtgacgtcgacatcaatatttatgattggaacggaggaaccccattgctatacgctgtcagggggaaccacgtcaagtgcgtagaggctctcctcgcacgcggagccgatttgacaacagaagcagacagcggttacacgccaatggatctggctgtggcccttggttatcgtaaggtccagcaggtgatcgagaaccacatcttgaagttatttcagtccaacctggttcctgcagacccagaatag

SEQ ID NO: 99133 - DNA, 796 bp, Artificial Sequence
  derived and/or modified sequence
cagagggcccgccctccccgctcctcagtctttgcggacaagaaaggggctgtgtgagacgcagggaaggaggcacacccgggggtggcgcagtgaggagggggcgcgacggccaggaggctggtggagcgacacccaggcaggagagggggaagaactctctccctttctgaacccccttttccttgagagacgagttgggggagtcctccacgcattacccactcgggccgcaaaaactcccttctttagccctctgcccccgcccttgcttataagcctttgagaccgcagaagggaccttgttgtggaacgggacggccaaggtacgctgcccctttaagttccagacgccccgcgtacttcccctacttcttcttcttgagatagccccgcccatctacccgaagccggagccaattggctccctctggaaaaatctgtgggcagggtaaagaggaagccagatcgctgagggtccggtctccagtttgcctcctgctatatccattggaagagaaaagtttgtgacttgggcccccaagttttgagagaactgggctttcggcgcggggggacagaggaggctcgtggggagctttccccatggagcttacccagcctgcagaagacctcatccagacccagcagacccctgcctcagaacttggggaccctgaagaccccggagaggaggctgcagatggctcagacactgtggtcctcagtctctttccctgcacccctgagcctgtgaatcctgaaccggatgccagtgtttcctctccacaggcag

SEQ ID NO: 99134 - DNA, 1281 bp, Artificial Sequence
  derived and/or modified sequence
tccccgctcctcagtctttgcggacaagaaaggggctgtgtgagacgcagggaaggaggcacacccgggggtggcgcagtgaggagggggcgcgacggccaggaggctggtggagcgacacccaggcaggagagggggaagaactctctccctttctgaacccccttttccttgagagacgagttgggggagtcctccacgcattacccactcgggccgcaaaaactcccttctttagccctctgcccccgcccttgcttataagcctttgagaccgcagaagggaccttgttgtggaacgggacggccaagaggaagccagatcgctgagggtccggtctccagtttgcctcctgctatatccattggaagagaaaagtttgtgacttgggcccccaagttttgagagaactgggctttcggcgcggggggacagaggaggctcgtggggagctttccccatggagcttacccagcctgcagaagacctcatccagacccagcagacccctgcctcagaacttggggaccctgaagaccccggagaggaggctgcagatggctcagacactgtggtcctcagtctctttccctgcacccctgagcctgtgaatcctgaaccggatgccagtgtttcctctccacaggcaggcagctccctgaagcactccaccactctcaccaaccggcagcgagggaacgaggtgtcagctctgccggccaccctagactgtgacaacctcgtcaacaagccagacgagcgcggcttcacccccctcatctgggcctccgcctttggagagattgagaccgttcgcttcctgctggagtggggtgccgacccccacatcctggcaaaagagcgagagagcgccctgtcgctggccagcacaggcggctacacagacattgtggggctgctgctggagcgtgacgtggacatcaacatctatgattggaatggagggacgccactgctgtacgctgtgcgcgggaaccacgtgaaatgcgttgaggccttgctggcccgaggcgctgacctcaccaccgaagccgactctggctacaccccgatggaccttgccgtggccctgggataccggaaagtgcaacaggtgatcgagaaccacatcctcaagctcttccagagcaacctggtgcccgctgaccctgagtgaaggccgcctgccggggactcagacactcagggaacaaaatggtcagccagagctggggaaacccagaactgacttcaaaggcagcttctggacaggtggtggg

SEQ ID NO: 99135 - DNA, 192 bp, Artificial Sequence
  derived and/or modified sequence
atggagctgacccagcccgccgaggacctgatccagacccagcagacccccgccagcgagctgggcgaccccgaggaccccggcgaggaggccgccgacggcagcgacaccgtggtgctgagcctgttcccctgcacccccgagcccgtgaaccccgagcccgacgccagcgtgagcagcccccaggcctag

SEQ ID NO: 99136 - DNA, 717 bp, Artificial Sequence
  derived and/or modified sequence
atggagctgacccagcccgccgaggacctgatccagacccagcagacccccgccagcgagctgggcgaccccgaggaccccggcgaggaggccgccgacggcagcgacaccgtggtgctgagcctgttcccctgcacccccgagcccgtgaaccccgagcccgacgccagcgtgagcagcccccaggccggcagcagcctgaagcacagcaccaccctgaccaacagacagagaggcaacgaggtgagcgccctgcccgccaccctggactgcgacaacctggtgaacaagcccgacgagagaggcttcacccccctgatctgggccagcgccttcggcgagatcgagaccgtgagattcctgctggagtggggcgccgacccccacatcctggccaaggagagagagagcgccctgagcctggccagcaccggcggctacaccgacatcgtgggcctgctgctggagagagacgtggacatcaacatctacgactggaacggcggcacccccctgctgtacgccgtgagaggcaaccacgtgaagtgcgtggaggccctgctggccagaggcgccgacctgaccaccgaggccgacagcggctacacccccatggacctggccgtggccctgggctacagaaaggtgcagcaggtgatcgagaaccacatcctgaagctgttccagagcaacctggtgcccgccgaccccgagtag

SEQ ID NO: 99137 - protein, 237 aa, Artificial Sequence
  derived and/or modified sequence
MELTQPAEDLIQTQQTPASELGDPEDPGEEAADGSDTVVLSLFPCTPEPVNPEPDASVSSPQGSSLKHSTTLTNRQRGNEVSALPATLDCDNLVNKPDERGFTPLIWASAFGEIETVRFLLEWGADPHILAKERESALSLASTGGYTDIVGLLLERDVDINIYDWNGGTPLLYAVRGNHVKCVEALLARGADLTTEADSGYTPMDLAVALGYRKVQQVIENHILKLFQSNLVPADPE

SEQ ID NO: 99138 - DNA, 714 bp, Artificial Sequence
  derived and/or modified sequence
atggagctcacccagccagctgaagaccttatccaaacccagcagacgccagcctcagagctgggcgatccagaggatcccggagaagaggccgcggatgggtcagatacagtggtgctctccctattcccatgtaccccagaacctgtgaacccggagcctgacgctagcgtctctagcccccagggcagtagcctaaaacactcaaccacactgacaaacaggcaaagaggcaacgaggtcagtgcattacccgctacattagactgcgataaccttgtgaataagcctgatgaaaggggcttcacccccctgatttgggcgtccgcctttggggagatagagaccgtgaggttcttgctggagtggggagccgatccacatattctcgccaaagagagggaaagcgcgttgtcactagcatctacgggtggctatactgatatcgttggattgttgctggaaagggatgttgacattaacatctacgattggaatggaggcactcccttattgtacgcagtccgcggtaatcacgtgaagtgcgtggaggctttactcgctcgaggagccgatttaaccactgaggcagactccggttataccccgatggatctcgcggtagctctgggataccgcaaggtgcaacaggtgatcgaaaaccacatcctcaagctatttcagtccaacctggttccagccgatcctgaatag

SEQ ID NO: 99139 - DNA, 714 bp, Artificial Sequence
  derived and/or modified sequence
atggagctgacccagcctgctgaggacctgatccagacccagcagaccccagccagcgagctgggggaccctgaagatcctggagaggaggccgcagatggcagtgacacagtggtgctgagcctcttcccctgcaccccagagcctgtgaaccctgagccagatgcctctgtgagcagcccccagggcagcagcctgaagcacagcaccaccctgaccaaccggcagagaggaaatgaggtgtctgccctgcctgccaccctggactgtgacaacctggtgaacaagccagatgagcggggcttcacccccctcatctgggccagcgcctttggagaaattgagaccgtgcgcttcctgctggagtggggcgctgacccccacatcctggccaaggagcgggagagcgccctgagcctggccagcactggaggctacacagacatcgtgggcctgctgctggagagagatgtggacatcaacatctatgactggaatggaggcacccccctgctgtatgctgtgcggggcaaccacgtgaagtgtgtggaggccctgctggcccggggagctgacctgaccacagaagctgacagcggctacacccccatggacctggccgtggccctgggctacaggaaggtgcagcaggtgattgagaaccacatcctgaagctgttccagagcaacctggtgcctgctgaccctgagtag

SEQ ID NO: 99140 - DNA, 714 bp, Artificial Sequence
  derived and/or modified sequence
atggagctgacccagcccgccgaggacctgatccagacccagcagaccccagcttccgagttgggggaccccgaagatcctggggaggaggccgcagacggttccgacaccgtggtattatcactgtttccctgtactccagagcctgtgaacccagagcctgacgcatcagttagctcccctcaagggtctagcttgaagcacagcacgacgctaactaaccggcagcgtggtaatgaggtgtccgccctgcccgctactctggattgtgataatcttgtcaataaaccggatgagagaggatttacccctctgatttgggcttctgcatttggagagatcgaaactgttcggtttcttctggagtggggagcagacccccatatccttgccaaggaaagagaatcagctctttccctggcctccacaggcggctacacagatatcgtgggtcttctgctagagcgagacgttgacattaacatttacgattggaatggggggacacccctcctgtatgccgtccgtggaaaccacgtgaagtgcgtcgaggccttattggcaagaggcgcagatctcactactgaggcagactccggctacacaccaatggacctggctgtcgctctcggttatagaaaagtccaacaagtcattgaaaatcacattctgaaattgtttcagtcaaacctggtgccggcggacccagagtag

SEQ ID NO: 99141 - DNA, 714 bp, Artificial Sequence
  derived and/or modified sequence
atggaacttactcagcccgctgaggatttgattcaaacacagcagacccccgcatctgaactgggggacccagaagacccgggagaggaggcagctgacggtagcgatactgtcgttctgtccctgtttccgtgcaccccggagcccgtgaatcctgaacctgacgctagcgtgagtagcccacagggaagctcacttaaacactcgaccacgttgactaaccgacagcgagggaacgaggtctctgccttgcccgcaaccctggattgcgacaacctggtcaacaagcctgatgagcggggattcaccccattgatctgggcttcagcgttcggggaaatcgagacagtgagattcctacttgagtggggcgcagacccacatatcctcgccaaagaaagagaatccgcgctgtccttggcatccactggcggatacaccgatatagtgggactactcctggaaagggatgtcgatatcaacatctatgattggaatggcggtaccccactcctgtacgctgtgaggggaaaccacgtgaaatgcgtggaggctttactagctagaggcgcagaccttaccacagaagcagatagtggctatactcccatggacttggctgtggccctcggttatcgaaaagtgcagcaggtgatcgagaaccacatcctcaaattattccagtccaatctggttcctgccgatcctgagtag

SEQ ID NO: 99142 - DNA, 1369 bp, Artificial Sequence
  derived and/or modified sequence
ccggacgccgcacggctcctgttccggtgtcagagggcccgccctccccgctcctcagtctttgcggacaagaaaggggctgtgtgagacgcagggaaggaggcacacccgggggtggcgcagtgaggagggggcgcgacggccaggaggctggtggagcgacacccaggcaggagagggggaagaactctctccctttctgaacccccttttccttgagagacgagttgggggagtcctccacgcattacccactcgggccgcaaaaactcccttctttagccctctgcccccgcccttgcttataagcctttgagaccgcagaagggaccttgttgtggaacgggacggccaagaggaagccagatcgctgagggtccggtctccagtttgcctcctgctatatccattggaagagaaaagtttgtgacttgggcccccaagttttgagagaactgggctttcggcgcggggggacagaggaggctcgtggggagctttccccatggagcttacccagcctgcagaagacctcatccagacccagcagacccctgcctcagaacttggggaccctgaagaccccggagaggaggctgcagatggctcagacactgtggtcctcagtctctttccctgcacccctgagcctgtgaatcctgaaccggatgccagtgtttcctctccacagggcagctccctgaagcactccaccactctcaccaaccggcagcgagggaacgaggtgtcagctctgccggccaccctagactgtgacaacctcgtcaacaagccagacgagcgcggcttcacccccctcatctgggcctccgcctttggagagattgagaccgttcgcttcctgctggagtggggtgccgacccccacatcctggcaaaagagcgagagagcgccctgtcgctggccagcacaggcggctacacagacattgtggggctgctgctggagcgtgacgtggacatcaacatctatgattggaatggagggacgccactgctgtacgctgtgcgcgggaaccacgtgaaatgcgttgaggccttgctggcccgaggcgctgacctcaccaccgaagccgactctggctacaccccgatggaccttgccgtggccctgggataccggaaagtgcaacaggtgatcgagaaccacatcctcaagctcttccagagcaacctggtgcccgctgaccctgagtgaaggccgcctgccggggactcagacactcagggaacaaaatggtcagccagagctggggaaacccagaactgacttcaaaggcagcttctggacaggtggtgggaggggacccttcccaagaggaaccaataaaccttctgtgcagaatga

SEQ ID NO: 99143 - DNA, 714 bp, Artificial Sequence
  derived and/or modified sequence
atggagctgacccagcccgccgaggacctgatccagacccagcagacccccgccagcgagctgggcgaccccgaggaccccggcgaggaggccgccgacggcagcgacaccgtggtgctgagcctgttcccctgcacccccgagcccgtgaaccccgagcccgacgccagcgtgagcagcccccagggcagcagcctgaagcacagcaccaccctgaccaacagacagagaggcaacgaggtgagcgccctgcccgccaccctggactgcgacaacctggtgaacaagcccgacgagagaggcttcacccccctgatctgggccagcgccttcggcgagatcgagaccgtgagattcctgctggagtggggcgccgacccccacatcctggccaaggagagagagagcgccctgagcctggccagcaccggcggctacaccgacatcgtgggcctgctgctggagagagacgtggacatcaacatctacgactggaacggcggcacccccctgctgtacgccgtgagaggcaaccacgtgaagtgcgtggaggccctgctggccagaggcgccgacctgaccaccgaggccgacagcggctacacccccatggacctggccgtggccctgggctacagaaaggtgcagcaggtgatcgagaaccacatcctgaagctgttccagagcaacctggtgcccgccgaccccgagtag

SEQ ID NO: 99144 - DNA, 1014 bp, Artificial Sequence
  derived and/or modified sequence
atggccgacccagttgccgggattgctgggtctgccgctaagagcgtccgcccatttcggtcgtctgaggcatatgtggaggcgatgaaagaggatttagctgagtggctcaacgcgctctatgggctgggtctgcccggaggtggggacggtttcctgacaggcctcgccacaggtacgacactgtgccagcatgcaaatgcagtgacagaggccgctcgggctctagcggcagcacgcccagcccgtggcgtcgccttccaggctcatagcgtcgtccctggctcatttatggctagagacaacgtcgccacgtttattgggtggtgtagggtggagcttggtgtgcccgaggtcctaatgttcgagactgaagatctggtgctgcgcaagaacgaaaaatccgtagtgctatgtctcctggaggtagcacgcagaggcgcccgtctgggccttctcgccccacgcctggtgcagtttgagcaagaaatcgaacgtgaactccgggcggccccgcctgctcctaacgctcccgctgcaggcgaggacaccactgaaactgctccagccccgggaacacccgcccgcggacccagaatgactccctcagacttgcgaaacctggacgagctggttagggaaatcttgggacgctgcacctgccccgaccaattcccgatgattaaagtgtccgagggcaaataccgtgtaggagacagttccctcctgatcttcgtccgcgtcctcaggtcccacgtcatggtgcgagtaggcggtggctgggacacattagagcactacctggataagcacgatccctgcaggtgcagctcaactgcacacaggcctcctcagccccgcgtctgcaccttcagcccccagcgtgtgtcgcccactacctcgccgcgtcccgcatcacccgtccccggctccgaaagaagaggaagtaggccggagatgacgcccgtctcgctgagatccactaaggagggccccgagacccctcctagatag

SEQ ID NO: 99145 - DNA, 990 bp, Artificial Sequence
  derived and/or modified sequence
atggctgaccctgttgctggaattgccgggtcagctgccaagtctgtcagacccttccggtctagcgaggcatacgttgaagcaatgaaagaggacctggccgagtggctgaatgctttgtatggcctgggtctgcccggtggcggtgacggttttctaactggattggcaactggaaccaccctctgccagcatgccaatgccgtgactgaggctgcacgggcgttagcagcagcccgaccggctcggggcgtggcctttcaagcacactccgtcgtgcccggctctttcatggccagagacaacgtggcaaccttcatcggctggtgtcgggtggagttgggagtgcccgaggtccttatgtttgaaactgaagacctggtactcagaaagaatgagaagagcgtggtgctctgtctgctggaagtggcccgccggggagcccgtctcgggcttctcgcacctcgactggtccaattcgaacaggaaatcgagcgggaacttcgcgcagcaccacctgctccgaatgcccccgctgctggggaggacactactgaaaccgccccggcacctggcacccccgctcggggcccccgcatgacacctagcgatctgaggaatttggatgagctggttagggaaatccttggccggtgtacctgtccggaccagttccctatgattaaagtctccgagggcaaatatagggtaggcgatagctccctattgatatttgtgagggtactacgctcacacgtgatggttcgggtgggcgggggatgggacacactcgagcattacttagacaagcatgacccctgccgctgctcttcaactggccccggcatttcttgtcctccgatacctgctccggcagccaccccgggcacggttactccccagcccccacctccccgtgccgccccgctggtgcctgcagtgatgactcaggcccttgcgccaggtggatccgaccctgcagggggctag

SEQ ID NO: 99146 - DNA, 417 bp, Artificial Sequence
  derived and/or modified sequence
atggcagaccccgtggccggcatcgcgggctccgcagcaaaatccgtgcggccctttagaagttccgaggcgtacgtagaggccatgaaggaggatctggcagaatggctgaacgccctgtatgggcttggtctgcccggaggaggggacgggtttctcacagggctcgcgacaggcacaaccctctgccagcacgccaacgctgttacagaggctgcacgagccttggccgctgcccgccctgccagaggcgtggctttccaggctcattcagtggttcctgggagtttcatggcaagagataacgtcgcgacttttatcggatggtgtcgtgtagagctaggcgtgcctgaggtcctgatgttcgagactgaggatctcgtgcttcgcaaaaatgagaaaagcgttgttctgtag

SEQ ID NO: 99147 - DNA, 432 bp, Artificial Sequence
  derived and/or modified sequence
atggctgaccctgttgcagggatagctgggagcgctgctaaatcagtaagaccctttcgcagctcagaggcctacgtggaagctatgaaggaggacctcgctgagtggctaaacgccttatatggattgggactgcccggagggggagatggctttttgactgggttggctactggaaccactttatgccagcacgcaaatgcagttaccgaggctgctcgagctctggctgccgcccgacccgctagaggcgtggctttccaggctcattctgtggtgcctgggtcatttatggcacgggacaatgtggctacatttattggttggtgccgcgtggagctcggcgtcccagaagttctgatgttcgagaccgaagaccttgttctgcgcaaaaatgaaaagagtgtagtgctgtgtctgttggaagtttag

SEQ ID NO: 99148 - DNA, 2237 bp, Artificial Sequence
  derived and/or modified sequence
gccgcggcgcgggacgcatagagctgcggctcgggcggcgcctccctgcggcggcccggcccggctccggcccccgctggggcaatgctccccggggccgcgggatgagccagtgactcggccggtccgggcatggcagacccagtggcgggcatcgcgggctcggcggccaagagcgtgcggccatttcgctccagtgaggcctacgtggaggccatgaaggaggacctggccgagtggctcaatgccttgtacggcctgggtctcccgggtggtggcgatggcttcctgacagggctggccacgggcacgaccctgtgccaacatgccaacgccgtgaccgaggctgcccgtgcattggcagccgcccgcccggcccgaggtgtggccttccaggcgcacagtgtagtgcctggctccttcatggcgcgcgacaacgtggccaccttcatcggctggtgccgcgtggagctgggtgtgccggaggtgctcatgtttgagactgaggacctggtgctgcgcaagaacgagaagagcgtggtgctgtgcctgctggaggtggcgcggcgtggggcacgcctgggcctgctggccccacgcctcgtgcagtttgagcaggagattgagcgggagctgcgtgctgcacccccagcccccaacgcccctgccgctggggaggacaccactgaaaccgcccccgcaccagggactcctgcccgcggcccccgcatgacacccagcgacctgcgcaacctcgacgagctggtgagggagattctgggccgctgcacctgccctgaccagtttcccatgatcaaggtctcagaggggaagtaccgtgtgggggactcgagcctgctcatctttgtgcgggtgctgaggagccacgtgatggtgcgagtgggtggtggctgggacacgctggagcattacctggacaagcacgacccgtgccgctgctcctccactgctcatcgcccaccccagccgagggtctgcaccttttctccacagagggtgtcgcccaccaccagtccccgccctgctagcccagtccctgggagtgagcgccggggctcccggcctgagatgactcccgttagcttacgaagcacaaaggaggggcccgagaccccacccaggtgagatgcaggaggacgaggagtgaggggtccagagggtgggggggcgtcagccctggcctgcatgatgggttgcctgtgcgccagagtgactcacaccctgggaaaagttcccgtgggtgggggcgggcctggcttcccatctccatggcaacccaaccaaaccaacaacacagctggggcgggccctgtggctgggcggcagccagtccagctcttgcttcctctggcccgtcctgggaaggggggtgtctagagcccaggaaacttcttcttccgtggcttttggggccctgggccgctggaggaagctgctcacttctccctggaagtccccaggacagaccgatgcccctgacagccccgtccaccagccacataccctgctgttcctctccctgcctgttctgcatgccagtccttccgtggtaccccatctgtctctattgtccccctgccccaggccccgggatcagctgcccccccatccccgctcccgccgctactccggggacagtgactcctcagcctcctccgcccagagcggcccccttggtacccgcagtgatgacacaggcactggcccccggagggagcgacccagccggcggctgaccacaggcaccccggcctctccgagacggcctcctgcctgcgcagccagtcccgagaccggctggatcgcggccggccccggggggccccaggaggcaggggagcccagctgtcggtccccagccctgcccggcgggcccggagccagagccgcgaggagcaggctgtgctgcttgtgcgcagggatcgagacgggcagcactcatgggtgccaaggggcaggggcagtgggggctcgggcaggagcaccccccagactccccgtgcccgcagccctgcagcaccccggctttcccgggtctccagccccagtccagagttgggcaccacaccggccagcatcttccgcacacccctgcagctcgacccgcagcaggagcagcagctgttccggcgcctggaagaggagttcctggccaatgcccgggcccttgaggctgttgctagcgtgacccccactggaccagcccctgacccagc

SEQ ID NO: 99149 - DNA, 2308 bp, Artificial Sequence
  derived and/or modified sequence
gacggcggcgaggaggaggccgcggcgcgggacgcatagagctgcggctcgggcggcgcctccctgcggcggcccggcccggctccggcccccgctggggcaatgctccccggggccgcgggatgagccagtgactcggccggtccgggcatggcagacccagtggcgggcatcgcgggctcggcggccaagagcgtgcggccatttcgctccagtgaggcctacgtggaggccatgaaggaggacctggccgagtggctcaatgccttgtacggcctgggtctcccgggtggtggcgatggcttcctgacagggctggccacgggcacgaccctgtgccaacatgccaacgccgtgaccgaggctgcccgtgcattggcagccgcccgcccggcccgaggtgtggccttccaggcgcacagtgtagtgcctggctccttcatggcgcgcgacaacgtggccaccttcatcggctggtgccgcgtggagctgggtgtgccggaggtgctcatgtttgagactgaggacctggtgctgcgcaagaacgagaagagcgtggtgctgtgcctgctggaggtggcgcggcgtggggcacgcctgggcctgctggccccacgcctcgtgcagtttgagcaggagattgagcgggagctgcgtgctgcacccccagcccccaacgcccctgccgctggggaggacaccactgaaaccgcccccgcaccagggactcctgcccgcggcccccgcatgacacccagcgacctgcgcaacctcgacgagctggtgagggagattctgggccgctgcacctgccctgaccagtttcccatgatcaaggtctcagaggggaagtaccgtgtgggggactcgagcctgctcatctttgtgcgggtgctgaggagccacgtgatggtgcgagtgggtggtggctgggacacgctggagcattacctggacaagcacgacccgtgccgctgctcctccactggccccgggatcagctgcccccccatccccgctcccgccgctactccggggacagtgactcctcagcctcctccgcccagagcggcccccttggtacccgcagtgatgacacaggcactggcccccggagggagcgacccagccggcggctgaccacaggcaccccggcctctccgagacggcctcctgcctgcgcagccagtcccgagaccggctggatcgcggccggccccggggggccccaggaggcaggggagcccagctgtcggtccccagccctgcccggcgggcccggagccagagccgcgaggagcaggctgtgctgcttgtgcgcagggatcgagacgggcagcactcatgggtgccaaggggcaggggcagtgggggctcgggcaggagcaccccccagactccccgtgcccgcagccctgcagcaccccggctttcccgggtctccagccccagtccagagttgggcaccacaccggccagcatcttccgcacacccctgcagctcgacccgcagcaggagcagcagctgttccggcgcctggaagaggagttcctggccaatgcccgggcccttgaggctgttgctagcgtgacccccactggaccagcccctgacccagctcgggcccccgaccctccagctcctgactctgcctattgttcctccagttcctcctcttcgtccctcagcgtcctgggtggcaaatgtggccaacctggggactctggccggacggccaatgggctgcctgggccccgaagccaagccctttccagctcctccgatgaaggcagcccctgccctggcatgggggggccactagatgcacctgggagccccctggcttgcactgaaccctcgaggacctgggcacggggtcggatggacacacagccagaccgtaaaccctcacgtatccccacgcctcggggcccccgccgcccctccggacccgcagagctggggacatggcatgccctgcactcagtcaccccgagggctgagccagattcctggatgtgatggaccagctcagctgtccccagaccccatcccttctccttttcctttgtggccttaacccttctgcatcagggagccccctctgcctcttgagtaccagacctcatgggaccagaccccttgggaccacatggcacaatgggacctctgttgtacattccggttgggggatgagcgttgctatttaattactaatattattgaatgccttagaggaggccgggcgagcccggtgttctgaagacctgtggcccagcagagcctctgacagtaaagttttgctcc

SEQ ID NO: 99150 - DNA, 745 bp, Artificial Sequence
  derived and/or modified sequence
cccgggaggaggtgactttgcagcctccagccgctatcgcttcctgccttcatcttgggaacaggccgtgctgtgcgccagcccggggagcccaccgtctggggaggggggcgattaaaaggtcccaacctcctccccaggagaccaaagaggatccgaattccagggaggcggggcggagacggcggcgaggaggaggccgcggcgcgggacgcatagagctgcggctcgggcggcgcctccctgcggcggcccggcccggctccggcccccgctggggcaatgctccccggggccgcgggatgagccagtgactcggccggtccgggcatggcagacccagtggcgggcatcgcgggctcggcggccaagagcgtgcggccatttcgctccagtgaggcctacgtggaggccatgaaggaggacctggccgagtggctcaatgccttgtacggcctgggtctcccgggtggtggcgatggcttcctgacagggctggccacgggcacgaccctgtgccaacatgccaacgccgtgaccgaggctgcccgtgcattggcagccgcccgcccggcccgaggtgtggccttccaggcgcacagtgtagtgcctggctccttcatggcgcgcgacaacgtggccaccttcatcggctggtgccgcgtggagctgggtgtgccggaggtgctcatgtttgagactgaggacctggtgctgcgcaagaacgagaagagcgtggtgctgt

SEQ ID NO: 99151 - DNA, 569 bp, Artificial Sequence
  derived and/or modified sequence
gctatcgcttcctgccttcatcttgggaacaggccgtgctgtgcgccagcccggggagcccaccgtctggggaggggggcgattaaaaggtcccaacctcctccccaggagaccaaagagtgactcggccggtccgggcatggcagacccagtggcgggcatcgcgggctcggcggccaagagcgtgcggccatttcgctccagtgaggcctacgtggaggccatgaaggaggacctggccgagtggctcaatgccttgtacggcctgggtctcccgggtggtggcgatggcttcctgacagggctggccacgggcacgaccctgtgccaacatgccaacgccgtgaccgaggctgcccgtgcattggcagccgcccgcccggcccgaggtgtggccttccaggcgcacagtgtagtgcctggctccttcatggcgcgcgacaacgtggccaccttcatcggctggtgccgcgtggagctgggtgtgccggaggtgctcatgtttgagactgaggacctggtgctgcgcaagaacgagaagagcgtggtgctgtgcctgctggaggtgg

SEQ ID NO: 99152 - DNA, 1014 bp, Artificial Sequence
  derived and/or modified sequence
atggctgaccctgtggccggcattgctggcagcgctgccaagtctgtgcggcccttccgcagcagcgaggcctacgtggaggccatgaaggaggacctggccgagtggctgaatgccctgtatggcctgggcctgcccggcggcggagatggcttcctgaccggcctggccaccggcaccaccctgtgccagcacgccaatgctgtgacagaggccgcccgggccctggccgccgcccggcctgcccggggcgtggccttccaggcccacagcgtggtgcccggcagcttcatggcccgggacaacgtggccaccttcatcggctggtgccgggtggagctgggcgtgcctgaggtgctgatgtttgaaacagaggacctggtgctgaggaagaatgagaagtctgtggtgctgtgcctgctggaggtggccaggagaggagcccggctgggcctgctggccccccggctggtgcagtttgagcaggagattgaaagagagctgcgggccgcccccccagccccaaatgccccagctgctggggaggacaccacagaaacagccccagcccctggcaccccagcccggggccccaggatgacccccagcgacctgaggaacctggatgagctggtgcgggagatcctgggccgctgcacctgcccagaccagttccccatgatcaaggtgtctgagggcaagtacagagtgggggacagcagcctgctgatctttgtgcgggtgctgcggagccacgtgatggtgcgggtgggcggcggctgggacaccctggagcactacctggacaagcatgacccctgccgctgcagcagcacagcccacaggcctccccagccccgggtgtgcaccttcagcccccagagggtgagccccaccaccagccccaggcctgccagccctgtgcccggcagcgagcggcggggcagcaggcctgagatgacccctgtgtccctgcggagcaccaaggagggccctgagaccccaccaagatag

SEQ ID NO: 99153 - DNA, 990 bp, Artificial Sequence
  derived and/or modified sequence
atggctgaccctgtggccggcattgctggcagcgctgccaagtctgtgcggcccttccgcagcagcgaggcctacgtggaggccatgaaggaggacctggccgagtggctgaatgccctgtatggcctgggcctgcccggcggcggagatggcttcctgaccggcctggccaccggcaccaccctgtgccagcacgccaatgctgtgacagaggccgcccgggccctggccgccgcccggcctgcccggggcgtggccttccaggcccacagcgtggtgcccggcagcttcatggcccgggacaacgtggccaccttcatcggctggtgccgggtggagctgggcgtgcctgaggtgctgatgtttgaaacagaggacctggtgctgaggaagaatgagaagtctgtggtgctgtgcctgctggaggtggccaggagaggagcccggctgggcctgctggccccccggctggtgcagtttgagcaggagattgaaagagagctgcgggccgcccccccagccccaaatgccccagctgctggggaggacaccacagaaacagccccagcccctggcaccccagcccggggccccaggatgacccccagcgacctgaggaacctggatgagctggtgcgggagatcctgggccgctgcacctgcccagaccagttccccatgatcaaggtgtctgagggcaagtacagagtgggggacagcagcctgctgatctttgtgcgggtgctgcggagccacgtgatggtgcgggtgggcggcggctgggacaccctggagcactacctggacaagcatgacccctgccgctgcagcagcactggacctggcatcagctgcccccccatcccagccccagctgccaccccaggcaccgtgaccccccagcccccaccacccagggctgcccccctggtgcctgctgtgatgacccaggccctggcccctgggggcagtgaccctgctgggggctag

SEQ ID NO: 99154 - DNA, 417 bp, Artificial Sequence
  derived and/or modified sequence
atggctgaccctgtggccggcattgctggcagcgctgccaagtctgtgcggcccttccgcagcagcgaggcctacgtggaggccatgaaggaggacctggccgagtggctgaatgccctgtatggcctgggcctgcccggcggcggagatggcttcctgaccggcctggccaccggcaccaccctgtgccagcacgccaatgctgtgacagaggccgcccgggccctggccgccgcccggcctgcccggggcgtggccttccaggcccacagcgtggtgcccggcagcttcatggcccgggacaacgtggccaccttcatcggctggtgccgggtggagctgggcgtgcctgaggtgctgatgtttgaaacagaggacctggtgctgaggaagaatgagaagtctgtggtgctgtag

SEQ ID NO: 99155 - DNA, 432 bp, Artificial Sequence
  derived and/or modified sequence
atggctgaccctgtggccggcattgctggcagcgctgccaagtctgtgcggcccttccgcagcagcgaggcctacgtggaggccatgaaggaggacctggccgagtggctgaatgccctgtatggcctgggcctgcccggcggcggagatggcttcctgaccggcctggccaccggcaccaccctgtgccagcacgccaatgctgtgacagaggccgcccgggccctggccgccgcccggcctgcccggggcgtggccttccaggcccacagcgtggtgcccggcagcttcatggcccgggacaacgtggccaccttcatcggctggtgccgggtggagctgggcgtgcctgaggtgctgatgtttgaaacagaggacctggtgctgaggaagaatgagaagtctgtggtgctgtgcctgctggaggtgtag

SEQ ID NO: 99156 - DNA, 1014 bp, Artificial Sequence
  derived and/or modified sequence
atggccgaccccgtggccggcatcgccggcagcgccgccaagagcgtacggcccttccgttcctcagaggcttacgtggaggcgatgaaggaagatctggccgagtggcttaacgcgctctacggcctcggtctgccaggagggggagacggcttcctaaccgggcttgccaccggcactacgctgtgccagcacgcaaatgcagtaaccgaagcagctagggcactggccgctgctaggcctgcaaggggtgttgcattccaggctcactccgtggtgccagggtcttttatggccagggacaatgtggcaacttttatcggatggtgcagagtagaattgggagttcccgaggttctgatgtttgaaactgaggaccttgtactgcgcaaaaatgaaaaaagcgttgtgctctgtctcctggaggtcgcacgacggggagcgcgccttggcttgctggccccgcgtttggtccaatttgagcaggaaatcgaacgggagctcagggccgcgccgcccgctccaaatgccccggcggccggggaagacaccacggaaaccgctcccgcacccggaactccagccaggggtccgaggatgacccctagtgatctccggaacctagatgaactcgtgagagagattttggggcgctgcacctgcccggaccaatttcctatgataaaagtcagcgagggcaagtaccgggtcggcgattctagcttgttaatatttgtgcgcgtcctgaggtcccacgtgatggtccgcgtgggaggtggctgggatactctggaacactacctggacaaacatgatccttgcagatgctcaagcactgcccaccgccccccgcaaccaagagtttgtaccttcagtccccagcgtgtttctcccacgaccagccctagacccgcctctcctgttcctggtagtgagcgccggggctcacgtccggaaatgaccccagtgagtctgcgcagcaccaaagaggggcccgaaaccccacctcgatag

SEQ ID NO: 99157 - DNA, 990 bp, Artificial Sequence
  derived and/or modified sequence
atggccgaccccgtggccggcatcgccggcagcgccgccaagagcgttagaccttttcggtcatccgaggcttacgttgaagccatgaaggaagacctcgccgagtggctgaacgctctctatggcctcggcctcccaggcgggggggatggcttccttaccggtctcgccaccggcactaccctgtgccagcatgctaatgctgtcacagaagctgctagggcactagctgccgcccggcccgcaaggggggtcgctttccaggctcattcagtggtgcctggctcgttcatggctcgcgataatgtagccaccttcatcggctggtgtcgcgtggaattgggcgtccccgaagtgctgatgtttgaaactgaagatctggtccttaggaaaaacgagaaatccgtggtgctgtgtctcctagaggtggcccggcgaggagctcggctggggctgctggcaccgagactggtccaattcgaacaggagattgaaagggaattacgggcggccccacccgccccgaacgcgccggcggccggcgaggacaccacagaaacggctcccgccccgggaacgcctgcccggggcccgcggatgactcccagtgacctgcgaaacctggatgagctggtacgggagatcttgggacggtgtacttgtccggatcagttccccatgattaaggtatctgaggggaagtacagagtaggtgattcctcattactgattttcgttcgggtactccgcagccatgtgatggtcagagtcgggggcggctgggacactttagagcactacctggacaagcacgatccatgcaggtgctccagcaccggccctggaatctcatgtcctcctatcccagccccagctgctacacctggaacagtcacaccacagccaccaccaccgcgcgccgcgccgctggtgcccgccgtgatgactcaggctctggccccaggcggctccgacccggcaggcggctag

SEQ ID NO: 99158 - DNA, 417 bp, Artificial Sequence
  derived and/or modified sequence
atggccgaccccgtggccggcatcgccggcagcgccgccaagagcgtaaggccattccgctcatccgaagcctatgtggaagcgatgaaagaggatctggccgagtggctcaatgccctttacgggcttgggctcccgggcggcggtgatggtttccttacagggctggctaccgggacaactctctgtcagcatgccaacgcagttaccgaagcagcacgcgcccttgcggctgcacggcctgcgaggggcgtcgccttccaggcccatagtgtcgtcccggggagtttcatggcccgcgataacgtcgctacattcatcggctggtgtagggtggagctgggggtccccgaggttttgatgtttgaaacagaggatctggtgctccggaagaacgaaaagtctgtggttctctag

SEQ ID NO: 99159 - DNA, 432 bp, Artificial Sequence
  derived and/or modified sequence
atggccgaccccgtggccggcatcgccggcagcgccgccaagagcgtgcgcccgtttcgatccagcgaagcctatgttgaggctatgaaagaagacctcgcagagtggctgaatgctctgtacggactgggactcccaggcggcggggacgggttcttgacaggattagctaccggcacaaccttgtgtcagcacgctaatgccgtcaccgaggcggctagggccctagctgcagctagacctgcaagaggcgtcgcttttcaggcgcacagtgtggtcccgggctctttcatggcccgcgacaatgtcgcaacatttatcggctggtgccgtgttgaactgggggtacccgaggttctaatgttcgagaccgaagacctcgtgctgcgtaagaacgagaaaagtgttgtgctctgcttactagaagtgtag

SEQ ID NO: 99160 - DNA, 1014 bp, Artificial Sequence
  derived and/or modified sequence
atggctgaccctgtcgcaggcatagcagggagcgccgcaaaaagtgtgaggccctttcggtcatccgaggcctatgttgaagcgatgaaagaggacctcgccgaatggttaaatgcattgtatggcctgggtctgccaggcggaggtgacggcttcctgacagggctggctactggaacgaccctgtgtcagcatgcaaacgccgtaaccgaggctgcaagagccttggccgcagcgagacctgcccgtggggtggcgttccaggcacattctgttgtgcctggttccttcatggcacgggacaatgttgcaacttttatcggctggtgtcgtgttgaattgggagtgccggaagtcctcatgttcgagaccgaggatctggtactaagaaagaatgagaaatctgtggtgttgtgcctcctcgaagtcgcccgacggggagcgcgacttggactgctggcccctcggttggtgcagtttgagcaggagattgagagggaattacgagccgcaccacccgcaccgaacgcacccgctgccggagaagatacaactgagaccgctcctgcccctggcactcccgctcgtgggcctcgaatgacaccgtctgacttgcggaatctggacgagcttgttcgggaaatcctagggagatgtacttgtcccgaccagtttccgatgattaaggttagcgaagggaagtatagagtaggtgactccagtctcctgatcttcgtcagagtcctgagatcccatgtaatggttcgtgtgggaggaggctgggacacacttgagcactacttagataagcatgacccttgtcgctgcagctctacggctcatcgccctccacagcccagggtgtgcacattctccccccagagggtgtcaccaaccacttctccaagaccagcttcccccgtacctggttccgagaggagaggctcccgcccagagatgacccccgtctcactccggtccactaaagagggcccagaaacgccccctagatag

SEQ ID NO: 99161 - DNA, 990 bp, Artificial Sequence
  derived and/or modified sequence
atggctgatcctgtggctggcatcgcagggtcagctgccaagtctgtgaggccattccggagttctgaggcgtatgtggaggctatgaaagaagacctggccgaatggttaaatgcgttgtacggcctcgggcttcccggaggcggagacggtttcctgacgggccttgctaccgggacaacactctgccagcatgcaaatgctgtcaccgaggcagctcgcgcactggcagctgcgagacctgcccgaggggtggcgttccaagctcactcagttgttcctggatctttcatggcccgtgataacgtggcaacgtttattggttggtgtcgggtggaacttggcgtccctgaagtgctgatgtttgagaccgaagatctggtactccggaagaacgagaaaagcgttgttctatgccttttagaagtggcacggagaggagcacggctaggtctacttgccccacgactggtgcaattcgagcaggagattgaacgcgaactcagagcagccccacctgcgcctaatgccccagccgctggtgaggatactaccgagactgctcccgctcctggaacacccgcaaggggccctcgcatgactcctagcgatctcagaaatctcgatgagttagtcagagagattctggggaggtgcacctgccccgaccaattcccaatgattaaagtcagtgagggaaaatatagagtgggggattcttcattactcatctttgtccgcgttttgcggtcccatgtgatggtacgggtgggtggaggctgggatacactggaacattacttggacaagcatgatccctgtaggtgctcttctaccggccctggaatatcatgcccacccatccccgcacccgctgccacaccagggactgtgaccccccagccgcctccacccagggctgccccactagtgccggctgttatgacccaggcgctggctccgggaggctcagatccggctggaggctag

SEQ ID NO: 99162 - DNA, 417 bp, Artificial Sequence
  derived and/or modified sequence
atggcagatcctgtggcgggtattgcgggttctgccgctaagagcgtgcgaccctttcggtccagtgaagcttatgttgaagccatgaaggaagacctggccgaatggctaaatgcgctctacggactgggcctaccagggggaggagacggctttctcacaggcttggctactggaacaaccttatgtcagcacgctaatgccgtgaccgaggcagccagagcactcgccgctgctaggccagctcggggagttgcctttcaggcacactctgtagtgcccggttccttcatggcacgggataacgtggctaccttcattggttggtgtagagtcgagctgggcgtcccagaagttttgatgtttgaaactgaggatctggtcctgcggaagaacgagaaatcagtcgttctgtag

SEQ ID NO: 99163 - DNA, 432 bp, Artificial Sequence
  derived and/or modified sequence
atggcagacccagtggccggtattgcaggttcagctgccaagtccgtacgaccctttaggtcctcggaggcctacgttgaggccatgaaggaggacctggccgagtggttaaacgctctctacggcctgggacttccaggcggaggcgacggattcttgacaggcttggcgaccgggactacactgtgtcagcacgccaacgctgtcaccgaggcagcaagagccctcgcagccgcacgcccagctaggggagtcgcatttcaggcgcactctgtagtgcctggatccttcatggcccgagacaacgttgccacatttattggctggtgtcgtgtcgagcttggcgtgcctgaagtattgatgtttgagactgaggatctggtgttaaggaaaaacgagaagagcgttgtgttatgcctgcttgaggtctag

SEQ ID NO: 99164 - DNA, 1014 bp, Artificial Sequence
  derived and/or modified sequence
atggccgaccccgtggccggcatcgccggcagcgccgccaagagcgtgagacccttcagaagcagcgaggcctacgtggaggccatgaaggaggacctggccgagtggctgaacgccctgtacggcctgggcctgcccggcggcggcgacggcttcctgaccggcctggccaccggcaccaccctgtgccagcacgccaacgccgtgaccgaggccgccagagccctggccgccgccagacccgccagaggcgtggccttccaggcccacagcgtggtgcccggcagcttcatggccagagacaacgtggccaccttcatcggctggtgcagagtggagctgggcgtgcccgaggtgctgatgttcgagaccgaggacctggtgctgagaaagaacgagaagagcgtggtgctgtgcctgctggaggtggccagaagaggcgccagactgggcctgctggcccccagactggtgcagttcgagcaggagatcgagagagagctgagagccgccccccccgcccccaacgcccccgccgccggcgaggacaccaccgagaccgcccccgcccccggcacccccgccagaggccccagaatgacccccagcgacctgagaaacctggacgagctggtgagagagatcctgggcagatgcacctgccccgaccagttccccatgatcaaggtgagcgagggcaagtacagagtgggcgacagcagcctgctgatcttcgtgagagtgctgagaagccacgtgatggtgagagtgggcggcggctgggacaccctggagcactacctggacaagcacgacccctgcagatgcagcagcaccgcccacagacccccccagcccagagtgtgcaccttcagcccccagagagtgagccccaccaccagccccagacccgccagccccgtgcccggcagcgagagaagaggcagcagacccgagatgacccccgtgagcctgagaagcaccaaggagggccccgagaccccccccagatag

SEQ ID NO: 99165 - DNA, 990 bp, Artificial Sequence
  derived and/or modified sequence
atggccgaccccgtggccggcatcgccggcagcgccgccaagagcgtgagacccttcagaagcagcgaggcctacgtggaggccatgaaggaggacctggccgagtggctgaacgccctgtacggcctgggcctgcccggcggcggcgacggcttcctgaccggcctggccaccggcaccaccctgtgccagcacgccaacgccgtgaccgaggccgccagagccctggccgccgccagacccgccagaggcgtggccttccaggcccacagcgtggtgcccggcagcttcatggccagagacaacgtggccaccttcatcggctggtgcagagtggagctgggcgtgcccgaggtgctgatgttcgagaccgaggacctggtgctgagaaagaacgagaagagcgtggtgctgtgcctgctggaggtggccagaagaggcgccagactgggcctgctggcccccagactggtgcagttcgagcaggagatcgagagagagctgagagccgccccccccgcccccaacgcccccgccgccggcgaggacaccaccgagaccgcccccgcccccggcacccccgccagaggccccagaatgacccccagcgacctgagaaacctggacgagctggtgagagagatcctgggcagatgcacctgccccgaccagttccccatgatcaaggtgagcgagggcaagtacagagtgggcgacagcagcctgctgatcttcgtgagagtgctgagaagccacgtgatggtgagagtgggcggcggctgggacaccctggagcactacctggacaagcacgacccctgcagatgcagcagcaccggccccggcatcagctgcccccccatccccgcccccgccgccacccccggcaccgtgaccccccagccccccccccccagagccgcccccctggtgcccgccgtgatgacccaggccctggcccccggcggcagcgaccccgccggcggctag

SEQ ID NO: 99166 - DNA, 417 bp, Artificial Sequence
  derived and/or modified sequence
atggccgaccccgtggccggcatcgccggcagcgccgccaagagcgtgagacccttcagaagcagcgaggcctacgtggaggccatgaaggaggacctggccgagtggctgaacgccctgtacggcctgggcctgcccggcggcggcgacggcttcctgaccggcctggccaccggcaccaccctgtgccagcacgccaacgccgtgaccgaggccgccagagccctggccgccgccagacccgccagaggcgtggccttccaggcccacagcgtggtgcccggcagcttcatggccagagacaacgtggccaccttcatcggctggtgcagagtggagctgggcgtgcccgaggtgctgatgttcgagaccgaggacctggtgctgagaaagaacgagaagagcgtggtgctgtag

SEQ ID NO: 99167 - DNA, 432 bp, Artificial Sequence
  derived and/or modified sequence
atggccgaccccgtggccggcatcgccggcagcgccgccaagagcgtgagacccttcagaagcagcgaggcctacgtggaggccatgaaggaggacctggccgagtggctgaacgccctgtacggcctgggcctgcccggcggcggcgacggcttcctgaccggcctggccaccggcaccaccctgtgccagcacgccaacgccgtgaccgaggccgccagagccctggccgccgccagacccgccagaggcgtggccttccaggcccacagcgtggtgcccggcagcttcatggccagagacaacgtggccaccttcatcggctggtgcagagtggagctgggcgtgcccgaggtgctgatgttcgagaccgaggacctggtgctgagaaagaacgagaagagcgtggtgctgtgcctgctggaggtgtag

SEQ ID NO: 99168 - protein, 481 aa, Artificial Sequence
  derived and/or modified sequence
MPLLGLLPRRAWASLLSQLLRPPCASCTGAVRCQSQGTRDLSPQHMVVREKILDLVISCFKRHGAKGMDTPAFELKETLTEKYGEDSGLMYDLKDQGGELLSLRYDLTVPFARYLAMNKVKKMKRYHVGKVWRRESPTIVQGRYREFCQCDFDIAGQFDPMIPDAECLKIMCEILSGLQLGDFLIKVNDRRIVDGMFAVCGVPESKFRAICSSIDKLDKMAWKDVRHEMVVKKGLAPEVADRIGDYVQCHGGVSLVEQMFQDPRLSQNKQALEGLGDLKLLFEYLTLFGIADKISFDLSLARGLDYYTGVIYEAVLLQTPTQAGEEPLNVGSVAAGGRYDGLVGMFDPKGHKVPCVGLSIGVERIFYIVEQRMKTKGEKVRTTETQVFVATPQKNFLQERLKLIAELWDSGIKAEMLYKNNPKLLTQLHYCESTGIPLVVIIGEQELKEGVIKIRSVASREEVAIKRENFVAEIQKRLSES

SEQ ID NO: 99169 - DNA, 1446 bp, Artificial Sequence
  derived and/or modified sequence
atgccactgttgggactgctgccaagacgagcatgggccagcttgctgtcccaactgcttaggccgccatgtgcatcatgtactggcgccgtgcgatgtcaatcccaaggcacacgcgatctgtctcctcagcatatggtcgtgcgcgagaaaatcctggacctggtgatcagttgctttaagcggcatggggcgaagggcatggacacaccagcctttgagttgaaagagacactcactgaaaaatatggcgaagacagcggtttaatgtacgaccttaaggaccagggtggagagctgttgagcctgcggtacgacctgacagtcccgttcgctagataccttgcaatgaataaagtgaaaaagatgaagcgttaccacgtaggaaaagtgtggagacgtgagagtcctacgatcgtgcagggccggtatcgtgagttttgtcagtgtgattttgacatagctggtcagttcgacccgatgattcctgacgccgagtgcctgaaaatcatgtgtgaaattctgtccggcttgcagctgggtgacttccttatcaaggtgaacgatcgcagaatagtcgacggaatgtttgccgtgtgcggagtacctgagtccaagtttcgcgccatttgctcctcaattgataaactggacaagatggcatggaaagatgtaagacatgagatggtagtgaaaaagggcctcgcacccgaggtggctgaccgcattggcgattatgtgcagtgccatggtggagtctccctagtggagcaaatgtttcaggatccacgactttcacagaacaaacaggctctggaggggctgggggatctaaagttgctcttcgaatacctgacactgtttgggatcgccgataagattagctttgatctctctctggcacgcgggcttgactactacactggcgttatttacgaggctgtgctgcttcagactcctacacaagcaggtgaagagcctctcaacgttggctcagtggccgccgggggaaggtacgacggcttagtcggtatgttcgaccctaaggggcataaagtgccatgtgtcggtctatcgattggtgtagagcggatcttttacattgtagaacagcgcatgaagacgaaaggggagaaggtccgaaccacggagactcaagtatttgtggccacaccacaaaagaactttctgcaagaaaggcttaaattgattgcagaactgtgggattctggcattaaggctgagatgctgtataagaacaaccccaagttactgacccaacttcactattgcgagagtactgggatccccctcgtggtgatcattggggaacaggaactgaaagagggagtgatcaagatcagatcggtagcatccagagaggaagtggcgataaagagggaaaacttcgtcgccgaaatacagaagcgcctgagtgagtcatag

SEQ ID NO: 99170 - DNA, 1562 bp, Artificial Sequence
  derived and/or modified sequence
cttttgttcctgtcccggaaagccggcgtcctgccgcgcgatgcccctgctcggacttcttcccaggagggcctgggcttcgctgctcagccagctcctgcgaccgccctgcgcttcgtgcaccggggcggtccgttgccaaagccagggtaccagggatcttagtcctcagcatatggttgtgagggagaaaattcttgatttggttatcagctgctttaaacgtcatggagcaaaggggatggacaccccagcatttgagctgaaggaaaccctgactgagaagtatggagaggactctgggctcatgtatgatctgaaggatcaaggtggagagctgttgtccctccgctatgaccttactgttccctttgctcgttatctggccatgaataaggtgaagaagatgaaacgttatcatgttggaaaggtgtggcggcgagagagcccaaccatagtccaaggccgttatagggagttctgccagtgtgattttgacattgctggtcagtttgaccctatgatccccgatgcagagtgtttgaagatcatgtgtgaaatcctaagtggattgcagttgggagactttctcattaaggtaaatgaccggcggattgtggatgggatgtttgctgtctgtggtgttcctgaaagcaagttccgtgccatctgctcctccatagataaactagacaagatggcttggaaagatgtgagacatgagatggtggtgaagaaaggcctggctcctgaggtggctgatcgaattggggactatgtccagtgtcatggtggggtatccctagtagagcaaatgtttcaggatcccagactatcccagaacaagcaggccctggagggcctgggagacctaaagctgctatttgaatacctgactttatttggaattgctgataagatctcctttgacctcagcctggctcggggcctagactactatacaggagtgatctatgaagcagtgctgctgcagaccccaactcaggctggggaggagcccctgaatgtgggcagtgtggctgctggtgggcgctatgatgggctggtgggcatgtttgaccccaagggccacaaggtgccatgtgtgggactcagcattggggttgagcgaatcttctacattgtggagcagaggatgaagaccaaaggtgagaaggtgcggactacagagactcaagtgtttgtggccacaccacagaagaactttctccaagaacggttgaagcttattgcagagctttgggattctggaatcaaggcagagatgctatacaagaacaaccccaaactattaacccagctgcactattgtgagagcacaggcattccactggtggtcattattggtgagcaagaactgaaagaaggggtcatcaagatccgttcagtggccagcagagaggaggtggccattaaacgggaaaattttgtggctgaaattcagaagcgactgtctgagtcttgatccttgcctgattcccatctgctgctctttgtagaaaaggtttcctctagaactgaattcctctggaattgagtga

SEQ ID NO: 99171 - DNA, 1446 bp, Artificial Sequence
  derived and/or modified sequence
atgcccctgctgggcctgctgccccggcgggcctgggccagcctgctgagccagctgctgcggcccccctgtgccagctgcaccggggctgtgcgctgccagagccagggcacccgggacctgagcccccagcacatggtggtgcgggagaagatcctggacctggtgatcagctgcttcaagagacatggagccaagggcatggacaccccagcctttgagctgaaggagaccctgacagagaagtatggagaagattctggcctgatgtatgacctgaaggaccagggcggggagctgctgagcctgcgctatgacctgactgtgccctttgcccgctacctggccatgaacaaggtgaagaagatgaagcgctaccacgtgggcaaggtgtggaggcgggagagccccaccatcgtgcagggccgctaccgggagttctgccagtgtgactttgatattgctggccagtttgaccccatgatcccagatgctgagtgcctgaagatcatgtgtgagatcctgagcggcctgcagctgggggacttcctgatcaaggtgaatgaccggcgcatcgtggatggcatgtttgctgtgtgtggggtgcctgagagcaagttccgggccatctgcagcagcattgacaagctggacaagatggcctggaaggatgtgagacatgagatggtggtgaagaagggcctggcccctgaggtggccgacagaattggagactatgtgcagtgccacggcggcgtgtccctggtggagcagatgttccaggacccccggctgagccagaacaagcaggccctggagggcctgggggacctgaagctgctgtttgagtacctgaccctgtttggaattgctgacaagatcagctttgacctgagcctggcccggggcctggactactacacaggagtcatctatgaggccgtgctgctgcagacccccacccaggccggggaggagcccctgaatgtgggctctgtggccgccggcggccgctatgatggcctggtgggcatgtttgaccccaagggccacaaggtgccctgtgtgggcctgagcattggagtggagcgcatcttctacatcgtggagcagaggatgaagaccaagggggagaaggtgaggaccacagagacccaggtgtttgtggccaccccccagaagaacttcctgcaggagcggctgaagctgattgctgagctgtgggacagcggcatcaaggccgagatgctgtacaagaacaaccccaagctgctgacccagctgcactactgtgagagcacaggcatccccctggtggtgatcatcggggagcaggagctgaaggagggcgtcatcaagatccgctctgtggccagccgggaggaggtggccatcaagcgggagaactttgtggccgagatccagaagaggctgtctgagagctag

SEQ ID NO: 99172 - DNA, 1446 bp, Artificial Sequence
  derived and/or modified sequence
atgcccctgctgggcctgctgccccggcgggcctgggccagcctgctgtctcagttactccgccccccatgtgcctcttgcacaggagccgtgcgctgtcagtcccaagggacgcgcgacctctcgccccagcacatggtggtgcgcgagaaaatactcgacctggtgatctcctgttttaagcgtcacggtgccaagggtatggacacacccgccttcgagctgaaagagactctcacagaaaaatatggcgaagactcagggctgatgtacgacctcaaagatcaggggggtgagctcttgtctctgcggtacgacctaaccgtgccatttgctaggtacttggccatgaacaaggtcaagaaaatgaagagatatcacgtgggtaaagtttggcgccgggagtctcctaccattgtacagggtaggtatcgggaattttgccagtgtgatttcgatatagctggacagttcgatcccatgatccccgacgctgaatgtctgaaaattatgtgcgaaattctatcgggattgcagctgggagacttcctgataaaggtcaatgaccgtcgcattgtcgatggcatgttcgcagtgtgcggagttcctgaatccaaatttagggctatttgtagttcaatcgacaaacttgacaagatggcttggaaggatgtgcgccatgaaatggtggtgaaaaaaggacttgctccggaagtagcagacaggatcggagactacgtgcagtgtcatggcggtgtttctctcgtcgagcaaatgtttcaagaccctaggctgagtcagaataagcaggctctcgaaggtctgggcgacctcaaactcctgtttgaatacctgaccctgtttggcatcgccgacaaaatctcatttgatctttctcttgctagaggcttggactactacacaggggtaatctacgaggctgtgctcttacagactccaacacaagctggcgaagaaccgttgaatgttggaagcgttgcagctggaggcaggtacgacgggctggttggcatgttcgaccctaaggggcataaagtcccctgcgttggattatctataggtgtggagcggatcttctacatcgtagaacaaaggatgaaaaccaagggagagaaagttagaaccaccgagacccaggtgttcgtggcaaccccccagaagaactttctgcaggagaggcttaaactgatcgccgagctgtgggactctggcatcaaagcagagatgctgtataagaacaaccctaaactattaacacagcttcattactgtgagagtaccgggatccctctggttgtcatcatcggcgagcaggagcttaaagaaggcgtgattaagatcaggtccgtggccagccgcgaagaggtggccatcaaaagagaaaacttcgtggccgagatccagaagaggctttccgaatcttag

SEQ ID NO: 99173 - DNA, 1446 bp, Artificial Sequence
  derived and/or modified sequence
atgcccttgctggggctgcttcctcggagagcctgggctagcctccttagtcaattacttcgcccaccctgtgcatcttgtactggcgcagtgcggtgtcagtcccaagggacaagagacctgagcccacaacatatggtcgtgagagaaaagatcctggatctggtcatcagctgcttcaaacgccacggcgctaagggaatggatactcccgctttcgagctcaaagaaaccctgacagaaaagtatggagaggactcaggtctaatgtacgatctgaaagatcaaggcggtgagctactctctctcagatacgatctgactgttcctttcgccaggtatctggcaatgaacaaggtaaaaaaaatgaagcgctatcatgtgggtaaggtttggagacgggagtcacctaccatcgtacaaggacggtaccgggagttttgtcagtgtgacttcgacatcgctggccaatttgatcctatgattcctgacgccgaatgcctcaaaatcatgtgcgagatcttatctggattgcagctcggagactttctcattaaagtcaatgataggagaatagtggacggtatgtttgccgtctgtggtgttcccgagagcaaatttcgcgctatctgtagctccatcgataagctggacaagatggcctggaaggacgtacgccatgaaatggtcgtgaagaaagggcttgctcccgaggttgcagatcgaattggggactacgtgcagtgtcacggaggcgtcagcctcgttgagcagatgttccaggaccctagactttcacaaaacaagcaagcccttgagggattgggggacctgaaactcctgtttgagtacctgactttgtttggaatcgccgacaagatcagcttcgatctcagcctggcacggggattggattactatactggtgttatctatgaagccgtgttgctgcagacacccacacaagcaggtgaagagccgcttaacgtcggctctgtggcggctgggggtcggtacgacgggctcgtagggatgtttgacccgaaagggcataaggtgccctgcgtcggcttaagcattggcgttgagcgaattttctatatcgtggaacaacgaatgaaaactaagggggaaaaggtcagaaccacggagactcaggtattcgttgctacgccacagaagaattttctccaggaaagattaaagttgattgctgagctgtgggatagtgggataaaggccgagatgctgtataagaacaaccctaagctcctcactcagcttcattattgcgagtctacagggatcccattggtggtgataatcggagaacaggagctgaaagaaggggtgatcaagattagaagcgttgcctcgagagaggaagtcgccatcaaaagggaaaacttcgttgctgaaatccagaaacgccttagtgagtcctag

SEQ ID NO: 99174 - DNA, 1446 bp, Artificial Sequence
  derived and/or modified sequence
atgcccctgctgggcctgctgcccagaagagcctgggccagcctgctgagccagctgctgagacccccctgcgccagctgcaccggcgccgtgagatgccagagccagggcaccagagacctgagcccccagcacatggtggtgagagagaagatcctggacctggtgatcagctgcttcaagagacacggcgccaagggcatggacacccccgccttcgagctgaaggagaccctgaccgagaagtacggcgaggacagcggcctgatgtacgacctgaaggaccagggcggcgagctgctgagcctgagatacgacctgaccgtgcccttcgccagatacctggccatgaacaaggtgaagaagatgaagagataccacgtgggcaaggtgtggagaagagagagccccaccatcgtgcagggcagatacagagagttctgccagtgcgacttcgacatcgccggccagttcgaccccatgatccccgacgccgagtgcctgaagatcatgtgcgagatcctgagcggcctgcagctgggcgacttcctgatcaaggtgaacgacagaagaatcgtggacggcatgttcgccgtgtgcggcgtgcccgagagcaagttcagagccatctgcagcagcatcgacaagctggacaagatggcctggaaggacgtgagacacgagatggtggtgaagaagggcctggcccccgaggtggccgacagaatcggcgactacgtgcagtgccacggcggcgtgagcctggtggagcagatgttccaggaccccagactgagccagaacaagcaggccctggagggcctgggcgacctgaagctgctgttcgagtacctgaccctgttcggcatcgccgacaagatcagcttcgacctgagcctggccagaggcctggactactacaccggcgtgatctacgaggccgtgctgctgcagacccccacccaggccggcgaggagcccctgaacgtgggcagcgtggccgccggcggcagatacgacggcctggtgggcatgttcgaccccaagggccacaaggtgccctgcgtgggcctgagcatcggcgtggagagaatcttctacatcgtggagcagagaatgaagaccaagggcgagaaggtgagaaccaccgagacccaggtgttcgtggccaccccccagaagaacttcctgcaggagagactgaagctgatcgccgagctgtgggacagcggcatcaaggccgagatgctgtacaagaacaaccccaagctgctgacccagctgcactactgcgagagcaccggcatccccctggtggtgatcatcggcgagcaggagctgaaggagggcgtgatcaagatcagaagcgtggccagcagagaggaggtggccatcaagagagagaacttcgtggccgagatccagaagagactgagcgagagctag

SEQ ID NO: 99175 - protein, 392 aa, Artificial Sequence
  derived and/or modified sequence
MPLLGLLPRRAWASLLSQLLRPPCASCTGAVRCQSQVAEAVLTSQLKAHQEKPNFIIKTPKDFDIAGQFDPMIPDAECLKIMCEILSGLQLGDFLIKVNDRRIVDGMFAVCGVPESKFRAICSSIDKLDKMAWKDVRHEMVVKKGLAPEVADRIGDYVQCHGGVSLVEQMFQDPRLSQNKQALEGLGDLKLLFEYLTLFGIADKISFDLSLARGLDYYTGVIYEAVLLQTPTQAGEEPLNVGSVAAGGRYDGLVGMFDPKGHKVPCVGLSIGVERIFYIVEQRMKTKGEKVRTTETQVFVATPQKNFLQERLKLIAELWDSGIKAEMLYKNNPKLLTQLHYCESTGIPLVVIIGEQELKEGVIKIRSVASREEVAIKRENFVAEIQKRLSES

SEQ ID NO: 99176 - DNA, 1179 bp, Artificial Sequence
  derived and/or modified sequence
atgccacttcttgggctgctgccaagacgagcctgggcaagcttattgagccagttactccgaccaccttgtgcttcctgtactggggcggtgcgctgtcagagccaggtcgccgaggcagtgctgacctcccagctaaaggcccatcaggagaaacccaacttcatcattaaaactcctaaagacttcgatatcgcaggccagttcgacccgatgatccctgacgccgaatgtctaaagataatgtgcgagatcctgtctgggttgcagctgggtgatttcctgatcaaagtcaacgataggcggatagtggacggtatgttcgccgtgtgcggagtacctgaaagtaagttccgcgcaatctgctcctccatcgacaagcttgataaaatggcatggaaagacgttcggcacgaaatggtcgtcaagaagggcctcgccccagaagtcgccgataggattggggactacgttcagtgtcatggcggagtgtccctggttgaacagatgtttcaggatcctcggctgtcccagaacaagcaggccctcgaaggactgggcgatctgaaattgctctttgagtaccttacgctcttcgggatcgcggacaagatctctttcgatctatctctcgcgcggggattggattattatacaggagttatttatgaagcagtgctgctccagaccccaacccaggcgggtgaagaacctctcaacgtgggcagcgtggcagctggaggcagatatgacggcctggtgggcatgtttgaccccaaggggcataaggtgccctgcgtggggctgagtatcggcgtggagcgcatcttctacattgtggagcagcgcatgaagactaaaggagagaaggtcaggacaactgagacccaagtgtttgttgctacaccccagaaaaacttcttgcaagaacggctcaagttgatcgctgagctctgggacagtggcataaaagccgagatgttatacaagaataatcctaaactgctgactcaactgcactattgcgaatctaccggcatccctttagtagtgatcattggggaacaggagctgaaggagggggtgataaagatacggagtgtggcttctagggaagaagtagcaataaaacgagaaaattttgtggcagagatccaaaagagactgtcggaatcctag

SEQ ID NO: 99177 - DNA, 2118 bp, Artificial Sequence
  derived and/or modified sequence
ctggctactaagggaacttgggaggatcccacctcagccttcgtgactagtgaggtgcgcaaacgcccgagttttccctggtgcgcgggttccgcctttgcagtgccctccacccttcctggtgtctgacccgcctccttcccaggccttttgttcctgtcccggaaagccggcgtcctgccgcgcgatgcccctgctcggacttcttcccaggagggcctgggcttcgctgctcagccagctcctgcgaccgccctgcgcttcgtgcaccggggcggtccgttgccaaagccaggttgcagaggcagtgttaacatcccaactgaaagcacatcaagagaaaccaaattttattatcaagaccccaaaggattttgacattgctggtcagtttgaccctatgatccccgatgcagagtgtttgaagatcatgtgtgaaatcctaagtggattgcagttgggagactttctcattaaggtaaatgaccggcggattgtggatgggatgtttgctgtctgtggtgttcctgaaagcaagttccgtgccatctgctcctccatagataaactagacaagatggcttggaaagatgtgagacatgagatggtggtgaagaaaggcctggctcctgaggtggctgatcgaattggggactatgtccagtgtcatggtggggtatccctagtagagcaaatgtttcaggatcccagactatcccagaacaagcaggccctggagggcctgggagacctaaagctgctatttgaatacctgactttatttggaattgctgataagatctcctttgacctcagcctggctcggggcctagactactatacaggagtgatctatgaagcagtgctgctgcagaccccaactcaggctggggaggagcccctgaatgtgggcagtgtggctgctggtgggcgctatgatgggctggtgggcatgtttgaccccaagggccacaaggtgccatgtgtgggactcagcattggggttgagcgaatcttctacattgtggagcagaggatgaagaccaaaggtgagaaggtgcggactacagagactcaagtgtttgtggccacaccacagaagaactttctccaagaacggttgaagcttattgcagagctttgggattctggaatcaaggcagagatgctatacaagaacaaccccaaactattaacccagctgcactattgtgagagcacaggcattccactggtggtcattattggtgagcaagaactgaaagaaggggtcatcaagatccgttcagtggccagcagagaggaggtggccattaaacgggaaaattttgtggctgaaattcagaagcgactgtctgagtcttgatccttgcctgattcccatctgctgctctttgtagaaaaggtttcctctagaactgaattcctctggaattgagtgatggacttcacaacaactagccaggaagggtgacaagtaccttctgcctcctccattcttcctgggtgcagaactgtagaagaccctgaggactcctgggctagtgtgagcagctattctgcatgggtgcagatggctggatgtgaaagagacatgctctagctgcagaggcaaatttgaagtgccacggaacgttgtcaagaggtagtgagattgttgctgtgagcaaggctctgggagagtcacctcaggctcaggattctgaaccattgagatcagaaaccagatacttagccttctactgtagctacggaaccagattctggtgaatttgtccacaatcagccattggcctgtctggggagtttttggaagacagcaaagaggggcaatggctgctttcagctttgaggacagatgctatcctaagggcatggcagtacccatgttgatttgacatctctctagcccatccattgcttacagtagaagagtggggctgtatgcttgataatcttgaacattgaacttaatagatgacttgacaaggtagagatctgatattttgagattttggagaccatttcctgtgccagaatcactgctctattccataccgtgccatggaggctgttttagaagtggttggataacatgttaaataaaatattaagtgt

SEQ ID NO: 99178 - DNA, 1179 bp, Artificial Sequence
  derived and/or modified sequence
atgcccctgctgggcctgctgccccggcgggcctgggccagcctgctgagccagctgctgcggcccccctgtgccagctgcaccggggctgtgcgctgccagagccaggtggccgaggccgtgctgaccagccagctgaaggcccaccaggagaagcccaacttcatcatcaagacccccaaggactttgatattgctggccagtttgaccccatgatcccagatgctgaatgtctgaagatcatgtgtgagatcctgagcggcctgcagctgggggacttcctgatcaaggtgaatgacagaagaattgtggatggcatgtttgctgtgtgtggggtgcctgagagcaagttccgggccatctgcagcagcattgacaagctggacaagatggcctggaaggatgtgagacatgagatggtggtgaagaagggcctggcccctgaggtggccgaccgcatcggggactatgtgcagtgccacggcggcgtgtccctggtggagcagatgttccaggacccccggctgagccagaacaagcaggccctggagggcctgggggacctgaagctgctgtttgagtacctgaccctgtttggaattgctgacaagatcagctttgacctgagcctggcccggggcctggactactacacaggagtcatctatgaagctgtgctgctgcagacccccacccaggccggggaggagcccctgaatgtgggctctgtggccgccggcggccgctatgatggcctggtgggcatgtttgaccccaagggccacaaggtgccctgtgtgggcctgagcattggagtggagcgcatcttctacatcgtggagcagaggatgaagaccaagggggagaaggtgaggaccacagagacccaggtgtttgtggccaccccccagaagaacttcctgcaggagcggctgaagctgattgctgagctgtgggacagcggcatcaaggccgagatgctgtacaagaacaaccccaagctgctgacccagctgcactactgtgagagcacaggcatccccctggtggtgatcattggagagcaggagctgaaggagggcgtcatcaagatccgctctgtggccagccgggaggaggtggccatcaagagagaaaattttgtggccgagatccagaagaggctgtctgagagctag

SEQ ID NO: 99179 - DNA, 1179 bp, Artificial Sequence
  derived and/or modified sequence
atgcccctgctgggcctgctgccccggcgggcctgggccagcctgctctcacagctgctgagacctccttgcgcgtcttgcaccggagctgttaggtgtcagtcccaggtagccgaagccgtgcttacaagccaactcaaagctcaccaggagaaacccaactttatcatcaaaacccccaaggactttgatattgcgggacagttcgatcccatgatcccggatgccgaatgtctgaagatcatgtgcgaaatcctttctgggctgcagcttggggatttcctgatcaaggttaacgacaggagaatcgtcgatggcatgtttgctgtgtgtggagtaccagagagcaaattccgggctatctgttccagcatagataagcttgataagatggcctggaaagatgtgcgacatgaaatggtggtcaagaagggactcgctccagaggttgcagacaggattggagactatgtgcagtgccacggtggcgtgtcacttgtcgaacagatgttccaggacccccggcttagtcagaacaagcaggcgctggagggtcttggcgatttgaagttgctgttcgaatacctgacactctttggaattgcagataaaatctcttttgacctgtcactcgcaagaggactagactattacactggagtcatatatgaggctgtgctgctccagaccccaacccaagcaggtgaggagccactaaatgtgggctccgtggccgcggggggccggtacgatggactggtaggcatgtttgaccctaaaggccacaaggttccttgtgtcgggttgtcaatcggcgttgagcgcatattttacattgttgaacagagaatgaagaccaagggggaaaaggttcgaacaacagagacccaggtttttgttgccactccccagaaaaactttctgcaagaaaggctgaagttgatcgcggagttgtgggatagcggaatcaaagcggagatgctgtataaaaacaacccaaaactactaacacaactccactattgtgagagcaccgggataccgctcgtggtcattatcggggaacaggagcttaaggagggggtcatcaaaatcagatccgtggccagtagggaggaagtagctatcaagagggagaattttgtagcggagatccagaagcgcttatcggaatcgtag

SEQ ID NO: 99180 - DNA, 1179 bp, Artificial Sequence
  derived and/or modified sequence
atgcctctactggggttactgcctcgccgagcttgggctagcctcctgagccagcttctgcgccctccctgtgcctcctgtaccggagctgtgcggtgccagtcacaggtagcggaggcagtattgacctctcaactgaaagcccaccaagaaaaacctaacttcattatcaaaactccgaaagattttgatattgctggtcagtttgaccccatgatcccagatgcagagtgcctgaaaattatgtgtgagatcctgtccgggttgcagctgggcgacttcctgatcaaagtaaatgataggaggatagtcgacgggatgttcgctgtgtgcggggtcccagagtctaagtttcgcgcaatttgcagctctatcgacaagctcgacaagatggcgtggaaggatgtgaggcacgaaatggttgtcaagaaaggattagccccagaggtggctgacagaattggagattatgtgcagtgtcatggcggagtcagtctggtggaacaaatgttccaggacccaaggctatcccagaataagcaggccctcgaaggcctgggagacttaaagctgctcttcgaatacctcaccctgttcggcatcgcagacaagatctcttttgatctcagcctcgcacggggattagactactataccggagtaatctacgaagcggtcctgctacaaacacccactcaggccggtgaggagcccctcaatgtgggtagcgtggccgctggaggccgttatgacggactggtggggatgttcgatcctaagggtcacaaggtaccctgcgttggtctgagcattggggtggagcggattttttacatcgtcgagcagcgaatgaagactaaaggcgagaaggtgagaactacagaaacccaagtgttcgtagccactcctcaaaagaactttctgcaggagcggttaaaactcattgccgaactttgggactcaggcatcaaagccgaaatgttatataaaaataaccccaagctcctgacacaattgcattattgtgaatcaacaggcatccctctcgttgtcatcatcggcgagcaggagctgaaggagggggttattaaaattaggtccgtcgcatctcgcgaagaggtcgcaattaaacgcgagaattttgtggcagagatccagaaacgtctgtccgaatcctag

SEQ ID NO: 99181 - DNA, 1179 bp, Artificial Sequence
  derived and/or modified sequence
atgcccctgctgggcctgctgcccagaagagcctgggccagcctgctgagccagctgctgagacccccctgcgccagctgcaccggcgccgtgagatgccagagccaggtggccgaggccgtgctgaccagccagctgaaggcccaccaggagaagcccaacttcatcatcaagacccccaaggacttcgacatcgccggccagttcgaccccatgatccccgacgccgagtgcctgaagatcatgtgcgagatcctgagcggcctgcagctgggcgacttcctgatcaaggtgaacgacagaagaatcgtggacggcatgttcgccgtgtgcggcgtgcccgagagcaagttcagagccatctgcagcagcatcgacaagctggacaagatggcctggaaggacgtgagacacgagatggtggtgaagaagggcctggcccccgaggtggccgacagaatcggcgactacgtgcagtgccacggcggcgtgagcctggtggagcagatgttccaggaccccagactgagccagaacaagcaggccctggagggcctgggcgacctgaagctgctgttcgagtacctgaccctgttcggcatcgccgacaagatcagcttcgacctgagcctggccagaggcctggactactacaccggcgtgatctacgaggccgtgctgctgcagacccccacccaggccggcgaggagcccctgaacgtgggcagcgtggccgccggcggcagatacgacggcctggtgggcatgttcgaccccaagggccacaaggtgccctgcgtgggcctgagcatcggcgtggagagaatcttctacatcgtggagcagagaatgaagaccaagggcgagaaggtgagaaccaccgagacccaggtgttcgtggccaccccccagaagaacttcctgcaggagagactgaagctgatcgccgagctgtgggacagcggcatcaaggccgagatgctgtacaagaacaaccccaagctgctgacccagctgcactactgcgagagcaccggcatccccctggtggtgatcatcggcgagcaggagctgaaggagggcgtgatcaagatcagaagcgtggccagcagagaggaggtggccatcaagagagagaacttcgtggccgagatccagaagagactgagcgagagctag

SEQ ID NO: 99182 - DNA, 1662 bp, Artificial Sequence
  derived and/or modified sequence
atgggcgccctggagatgcaggacgaggaggacagaatcgaggccctgaagcaggtggccgacaagctgcccagacccaacctgctgctgctgaagcacctggtgtacgtgctgcacctgatcagcaagaacagcgaggtgaacagaatggacagcagcaacctggccatctgcatcggccccaacatgctgaccctggagaacgaccagagcctgagcttcgaggcccagaaggacctgaacaacaaggtgaagaccctggtggagttcctgatcgacaactgcttcgagatcttcggcgagaacatccccgtgcacagcagcatcaccagcgacgacagcctggagcacaccgacagcagcgacgtgagcaccctgcagaacgacagcgcctacgacagcaacgaccccgacgtggagagcaacagcagcagcggcatcagcagccccagcagacagccccaggtgcccatggccaccgccgccggcctggacagcgccggcccccaggacgccagagaggtgagccccgagcccatcgtgagcaccgtggccagactgaagagcagcctggcccagcccgacagaagatacagcgagcccagcatgcccagcagccaggagtgcctggagagcagagtgaccaaccagaccctgaccaagagcgagggcgacttccccgtgcccagagtgggcagcagactggagagcgaggaggccgaggaccccttccccgaggaggtgttccccgccgtgcagggcaagaccaagagacccgtggacctgaagatcaagaacctggcccccggcagcgtgctgcccagagccctggtgctgaaggccttcagcagcagcagcctggacgccagcagcgacagcagccccgtggccagccccagcagccccaagagaaacttcttcagcagacaccagagcttcaccaccaagaccgagaagggcaagcccagcagagagatcaagaagcacagcatgagcttcaccttcgccccccacaagaaggtgctgaccaagaacctgagcgccggcagcggcaagagccaggacttcaccagagaccacgtgcccagaggcgtgagaaaggagagccagctggccggcagaatcgtgcaggagaacggctgcgagacccacaaccagaccgccagaggcttctgcctgagaccccacgccctgagcgtggacgacgtgttccagggcgccgactgggagagacccggcagcccccccagctacgaggaggccatgcagggccccgccgccagactggtggccagcgagagccagaccgtgggcagcatgaccgtgggcagcatgagagccagaatgctggaggcccactgcctgctgccccccctgccccccgcccaccacgtggaggacagcagacacagaggcagcaaggagcccctgcccggccacggcctgagccccctgcccgagagatggaagcagagcagaaccgtgcacgccagcggcgacagcctgggccacgtgagcggccccggcagacccgagctgctgcccctgagaaccgtgagcgagagcgtgcagagaaacaagagagactgcctggtgagaagatgcagccagcccgtgttcgaggccgaccagttccagtacgccaaggagagctacatctag

SEQ ID NO: 99183 - DNA, 1662 bp, Artificial Sequence
  derived and/or modified sequence
atgggcgcactggaaatgcaggatgaagaagatcgcattgaagccttgaaacaggtcgctgataagttacctcgaccaaacctgctcctgttgaagcatctcgtttacgtgctccaccttatcagcaagaacagcgaggttaatcggatggactcatctaacctcgccatttgcatcgggcccaacatgctgaccctggaaaatgaccagtctctgagcttcgaagcccagaaggatctcaataacaaagtgaaaacacttgtggagttccttattgataactgcttcgagattttcggtgagaacattccagtgcactcctcgattacatccgatgactctctcgagcatactgattccagtgatgtgagtactctgcagaatgatagcgcctacgactctaatgacccagacgtggagtcaaacagctcttccggaatctcgtcaccttccaggcagcctcaggtcccgatggccacagcggctggcctggatagtgccggtccacaggatgctcgggaggtttctcccgaacccatcgtttctaccgtggcgcgtttgaaatcttcactcgcgcaacccgataggcgttactctgaaccgtcaatgcccagctcccaggagtgtttagagagtagggttactaaccagacgctgacaaagtctgagggagacttccctgttccaagggtgggctctcgacttgagtcagaggaagctgaggatccgtttccggaagaagtatttcccgctgtgcagggcaagacgaagaggccggtcgaccttaaaattaagaacctggcccccgggagcgtgcttcctagagcccttgtgttgaaggcatttagctctagctcactggatgctagctccgattcctcccctgtcgctagcccatccagtcccaagcgcaacttcttcagcaggcaccagtctttcaccacaaaaaccgagaagggtaagccaagccgggagataaagaagcacagcatgagtttcacttttgcgccacataaaaaggtgctcactaaaaatctaagcgccggttcaggaaagagccaggactttacaagagatcacgtcccgcgcggcgttagaaaagagtctcagctagctggacggatcgtccaggaaaacggttgcgaaacccacaaccagacggccagaggcttctgtttgcggcctcatgctttgtctgtggacgacgtgtttcagggcgccgattgggagagacctggcagccccccctcatacgaagaggccatgcaggggccggccgccaggctggtagccagtgaatcacagacagtgggaagcatgaccgtcggctcaatgagggcccgcatgttggaggctcactgtcttttgcctcctctcccacctgctcaccacgtcgaagactcccggcacagaggcagcaaggaaccactcccagggcatggcctgagtccattaccagagcggtggaaacaaagtcgtacagtgcatgccagtggcgactccctgggccatgtgagtggtccagggaggcctgagctgctgccactccgcactgtttccgaatctgttcagagaaataagagggattgcctcgtgcgccgctgttcccagccagtttttgaagctgaccagtttcaatatgccaaagagtcctacatttag

SEQ ID NO: 99184 - DNA, 1662 bp, Artificial Sequence
  derived and/or modified sequence
atgggcgccctggagatgcaggatgaggaggacagaattgaggccctgaagcaggtggccgacaagctgccccggcccaacctgctgctgctgaagcacctggtgtatgtgctgcacctgatcagcaagaacagcgaggtgaacaggatggacagcagcaacctggccatctgcatcggccccaacatgctgaccctggagaatgaccagagcctgagctttgaggcccagaaggacctgaacaacaaggtgaagaccctggtggagttcctgattgacaactgctttgagatctttggagagaacatccctgtgcacagcagcatcaccagtgatgacagcctggagcacacagacagcagtgatgtgtccaccctgcagaatgacagcgcctatgacagcaatgaccctgatgtggagagcaacagcagcagcggcatcagcagccccagccggcagccccaggtgcccatggccacagctgctggcctggacagcgctggcccccaggatgcccgggaggtgtccccagagcccatcgtgtccacagtggcccggctgaagagcagcctggcccagcctgaccggcgctacagcgagcccagcatgcccagcagccaggagtgcctggagagccgggtgaccaaccagaccctgaccaagtctgagggggacttccctgtgccccgggtgggcagccggctggagagcgaggaggccgaggaccccttccctgaggaggtgtttcctgctgtgcagggcaagaccaagaggcctgtggacctgaagatcaagaacctggcccctggctctgtgctgccccgggccctggtgctgaaggccttcagcagcagcagcctggatgccagcagtgacagcagccctgtggccagccccagcagccccaagaggaacttcttcagccgccaccagagcttcaccaccaagacagagaagggcaagcccagccgggagatcaagaagcacagcatgtccttcacctttgccccccacaagaaggtgctgaccaagaacctgtctgctggcagcggcaagagccaggacttcacccgggaccacgtgccccggggcgtgaggaaggagagccagctggccggcagaattgtgcaggagaatggctgtgagacccacaaccagacagcccggggcttctgcctgcggccccacgccctgtctgtggatgatgtgttccagggcgctgactgggagcggcccggcagccccccatcctatgaggaggccatgcagggccctgctgcccggctggtggccagcgagagccagacagtgggctccatgacagtgggctccatgagggccaggatgctggaggcccactgcctgctgccccccctgcccccagcccaccacgtggaggacagccgccaccggggcagcaaggagcccctgcccggccacggcctgagccccctgcctgagcgctggaagcagagcaggacagtgcacgccagcggggacagcctgggccacgtgtctggccctggccggcctgagctgctgcccctgaggacagtgtctgagagcgtgcagaggaacaagagggactgcctggtgcggcgctgcagccagcctgtgtttgaggccgaccagttccagtatgccaaggagagctacatctag

SEQ ID NO: 99185 - DNA, 1662 bp, Artificial Sequence
  derived and/or modified sequence
atgggcgccctggagatgcaggacgaggaggaccggatcgaggccctcaaacaggttgctgacaagcttcctagacctaatctattgctgctgaagcaccttgtgtacgtcctgcacctcatttcaaagaacagcgaagtcaatcgcatggactcatctaatctggcaatctgtattggtcctaacatgctgacactggaaaacgaccagagcttgtcatttgaggcacagaaggatctgaataacaaggtgaaaaccctagtggagttcctgatcgacaattgctttgaaatctttggtgagaatatcccggtacatagctctatcacctctgatgactccctcgagcataccgatagcagcgacgtgagcactctgcagaatgatagcgcttatgacagcaacgaccccgacgtagagagtaatagttctagtggcatctcttcaccctccagacaaccccaggtgcccatggccacagctgccggccttgattcagctggaccccaggatgccagagaagtgtctcccgaacctatagtttctacggtggcccggttgaaatcctccctggcgcaacccgatcggcggtattcagaaccaagcatgccttccagtcaggaatgcctggagtccagagtgaccaaccagactctcactaagtctgaaggcgactttccagtgccccgggtcgggtctcgactggagtccgaagaggccgaagatcccttccctgaggaggtatttccagccgtgcagggtaagacaaaacgacctgtggacctgaagattaagaatctggcccccgggtcggtgttgcccagggcactggttttaaaagcattcagtagttccagccttgacgccagttctgattcttcccccgtcgcctccccctcctccccaaagaggaactttttttcccggcatcagagctttacaacgaaaaccgagaaggggaaacctagcagggagattaagaagcactcgatgtcctttacctttgcgccccataaaaaggtcctgaccaaaaacttgtccgcagggagcggcaaatctcaggactttactcgggatcatgtgcccaggggcgtgcggaaggagtctcagttggcaggtagaattgtccaggagaatgggtgtgaaacccataaccagaccgccagggggttctgcctgcgcccacatgcactcagcgtagatgatgtttttcagggcgcggactgggagcgccccggatcccctccttcttacgaggaggccatgcagggcccagctgctaggctagtggcgtcagagagccagaccgtcgggtccatgactgtgggcagcatgcgggctcgcatgctcgaggcacattgtcttctgccacctctgccaccggctcaccacgtcgaagattcccgccataggggtagcaaagagccactgccggggcacggactcagcccgctgcccgaacgctggaagcaatcgaggaccgtgcatgccagcggggactctctcggccacgtgtccgggccagggcgtcccgaattgctaccattgaggactgttagcgagtccgtccagagaaataaacgagactgcctggttcggcgatgttcccagcccgtgtttgaggccgaccagttccaatatgctaaagagtcctacatctag

SEQ ID NO: 99186 - DNA, 1662 bp, Artificial Sequence
  derived and/or modified sequence
atgggtgccttggaaatgcaagatgaagaagaccgcatcgaggccctgaaacaagtggcagacaaactccccaggcccaacctgctactgctcaaacatcttgtttacgtgctccatctgatcagcaagaatagcgaggtgaatcggatggattcatctaacctggcaatttgcatcgggccaaatatgctgacgcttgaaaacgatcagagtctgagcttcgaagcgcaaaaggatctaaataataaggttaagacccttgtggaattcctgattgataactgtttcgaaatatttggggaaaatattccggtgcattctagcattacaagtgatgatagcctcgagcacacagactccagtgacgtgagtactctgcaaaatgactcagcatacgattctaacgaccccgatgtcgaatccaactcgtcttcaggtataagctccccttctcgccagccacaggtgcccatggcgactgctgctggtcttgactcagcaggccctcaggacgcacgtgaggtgtctccggaaccaatcgtgagtacagtagccagattaaagtcatctctcgcccagcccgaccgcagatactctgaaccctccatgccatcatcccaggaatgcctggagagccgagttaccaaccagacccttacaaagtccgagggagattttccagtgcctagggtggggagccgtctggaaagtgaggaggctgaagaccccttccctgaggaggtcttccccgctgtgcaaggtaagactaaaagacccgtggacttgaaaatcaagaatctcgcccctggttctgtgctgccccgagccttagtattgaaagccttcagttctagctccctggacgcaagttcggacagttcccctgttgcatcccctagcagccctaagcgtaacttcttttctcggcaccagtctttcacaaccaaaaccgaaaaaggcaagcctagccgagagataaaaaagcattccatgtcgtttacatttgccccacacaagaaggtccttaccaagaacctcagtgccggaagcggaaagtctcaggattttactagagatcacgtcccgagaggcgtgagaaaggagtcccaattggcaggacgaattgtgcaggaaaatggctgcgagacacacaaccagacagcgcgaggattttgcctacggcctcacgctttaagtgtggacgatgtttttcagggggctgattgggagaggccaggatcacccccatcctacgaggaggccatgcagggccctgcagcacgattagtggcatctgagtctcagacagtcggatccatgacagtggggagcatgagggccagaatgctggaggcccactgtctgcttcctccgctcccccctgctcatcacgtggaggacagcagacacaggggatctaaagaacctcttcctggccacggcctgagcccattaccggagagatggaagcagtcaaggactgttcacgcttctggcgattcactcggccacgtgagtgggcctgggagacctgagttactgcctctcaggacagtctcagagagcgtacagagaaacaagcgggactgcttagtacggcgttgctcccagccagtgtttgaggccgatcagtttcaatacgccaaggaatcttacatctag

SEQ ID NO: 99187 - DNA, 3051 bp, Artificial Sequence
  derived and/or modified sequence
gacatagctgccctaaaaggaatgaggaagcgagagctctccagtgtctggctggctccgtccgtgtgacagcccatgatgttctttccggtctctgtaatattctgaatttccacctgcccgccccttcgcttataatgcagagcatgtgaagggagaccggctcggtctctctctctcccagtggactagaaggagcagagagttatgctgtttctcccattctttacagctcaccggatgtaaaagaactctggctagagaccctccaaggacagaggcacagccacacgggagtgaaatccacccctggacagtcagccgcaatactgatgaagctgagaagcagccacaatgcttcaaaaacactaaacgccaataatatggagacactaatcgaatgtcaatcagagggtgatatcaaggaacatcccctgttggcatcatgtgagagtgaagacagtatttgccagctcattggacattctcactattctatgccttaaaggcccttcaacggaagggatattcaggagagcagccaacgagaaagcccgtaaggagctgaaggaggagctcaactctggggatgcggtggatctggagaggctccccgtgcacctcctcgctgtggtctttaaggacttcctcagaagtatcccccggaagctactttcaagcgacctctttgaggagtggatgggtgctctggagatgcaggacgaggaggacagaatcgaggccctgaaacaggttgcagataagctcccccggcccaacctcctgctactcaagcacttggtctatgtgctgcacctcatcagcaagaactctgaggtgaacaggatggactccagcaatctggccatctgcattggacccaacatgctcaccctggagaatgaccagagcctgtcatttgaagcccagaaggacctgaacaacaaggtgaagacactggtggaattcctcattgataactgctttgaaatatttggggagaacattccagtgcattccagtatcacttctgatgactccctggagcacactgacagttcagatgtgtcgaccctgcagaatgactcagcctacgacagcaacgaccctgatgtggaatccaacagcagcagtggcatcagctctcccagcaggcagccccaggtgcccatggccacagctgctggcttggatagcgcgggcccacaggatgcccgagaggtcagcccagagcccattgtgagcaccgtggccaggctgaaaagctccctcgcacagcccgataggagatactcagagcccagcatgccatcctcccaggagtgcctcgagagccgggtgacaaaccaaacactaacaaagagtgaaggggacttccccgtgccccgggtaggctctcgtttggaaagtgaggaggctgaagacccatttccagaggaggtcttccctgcagtgcaaggcaaaaccaagaggccggtggacctgaagatcaagaacttggccccgggttcggtgctcccgcgggcactggttctcaaagccttctccagcagctcgctggacgcgtcctctgacagctcgcccgtggcttctccttccagtcccaaaagaaatttcttcagcagacatcagtctttcaccacaaagacagagaaaggcaagcccagccgagaaattaaaaagcactccatgtctttcacctttgcccctcacaaaaaagtgctgaccaaaaacctcagcgcgggctctgggaaatcgcaagactttaccagggaccacgtcccgaggggtgtcagaaaggaaagccagcttgccggccgaatcgtgcaggaaaatgggtgtgaaacccacaaccaaacagcccgcggcttctgcctgagaccccacgccctctcggtggatgatgtgttccagggagctgactgggagaggcctggaagcccaccctcttatgaagaggccatgcagggcccggcagccagactagtggcctccgagagccagaccgtggggagcatgacggtggggagcatgagggcgaggatgctggaggcgcactgcctcctaccccctcttccacctgctcaccacgtagaggactcaagacacaggggcagcaaagagccactccctggccacggactctctcccctgcctgagcgatggaaacagagcagaactgtccatgcttctggggactctctggggcacgtgtctggcccagggagacctgagctcctcccgctgaggaccgtctccgagtccgtgcagaggaataagcgggactgtctcgtgcgacgatgtagccagccggtctttgaggctgaccaattccaatatgccaaagaatcgtatatttaggagggaggccatacgccatgccatagcttgtgctatctgtaaatatgagacttgtaaagaactgcctgtagattgtttttaaaaggtcttgaataagctccttgagaaagttgtggaaagccctcctcagtgaggatagctacaccatggccatggcgcatcagatagtctctgtgtacctggatttgtgcaatatgtaaaaatgtatcaaatgtattatagataaggtgttaggtgcaaaggatgtctaataatccctgcacacgttttgaacttgcagtgaagtacactgctgttccttgcttcctggggcacttttctcttggttagtgtttaaaaattatcttcgcttttttaatgtggcctcaaatgtcatgccaattttcacatcttccacaaactccatttagggagaaatgtttaaatctctggtataagtttactccataccagagtaaactatatattactctatataagcagtcttgcaataactaatcaccaccatagaagaaagaaacagactgcaaggaacagagttgagtgtctggagtcatcaaaggcattaaaaactccagtaaaagctggggccgtagcaaaaatcatgaaaaacacttcaacgtgtcctttcaatcatccaattaaatgtgggtagattaatgaaaatgtattacatcaatattaactcat

SEQ ID NO: 99188 - DNA, 1352 bp, Artificial Sequence
  derived and/or modified sequence
atttcagttttcttttccgttttgtgcaatttcacttatgataccggccaatgcttggttgctattttggaaactccccttaggggatgcccctcaactggccctataaagggccagcctgagctgcagaggattcctgcagaggatcaagacagcacgtggacctcgcacagcctctcccacaggtaccatgaaggtctccgcggcagccctcgctgtcatcctcattgctactgccctctgcgctcctgcatctgcctccccatattcctcggacaccacaccctgctgctttgcctacattgcccgcccactgccccgtgcccacatcaaggagtatttctacaccagtggcaagtgctccaacccagcagtcgtctttgtcacccgaaagaaccgccaagtgtgtgccaacccagagaagaaatgggttcgggagtacatcaactctttggagatgagctaggatggagagtccttgaacctgaacttacacaaatttgcctgtttctgcttgctcttgtcctagcttgggaggcttcccctcactatcctaccccacccgctccttgaagggcccagattctaccacacagcagcagttacaaaaaccttccccaggctggacgtggtggctcacgcctgtaatcccagcactttgggaggccaaggtgggtggatcacttgaggtcaggagttcgagaccagcctggccaacatgatgaaaccccatctctactaaaaatacaaaaaattagccgggcgtggtagcgggcgcctgtagtcccagctactcgggaggctgaggcaggagaatggcgtgaacccgggaggcggagcttgcagtgagccgagatcgcgccactgcactccagcctgggcgacagagcgagactccgtctcaaaaaaaaaaaaaaaaaaaaaaatacaaaaattagccgggcgtggtggcccacgcctgtaatcccagctactcgggaggctaaggcaggaaaattgtttgaacccaggaggtggaggctgcagtgagctgagattgtgccacttcactccagcctgggtgacaaagtgagactccgtcacaacaacaacaacaaaaagcttccccaactaaagcctagaagagcttctgaggcgctgctttgtcaaaaggaagtctctaggttctgagctctggctttgccttggctttgccagggctctgtgaccaggaaggaagtcagcatgcctctagaggcaaggaggggaggaacactgcactcttaagcttccgccgtctcaacccctcacaggagcttactggcaaacatgaaaaatcggcttaccattaaagttctcaatgcaaccataaa

SEQ ID NO: 99189 - DNA, 1244 bp, Artificial Sequence
  derived and/or modified sequence
tggatgagggaaaggaggtaagatctgtaatgaataagcaggaactttgaagactcagtgactcacctctcccacaggtaccatgaaggtctccgcggcagccctcgctgtcatcctcattgctactgccctctgcgctcctgcatctgcctccccatattcctcggacaccacaccctgctgctttgcctacattgcccgcccactgccccgtgcccacatcaaggagtatttctacaccagtggcaagtgctccaacccagcagtcgtctttgtcacccgaaagaaccgccaagtgtgtgccaacccagagaagaaatgggttcgggagtacatcaactctttggagatgagctaggatggagagtccttgaacctgaacttacacaaatttgcctgtttctgcttgctcttgtcctagcttgggaggcttcccctcactatcctaccccacccgctccttgaagggcccagattctaccacacagcagcagttacaaaaaccttccccaggctggacgtggtggctcacgcctgtaatcccagcactttgggaggccaaggtgggtggatcacttgaggtcaggagttcgagaccagcctggccaacatgatgaaaccccatctctactaaaaatacaaaaaattagccgggcgtggtagcgggcgcctgtagtcccagctactcgggaggctgaggcaggagaatggcgtgaacccgggaggcggagcttgcagtgagccgagatcgcgccactgcactccagcctgggcgacagagcgagactccgtctcaaaaaaaaaaaaaaaaaaaaaaatacaaaaattagccgggcgtggtggcccacgcctgtaatcccagctactcgggaggctaaggcaggaaaattgtttgaacccaggaggtggaggctgcagtgagctgagattgtgccacttcactccagcctgggtgacaaagtgagactccgtcacaacaacaacaacaaaaagcttccccaactaaagcctagaagagcttctgaggcgctgctttgtcaaaaggaagtctctaggttctgagctctggctttgccttggctttgccagggctctgtgaccaggaaggaagtcagcatgcctctagaggcaaggaggggaggaacactgcactcttaagcttccgccgtctcaacccctcacaggagcttactggcaaacatgaaaaatcggcttaccattaaagttctcaatgcaaccataaa

SEQ ID NO: 99190 - protein, 126 aa, Artificial Sequence
  derived and/or modified sequence
MSVMDLANTCSSFQSDLDFCSDCGSVLPLPGAQDTVTCIRCGFNINVRDFEGKVVKTSVVFHQLGTAMPMSVEEGPECQGPVVDRRCPRCGHEGMAYHTRQMRSADEGQTVFYTCTNCKFQEKEDS

SEQ ID NO: 99191 - DNA, 381 bp, Artificial Sequence
  derived and/or modified sequence
atgagcgtgatggacctggccaacacctgcagcagcttccagagcgacctggacttctgcagcgactgcggcagcgtgctgcccctgcccggcgcccaggacaccgtgacctgcatcagatgcggcttcaacatcaacgtgagagacttcgagggcaaggtggtgaagaccagcgtggtgttccaccagctgggcaccgccatgcccatgagcgtggaggagggccccgagtgccagggccccgtggtggacagaagatgccccagatgcggccacgagggcatggcctaccacaccagacagatgagaagcgccgacgagggccagaccgtgttctacacctgcaccaactgcaagttccaggagaaggaggacagctag

SEQ ID NO: 99192 - DNA, 381 bp, Artificial Sequence
  derived and/or modified sequence
atgtcggtgatggatctcgcaaatacttgttcttcttttcaaagtgatttggacttttgctccgattgcggtagtgtgctgcctttgccaggagcgcaggatactgttacatgcatcaggtgtggctttaacataaatgttcgcgatttcgaaggaaaggtcgtcaaaactagcgtcgtcttccatcagctgggaaccgcgatgcctatgtctgttgaggaaggccctgaatgccagggtccagttgtagatcgtcgttgcccacggtgcggccacgaagggatggcatatcacactagacagatgcgaagtgccgatgaaggtcaaactgtgttttatacctgtacaaactgtaagttccaggagaaggaagacagctag

SEQ ID NO: 99193 - DNA, 381 bp, Artificial Sequence
  derived and/or modified sequence
atgtctgtgatggaccttgcgaacacttgctcaagcttccaatctgatctggacttttgttcggactgtggaagcgttcttcccctgcccggtgcccaagacacagtcacttgtatccggtgcggtttcaacattaacgtcagggatttcgaggggaaggtagtgaagacatcagtggtgtttcaccaactggggacggccatgccaatgagcgtggaagaaggacccgagtgccagggccctgtggtggaccgtcgctgcccccgatgcggacatgaaggaatggcgtaccacacacggcaaatgcgcagcgccgatgaggggcagaccgtcttttatacctgtactaactgtaaatttcaggaaaaagaagactcttag

SEQ ID NO: 99194 - DNA, 381 bp, Artificial Sequence
  derived and/or modified sequence
atgtcggtaatggacttggccaatacatgctccagttttcagagtgacctcgacttctgttccgattgtggatcagtgctgcctctgccaggcgcccaagacactgtaacatgtattcgatgcggcttcaatatcaatgtgagagattttgagggcaaggtggtaaaaacgtcagtggtcttccatcagttaggcactgccatgcctatgtctgtagaggagggacccgagtgtcaaggcccagttgttgatcggcgttgtcctagatgtggtcatgagggaatggcgtaccacacaagacaaatgcgcagtgccgacgaagggcaaactgtgttctatacctgcacaaattgcaagttccaggagaaagaagactcttag

SEQ ID NO: 99195 - DNA, 381 bp, Artificial Sequence
  derived and/or modified sequence
atgtcagtcatggacctggctaatacatgttcttctttccagagtgatctagatttctgttccgactgcgggtctgtgctgccactgcctggggcacaggacacagtgacttgtattaggtgcggtttcaatattaatgtgagggacttcgagggaaaggtggtgaaaacttctgtagtcttccatcagctaggaaccgctatgccaatgagcgtggaggaaggccccgaatgtcaaggccccgtggtggaccgacgatgccctaggtgcgggcacgaagggatggcgtatcacactaggcaaatgagatccgccgacgagggacagactgtcttttatacttgcacaaattgcaagtttcaggagaaggaagattcctag

SEQ ID NO: 99196 - DNA, 381 bp, Artificial Sequence
  derived and/or modified sequence
atgagcgtgatggatctggccaacacttgtagctccttccagtcagatctagatttctgtagcgactgtggcagtgtcctccctttgccgggagcccaggatactgtaacctgtatccggtgtggcttcaacatcaacgtcagagactttgaggggaaggtggtcaagaccagtgtggtgttccaccagctcggcaccgcaatgccaatgagcgttgaggagggcccagagtgccagggccccgtagtcgacagaagatgccctaggtgcggacatgagggcatggcctaccacacaagacagatgagaagcgccgacgaagggcagactgtgttttacacctgtactaactgcaagtttcaggagaaagaggacagctag

SEQ ID NO: 99197 - DNA, 381 bp, Artificial Sequence
  derived and/or modified sequence
atgagcgtcatggacctcgcaaacacatgttcaagctttcagtctgatttggacttctgtagtgactgcgggagcgtcttacccctgcccggggcgcaagatacagttacatgcattagatgcggattcaacattaatgtgcgagacttcgaaggcaaggtcgttaagacctcagtcgtgttccatcagctcggcactgctatgcctatgtccgtcgaagagggacctgagtgccagggaccagttgtcgatcggaggtgtcctcgctgcggccacgaaggtatggcttatcataccagacagatgaggtctgccgatgaagggcagactgtgttttacacatgtacgaattgcaaattccaagagaaagaagacagttag

SEQ ID NO: 99198 - DNA, 381 bp, Artificial Sequence
  derived and/or modified sequence
atgagcgtcatggatcttgccaacacctgctcctcatttcagtcagacctggatttttgtagtgattgtggcagcgttcttcccctgcctggtgcccaggacactgtgacttgtatcaggtgcggcttcaacatcaatgtcagggatttcgagggaaaggtcgtgaaaacgtccgtcgtgtttcaccagctgggaacagctatgccaatgtctgtcgaggagggccccgagtgccaggggcctgtcgtggacagacggtgcccacggtgtggccacgagggcatggcataccacacccgccaaatgcggagcgccgacgaaggccagaccgtgttttatacttgcaccaattgtaaattccaggaaaaagaggattcttag

SEQ ID NO: 99199 - DNA, 381 bp, Artificial Sequence
  derived and/or modified sequence
atgagtgttatggatctggcaaacacgtgttccagctttcagtctgatttggatttctgtagcgactgtggtagcgtcctgcccctgccaggggctcaagacaccgttacctgcattcggtgtgggtttaacattaacgtacgagatttcgagggcaaggttgtgaaaacctccgtggtgttccaccagctaggaactgccatgcccatgtctgtcgaggaagggccagagtgccaaggtcctgtcgtggaccgaaggtgtcccagatgcggacacgagggtatggcatatcacacgcggcagatgcgcagtgcagacgaggggcaaacggtgttctacacatgtaccaattgtaaattccaggagaaagaggacagctag

SEQ ID NO: 99200 - DNA, 381 bp, Artificial Sequence
  derived and/or modified sequence
atgagcgtcatggatctggccaatacatgttcatccttccagtctgatttggacttctgctccgactgtggatctgtgttaccgctcccaggagcccaggacaccgtgacctgtatacgatgcggttttaatatcaatgttcgggattttgagggtaaagtcgtgaagacctccgtcgtctttcatcaactagggacggcaatgccaatgtcagtggaagagggcccggagtgtcagggaccagtggtcgataggagatgccctcgatgcgggcacgagggcatggcataccatacacggcaaatgcgatcagcagatgagggtcagacagtgttttacacatgtacaaattgtaagtttcaggagaaggaagatagctag

SEQ ID NO: 99201 - DNA, 381 bp, Artificial Sequence
  derived and/or modified sequence
atgtcagtgatggatttggcaaatacttgctcttcctttcaatcggatctggatttttgtagcgattgcggttcggtactccccttgccaggcgcccaagacacagtgacttgcatacggtgcggatttaacatcaatgtacgcgacttcgagggcaaagtagtcaaaaccagcgtggtgtttcaccagttgggcactgcgatgcctatgtccgtggaagaaggccccgaatgccagggacctgtggtagaccgcaggtgccctcgatgtggccatgaagggatggcttaccatacaaggcagatgcgtagcgccgatgaggggcaaaccgtgttttatacctgcaccaactgcaagtttcaagagaaggaggatagctag

SEQ ID NO: 99202 - DNA, 381 bp, Artificial Sequence
  derived and/or modified sequence
atgtccgttatggatctggcgaatacctgctcttctttccaaagcgacctagatttctgcagcgattgcggcagcgtcttgcccctgcctggggcacaagacaccgtgacctgcattagatgtggattcaacattaacgtcagagacttcgaagggaaagtcgtaaaaactagcgtcgtgtttcatcagctggggactgccatgcccatgtctgttgaggaggggcctgaatgccagggtccagtggtcgacagacgttgtccccgatgtggacatgaggggatggcatatcacacccggcagatgcgatcagctgacgaaggacaaactgtcttttatacctgcacgaattgtaagttccaagagaaagaggacagctag

SEQ ID NO: 99203 - DNA, 381 bp, Artificial Sequence
  derived and/or modified sequence
atgagcgtgatggatctggctaatacctgttccagctttcagagcgatctggatttctgttcagattgcggcagtgtgctgcctcttccaggggcccaggacaccgtaacatgcattcgatgtggcttcaacattaatgttcgcgacttcgaagggaaggtagtgaaaacaagtgtagtttttcaccaactgggaaccgccatgccgatgagtgttgaggagggcccagaatgtcaggggccggtcgttgacagaaggtgtcccaggtgtggccacgaaggtatggcttatcacacccgccagatgcggagtgctgatgaagggcagaccgtgttctacacgtgcactaattgcaagtttcaggagaaggaggactcatag

SEQ ID NO: 99204 - DNA, 381 bp, Artificial Sequence
  derived and/or modified sequence
atgagcgttatggatctggccaatacgtgctcatcattccagtctgacctggacttttgctccgattgcggatctgtcctcccattgccaggcgcccaggacactgtcacatgtattaggtgcggttttaacatcaatgtgagggattttgaaggtaaggtggtcaagaccagcgtggtattccatcagctcggcacagccatgcctatgtccgtcgaggaagggcctgaatgtcagggtcccgtcgtggaccggcgctgtccccgatgtgggcacgaggggatggcttaccatacacgacagatgcgttctgcagatgagggacagacagtgttttacacctgcacaaactgtaagttccaggagaaggaggactcctag

SEQ ID NO: 99205 - DNA, 381 bp, Artificial Sequence
  derived and/or modified sequence
atgagcgtcatggacctagcgaatacatgcagtagctttcagtccgacctcgatttttgcagcgattgcggctcagtgcttcctctaccaggagctcaagataccgttacatgcattagatgcggttttaatattaacgtcagggatttcgagggcaaggtcgtgaagacgtctgtggtgtttcaccagttgggaactgctatgccgatgtcggtggaggaaggcccagagtgccaggggccagtggtcgatcgcagatgccccaggtgcggccatgaggggatggcctatcacaccaggcagatgcggagcgctgacgagggtcagaccgtcttctatacctgtacaaattgcaaatttcaggagaaggaggattcttag

SEQ ID NO: 99206 - DNA, 381 bp, Artificial Sequence
  derived and/or modified sequence
atgagtgtcatggatctcgcaaatacctgttctagttttcagagcgacctcgacttctgtagtgactgtggctccgtgcttccccttccgggggcccaagacactgtgacctgtatccgctgcggtttcaacattaatgtgcgagactttgagggtaaggtggttaagacctctgtggttttccatcagctcggcactgccatgccgatgagcgtggaagaaggacccgagtgtcaggggccagttgtagatcgtcgttgtcctaggtgtggccacgagggcatggcctaccacaccaggcagatgagatctgctgacgaaggtcagactgtattctatacctgtaccaattgcaaatttcaggagaaggaagattcatag

SEQ ID NO: 99207 - DNA, 381 bp, Artificial Sequence
  derived and/or modified sequence
atgagtgtaatggacctagctaatacttgcagtagttttcaaagtgacctggatttctgtagtgactgtggctcagttttgccgctccctggagcccaggacactgtaacatgtatcagatgcgggtttaatatcaatgtgagggatttcgagggaaaagtggtgaagaccagcgtcgtgttccaccagctgggcacagccatgcccatgtccgtggaagagggccccgagtgccaggggccagtggttgaccgaagatgtccgagatgcggccacgaggggatggcataccacactagacagatgcggagcgctgatgaggggcagacggttttttacacctgcaccaattgcaagtttcaggagaaagaggactcttag

SEQ ID NO: 99208 - DNA, 381 bp, Artificial Sequence
  derived and/or modified sequence
atgagcgtgatggatctcgccaacacctgttccagcttccagtccgatctcgatttctgctctgattgtgggtcggtgctgcccctgcccggcgcccaagatactgtgacctgcatacgctgtgggtttaacatcaatgtgcgagattttgagggtaaggtagttaagacatctgtggtatttcatcagctggggacagctatgccgatgtccgtcgaagaaggacccgaatgccagggtccagtcgtcgaccgtagatgccctcgctgtgggcatgaaggcatggcctaccacacaagacagatgcgaagtgccgatgaagggcagactgtgttttacacctgtacaaattgtaagttccaggagaaagaagactcctag

SEQ ID NO: 99209 - DNA, 381 bp, Artificial Sequence
  derived and/or modified sequence
atgagtgtcatggatttggcaaatacctgtagcagctttcagtcggaccttgatttttgcagcgattgtggcagcgtgctgcctctgccaggcgctcaggacacagtgacctgtatcagatgcggctttaatatcaacgtgagggattttgaaggaaaagtcgtcaaaacatccgtggtgttccaccagctgggtacagcaatgccaatgtcagttgaggaagggcctgagtgccagggccctgtggtcgaccgccggtgcccaaggtgcgggcacgaaggaatggcttatcacacgaggcagatgagaagcgccgatgaaggccagacagtcttctacacatgcacaaactgcaagtttcaggaaaaggaggactcctag

SEQ ID NO: 99210 - DNA, 381 bp, Artificial Sequence
  derived and/or modified sequence
atgagtgtgatggacctagcaaacacatgcagctcgttccagagcgacctggatttttgttctgattgcggtagtgtgctcccattacccggagctcaggatacggtgacatgcattagatgtggatttaacataaacgtacgggactttgaggggaaagttgtgaagacctccgtggtcttccaccagctagggaccgctatgccaatgtcggtagaagagggacccgagtgccagggacctgtggtagatcggaggtgtccaaggtgcggacacgagggcatggcgtaccacacaagacagatgaggtctgccgacgaggggcagacagtgttttacacctgtactaactgcaagttccaggagaaagaggactcctag

SEQ ID NO: 99211 - DNA, 381 bp, Artificial Sequence
  derived and/or modified sequence
atgtctgtgatggacctcgcaaacacttgttctagcttccagtcggatctagacttttgttccgattgtggttctgtactgccgctaccaggtgcgcaggataccgtaacatgtatccggtgcgggtttaatattaacgttcgggatttcgaggggaaggtggtcaagacctccgttgtatttcaccagctgggaaccgccatgcctatgagtgtcgaagagggccccgagtgtcagggccctgtcgtcgaccgtcgctgtcctagatgcggtcacgaagggatggcatatcatacgagacagatgcggtctgctgacgaaggacagactgttttctacacttgcactaattgcaaatttcaggaaaaagaggacagttag

SEQ ID NO: 99212 - DNA, 381 bp, Artificial Sequence
  derived and/or modified sequence
atgtccgttatggatctggccaatacttgtagttcattccagagcgacctcgatttctgctcagattgcgggagtgtgctgcctttaccgggtgcccaggacacagttacatgtatccggtgcgggttcaacatcaacgtgcgggactttgagggcaaagtggtgaagacttctgtcgtatttcaccagctgggcactgccatgcccatgtcagttgaagaagggccagaatgtcagggccctgtggttgacaggcggtgcccaaggtgcggtcatgagggtatggcctaccacactcgtcagatgaggagcgctgacgagggacagaccgtgttctatacgtgcaccaattgcaagttccaagagaaggaggattcatag

SEQ ID NO: 99213 - DNA, 381 bp, Artificial Sequence
  derived and/or modified sequence
atgtcagttatggatctagccaatacttgtagttcttttcaatctgatctcgacttctgtagtgattgtgggtccgtactgcccctcccaggggcgcaggatactgtgacttgcatcaggtgtggtttcaatattaatgttagggacttcgaggggaaagtggtgaaaacttctgtggtcttccatcagctcgggacagcgatgcccatgagcgtggaagaaggccctgaatgccaaggccccgttgttgatcgccgctgcccaaggtgcggacatgaaggaatggcctaccatacaaggcaaatgcggtccgctgatgagggtcaaaccgtgttctacacttgcaccaactgcaaattccaggagaaggaagactcctag

SEQ ID NO: 99214 - DNA, 381 bp, Artificial Sequence
  derived and/or modified sequence
atgtccgtgatggacctcgctaacacatgctcttcttttcaatccgacttggatttctgcagcgactgcggttcggtgttaccattgcccggagctcaggacaccgtgacatgtatacggtgcgggttcaacatcaacgtgcgggacttcgagggcaaagtggtgaagacgtccgtcgtatttcaccaacttggcacagctatgcctatgtcggtcgaagagggtcctgaatgccaaggcccggttgtggacagacggtgtccaaggtgcggccacgagggaatggcttaccacaccaggcagatgcggagcgcagacgagggacagactgtgttttacacctgcacaaactgcaagttccaagagaaggaagacagctag

SEQ ID NO: 99215 - DNA, 381 bp, Artificial Sequence
  derived and/or modified sequence
atgtccgttatggacctggctaacacttgctcttcattccaatctgaccttgacttctgctctgactgcggcagcgtccttccgctgccgggcgcccaggacacagtgacatgcatcaggtgcgggttcaacataaacgtgcgtgactttgaaggcaaggtagttaagacgtccgtcgtgtttcatcagctgggtacagccatgccaatgtcagtggaagaaggaccagagtgccagggacctgtagtggaccgaagatgccctagatgtgggcacgaagggatggcttaccacactcgccagatgcgcagcgccgacgagggtcaaactgtcttctatacatgcactaattgtaagttccaggagaaagaggacagctag

SEQ ID NO: 99216 - DNA, 381 bp, Artificial Sequence
  derived and/or modified sequence
atgtccgtaatggatctagccaatacgtgctcatcatttcaatccgacttagacttttgctctgactgtggcagcgtgctccctttgcccggggcccaggataccgtgacctgcatacgctgcggcttcaacatcaacgtgcgtgacttcgaaggaaaagtggttaagacctctgtagtatttcatcagctgggcacagccatgcccatgagcgtcgaggagggcccggagtgccagggccccgtcgtagataggaggtgtccccgatgcgggcacgagggcatggcttaccataccaggcagatgagatcagcggacgagggacagacagtgttctatacgtgtaccaattgcaagtttcaggaaaaggaggattcttag

SEQ ID NO: 99217 - DNA, 381 bp, Artificial Sequence
  derived and/or modified sequence
atgagtgtgatggatctcgccaatacttgtagctcattccagagcgatcttgacttttgcagcgactgcgggtcggtgttaccactgccgggggcccaggataccgtcacttgcatccgctgcggcttcaatattaatgtgcgcgatttcgagggtaaagttgtgaagacctcagtagtgttccaccagctgggaaccgccatgcctatgagcgtggaagaaggcccagaatgtcagggcccagtggtagaccgtagatgtcctaggtgtggccatgagggaatggcttaccacacgagacagatgaggagcgcggacgaggggcaaaccgtcttctacacatgcacaaattgcaaattccaggaaaaggaggactcctag

SEQ ID NO: 99218 - DNA, 381 bp, Artificial Sequence
  derived and/or modified sequence
atgtcagtgatggaccttgcaaacacatgctcttcatttcagtcagatctggacttctgtagcgattgcggaagcgtgctccccctgcctggggcccaggacactgtcacatgtatacggtgcggatttaacatcaatgtgcgggacttcgagggcaaggtggtgaagacgtctgtcgtatttcatcagcttgggacagctatgcctatgtctgtggaagaaggacccgagtgtcaaggccccgtagtcgaccgacgctgccctcggtgtggacacgagggcatggcgtatcacacgcggcagatgcggtccgcagatgaaggtcaaacagtgttttatacgtgcaccaactgcaagtttcaggagaaggaagactcatag

SEQ ID NO: 99219 - DNA, 381 bp, Artificial Sequence
  derived and/or modified sequence
atgagtgttatggatctggccaacacttgcagcagctttcaaagcgaccttgatttctgctctgactgtgggtctgttctgcctcttcccggtgcccaggacaccgtaacatgcatccgctgtgggtttaatattaatgtgagagactttgagggcaaggtggtaaagacctctgttgtgttccatcagctgggtacggccatgcccatgagtgtcgaagaaggcccagagtgtcagggacctgtcgtcgacaggcggtgcccacgttgtggacacgaaggaatggcatatcacacgcgccagatgagatccgcagatgaaggccagaccgttttctacacctgtacaaactgtaagtttcaagagaaagaggatagctag

SEQ ID NO: 99220 - DNA, 381 bp, Artificial Sequence
  derived and/or modified sequence
atgtctgtcatggatctcgccaatacatgtagctcctttcagagtgacctagatttctgcagtgattgcgggagcgtgctgcctctgcccggcgctcaggacacagtgacatgtatccgttgtggcttcaatatcaacgtcagggacttcgaagggaaagtcgttaagacctccgtggtgttccaccagctgggtactgccatgcctatgtccgtggaggagggacccgaatgccagggtccagtggtggatcgtcgatgtccccgctgtggccatgaaggcatggcctaccatactagacaaatgagatctgccgatgagggtcagacagtcttttacacctgtacaaactgtaaatttcaagagaaggaggattcttag

SEQ ID NO: 99221 - DNA, 381 bp, Artificial Sequence
  derived and/or modified sequence
atgtcagtgatggacttagcaaatacatgttcttctttccaatctgacctggacttttgctccgactgcggtagcgtcctgccactgccgggcgctcaggacacagtcacctgtatccgttgtggtttcaatataaacgtccgggattttgaggggaaagtggtgaagacatctgtggtctttcatcagttggggaccgctatgccaatgagcgtggaagaggggcctgagtgtcaggggccagtcgtcgataggagatgccctagatgcggtcatgaaggaatggcttaccacactaggcagatgcggtctgccgatgagggacagactgtattttacacctgcacaaattgtaagttccaggagaaggaggattcctag

SEQ ID NO: 99222 - DNA, 381 bp, Artificial Sequence
  derived and/or modified sequence
atgtctgtgatggatctcgccaacacatgctcttcatttcagagcgatcttgacttctgttctgactgtggttctgtgctgccactccctggggctcaggacaccgtcacctgcattcggtgtggatttaatattaacgtccgagattttgagggaaaagtggtcaaaacttcggtggtattccaccagctcgggacagctatgccaatgtctgttgaagaaggaccagagtgtcaaggtcccgtcgtggaccgcagatgtcctcgctgtgggcacgaaggtatggcttatcatacgcggcaaatgagatccgctgatgaggggcaaaccgttttctatacatgcaccaactgcaagttccaagagaaggaggatagttag

SEQ ID NO: 99223 - DNA, 381 bp, Artificial Sequence
  derived and/or modified sequence
atgtccgtcatggacttagccaatacttgcagctcgttccagtctgatctggacttttgcagcgattgcgggagcgtgttaccactgcccggtgcccaagatacagtcacttgcattcggtgcggcttcaacatcaacgtaagggatttcgagggtaaggtggtcaagacaagcgtagtgttccatcagctaggtactgccatgccgatgagcgttgaggaaggacccgagtgtcaaggtcccgtggtagaccggagatgcccgaggtgcggacacgaaggcatggcgtatcatacacgccagatgaggtctgcggacgagggtcagactgtcttctatacttgtactaattgcaaatttcaggagaaggaggactcatag

SEQ ID NO: 99224 - DNA, 381 bp, Artificial Sequence
  derived and/or modified sequence
atgtctgtgatggacctggccaacacctgcagcagcttccagagcgacctggacttctgcagcgactgtggctctgtgctgcccctgcccggggcccaggacacagtgacctgcatccgctgtggcttcaacatcaacgtgcgggactttgagggcaaggtggtgaagacctctgtggtgttccaccagctgggcacagccatgcccatgtctgtggaggagggccctgagtgccagggccctgtggtggaccggcgctgcccccgctgtggccacgagggcatggcctaccacacccggcagatgaggtctgcagatgagggccagaccgtcttctacacctgcaccaactgcaagttccaggagaaggaggacagctag

SEQ ID NO: 99225 - DNA, 381 bp, Artificial Sequence
  derived and/or modified sequence
atgagcgtgatggacctggccaacacctgcagcagcttccagagcgatctcgacttctgcagcgactgcgggtctgtacttcccctgccaggtgcccaggacacagttacctgcatccgttgtggtttcaacatcaatgtccgcgactttgagggcaaagtagtgaagacaagtgtggtttttcaccaactgggtacagctatgccgatgtcagtggaagaaggacccgagtgccagggtccggtagttgacagaaggtgcccacgctgtggacatgagggcatggcctaccacactcgccagatgcgctcagcagatgaagggcagactgtcttttacacgtgcacgaattgcaagtttcaggagaaggaagattcttag

SEQ ID NO: 99226 - DNA, 381 bp, Artificial Sequence
  derived and/or modified sequence
atgagcgtgatggacctggccaacacctgcagcagcttccagagcgatttggatttctgttctgattgcgggtctgtgcttccactccccggagcccaggatacagtgacctgcatcaggtgcgggttcaacataaatgtcagagactttgaaggaaaagtggtgaagacatccgtggtgttccaccagttaggcacagctatgccaatgtcagtcgaggagggtcctgaatgccagggtccagtggtggacagacgatgccctaggtgcggccacgaggggatggcctatcacacaagacagatgcgttccgcagatgagggacaaacagtgttttatacctgtaccaattgcaaatttcaggagaaggaggattcttag

SEQ ID NO: 99227 - DNA, 381 bp, Artificial Sequence
  derived and/or modified sequence
atgagcgtgatggacctggccaacacctgcagcagcttccagagcgacctggacttttgctcagattgcggttctgtgctgcccctcccaggtgcgcaggataccgtcacgtgtatcagatgcgggttcaacatcaatgttcgagattttgaagggaaagtggtgaagacctctgtcgtgttccatcagctcggaacagctatgccaatgtctgtggaggaaggccccgaatgccagggaccggtagtcgacagaaggtgtcctcggtgtggccatgaaggtatggcctatcacacacgtcagatgaggtccgctgatgaggggcagaccgtgttctatacctgcacaaattgtaaatttcaagaaaaagaggattcctag

SEQ ID NO: 99228 - DNA, 381 bp, Artificial Sequence
  derived and/or modified sequence
atgagcgtgatggacctggccaacacctgcagcagcttccagagcgatctggacttctgttctgattgcgggtctgtgctccctctgccaggcgcacaggacactgtaacctgtattagatgcggattcaacatcaatgtgagagacttcgagggaaaggtagttaaaacaagtgtggttttccaccagctcggaaccgctatgcctatgagtgtagaagaagggccagaatgtcaaggcccagttgtggacaggaggtgcccccgatgcgggcatgagggcatggcctaccacactcgccagatgcgctccgcagacgaagggcaaacagttttctatacttgcaccaactgtaagttccaggaaaaggaagactcatag

SEQ ID NO: 99229 - DNA, 381 bp, Artificial Sequence
  derived and/or modified sequence
atgagcgtgatggacctggccaacacctgcagcagcttccagagcgatcttgatttctgctccgattgcgggtcagtactgccactgcctggggcccaggataccgtcacgtgcattcggtgtggcttcaacattaacgtgagagactttgagggcaaggtggtaaagacttccgtcgttttccatcagcttggaacagctatgcctatgtccgtcgaggaaggccccgaatgtcagggacccgtggtcgacagacgttgtccccggtgtggtcacgaagggatggcctaccatacaaggcagatgcggtccgccgatgaaggccagacagttttctacacctgcactaattgcaagttccaggagaaggaagactcatag

SEQ ID NO: 99230 - DNA, 381 bp, Artificial Sequence
  derived and/or modified sequence
atgagcgtgatggacctggccaacacctgcagcagcttccagagcgacctggacttctgctctgattgcggttccgtgcttcccttaccaggagcacaggatactgtcacctgtattagatgtggtttcaacatcaatgtgagagacttcgagggcaaggtggtgaagacttccgtcgtttttcatcagctggggacggctatgcccatgtctgttgaggagggcccggagtgccagggtcctgtggttgatcgccgctgcccccgatgtggacatgagggaatggcttaccatacccggcagatgcgcagtgcagatgaaggacaaacggtattctatacctgtaccaactgcaagttccaggagaaggaagattcctag

SEQ ID NO: 99231 - DNA, 381 bp, Artificial Sequence
  derived and/or modified sequence
atgagcgtgatggacctggccaacacctgcagcagcttccagagcgacctcgatttctgctctgattgtggcagtgtccttcccttacccggcgcacaggatacagtgacttgcatcaggtgtggattcaacatcaacgtgagggattttgagggaaaggttgtaaagacttccgttgtgtttcaccagctgggcacagctatgccaatgagcgtcgaagagggccccgaatgccaggggcctgtggttgatcggagatgccctaggtgcgggcacgaaggaatggcgtaccacacacggcaaatgagatcggcggatgaaggccaaacagtgttttacacgtgcacaaattgcaaatttcaggagaaggaggattcctag

SEQ ID NO: 99232 - DNA, 381 bp, Artificial Sequence
  derived and/or modified sequence
atgagcgtgatggacctggccaacacctgcagcagcttccagagcgatctcgacttctgcagcgattgtggttctgttctcccgctccccggggcccaggatacggtcacctgcatccgctgcggcttcaatattaatgtgcgggactttgaaggtaaggtcgttaaaacgtcagtggtattccatcaactagggacggcaatgcctatgagtgtggaagagggaccagagtgtcaaggccccgtagtcgatcggcggtgccctagatgcgggcatgaggggatggcgtaccatacacggcagatgagatccgccgacgaggggcagacagtgttttatacctgcaccaactgcaaatttcaagagaaggaagattcttag

SEQ ID NO: 99233 - DNA, 381 bp, Artificial Sequence
  derived and/or modified sequence
atgagcgtgatggacctggccaacacctgcagcagcttccagagcgatctggatttctgctcagattgcggctcagtattgcctctcccgggcgcccaggacacagtaacctgcataagatgcggctttaacataaacgtcagagacttcgaaggcaaagtcgtgaaaactagtgtggtatttcaccagctaggtaccgccatgccaatgtctgtagaggaaggaccagaatgccagggccccgttgttgacagaaggtgccctcgatgtgggcatgagggtatggcataccacaccaggcagatgcgctcggcagatgaaggtcagacagtgttctacacttgcactaactgcaagtttcaggagaaggaggatagctag

SEQ ID NO: 99234 - DNA, 381 bp, Artificial Sequence
  derived and/or modified sequence
atgagcgtgatggacctggccaacacctgcagcagcttccagagcgatctggatttctgtagcgattgtggttcagttctgcccctacccggggcacaggataccgtcacctgtattagatgcggattcaatattaacgtgcgagacttcgaaggcaaagtcgttaaaacaagtgtggtctttcatcagcttgggacggccatgccgatgtctgttgaggaggggcccgagtgtcaaggcccggtggttgatagacggtgccccagatgtggtcatgaagggatggcctaccatacgcggcaaatgcggagcgccgatgaggggcagactgtcttttatacatgtacgaattgcaaatttcaagaaaaggaggatagctag

SEQ ID NO: 99235 - DNA, 381 bp, Artificial Sequence
  derived and/or modified sequence
atgagcgtgatggacctggccaacacctgcagcagcttccagagcgatctcgacttctgcagcgactgcggatccgtactgccgcttcctggcgcccaggacaccgtcacctgtatcagatgtggctttaacattaacgtgagagactttgaaggtaaggtggtcaagacttctgtggtatttcaccagctggggactgcaatgcccatgtctgtcgaggagggaccggagtgccaggggccagtggtggacaggcgatgccccagatgtgggcatgagggcatggcttaccatacccgccagatgcggtctgccgatgagggtcagaccgtgttttacacttgcaccaattgtaagtttcaggagaaggaggactcctag

SEQ ID NO: 99236 - DNA, 381 bp, Artificial Sequence
  derived and/or modified sequence
atgagcgtgatggacctggccaacacctgcagcagcttccagagcgacctggatttctgcagcgattgcgggagtgtgctcccacttcccggagcacaggacactgtgacttgcattaggtgcggtttcaacataaatgtcagagactttgaagggaaagtagtaaaaacctctgtcgtgttccaccagctggggactgcgatgcctatgagcgtggaagaggggcctgaatgccagggacccgtggtagatcggagatgccccaggtgtgggcatgaagggatggcataccataccaggcagatgcgcagcgcagacgaaggccagactgtattctacacatgcacgaactgcaaatttcaagaaaaggaggactcatag

SEQ ID NO: 99237 - DNA, 381 bp, Artificial Sequence
  derived and/or modified sequence
atgagcgtgatggacctggccaacacctgcagcagcttccagagcgacctggatttctgtagcgactgcggttccgtgctccctttgcccggcgcacaagacactgtgacctgcatcaggtgcggatttaacatcaatgtcagagactttgaaggcaaggtggtgaaaactagcgtagtgtttcaccagctggggaccgctatgccgatgtccgtcgaagaaggcccagagtgtcagggccctgtggtggatcgccgctgcccccgatgtgggcatgaaggcatggcctatcatacaaggcaaatgcgctcagcggatgaagggcagacagtgttctacacctgtaccaactgcaagttccaggagaaggaggattcatag

SEQ ID NO: 99238 - DNA, 381 bp, Artificial Sequence
  derived and/or modified sequence
atgagcgtgatggacctggccaacacctgcagcagcttccagagcgacttggatttttgttccgattgcggctcagtgttgcccctgccaggggcacaggacacagtgacctgtattcgatgcggcttcaatattaacgtgagggactttgagggcaaggtggtgaagacatctgtcgtcttccaccaattggggaccgctatgccaatgtccgtagaggagggtccagagtgtcaggggcccgtcgtcgaccgccgatgtccccgttgcggccacgagggcatggcctatcatacccgccagatgcggtccgccgacgaaggccagacggtgttttatacgtgcaccaactgcaaatttcaggagaaggaagacagctag

SEQ ID NO: 99239 - DNA, 381 bp, Artificial Sequence
  derived and/or modified sequence
atgagcgtgatggacctggccaacacctgcagcagcttccagagcgacttggacttttgttccgattgcggctctgtccttcctctgcctggggcgcaggatactgtgacatgcatcaggtgcggctttaacatcaacgttagagacttcgaaggcaaggttgttaagacaagcgtggtattccaccagctggggacagccatgccaatgtctgtcgaagagggtcctgaatgccagggccccgtcgtagatcggcggtgcccgagatgcggtcacgaaggcatggcatatcacactcgacagatgaggagcgccgacgagggccagacggtattctacacatgtacgaattgtaaattccaggagaaggaggactcgtag

SEQ ID NO: 99240 - DNA, 381 bp, Artificial Sequence
  derived and/or modified sequence
atgagcgtgatggacctggccaacacctgcagcagcttccagagcgatctagatttctgcagcgattgtggctccgtcctgccactgccgggcgcccaggataccgtgacgtgcatcagatgcggattcaacattaacgtccgcgacttcgaggggaaggtcgtgaagacctctgtcgttttccaccagcttggcacagctatgccaatgtccgtagaggagggtcccgagtgtcaggggcccgtggtggatagaagatgtccacgctgtggacatgaggggatggcgtatcatactcgacagatgaggagcgctgatgagggccaaacggtcttttatacctgcaccaactgcaagtttcaggagaaggaggatagttag

SEQ ID NO: 99241 - DNA, 381 bp, Artificial Sequence
  derived and/or modified sequence
atgagcgtgatggacctggccaacacctgcagcagcttccagagcgatctggacttttgcagcgattgcggcagcgttttgcccctgcctggcgcccaggacacagtgacctgcattagatgtggattcaatattaatgtcagagatttcgaggggaaggtggtgaaaactagcgtagtgtttcatcagttaggtaccgccatgcccatgagcgtcgaggagggacccgagtgccagggtcccgtcgtcgaccgcaggtgtcctcgatgtggccacgagggaatggcctatcacacgcgtcagatgcgttctgcagacgagggacagactgtgttttacacctgtaccaactgcaagttccaggaaaaggaggattcctag

SEQ ID NO: 99242 - DNA, 381 bp, Artificial Sequence
  derived and/or modified sequence
atgagcgtgatggacctggccaacacctgcagcagcttccagagcgatctggacttctgctccgactgcggcagtgtgctgcccctccctggagcgcaggataccgtcacctgcatccggtgtggtttcaacatcaacgtgcgagactttgaagggaaagtggtgaagacatcagtggtttttcatcagctgggcacagccatgccaatgagcgtggaggaaggccctgaatgtcagggaccagttgtggacaggaggtgtccacgctgcggccacgaaggaatggcctatcatacgcggcagatgaggagtgcagatgaagggcaaacagtcttctatacctgcacaaattgcaaattccaggagaaggaggactcttag

SEQ ID NO: 99243 - DNA, 381 bp, Artificial Sequence
  derived and/or modified sequence
atgagcgtgatggacctggccaacacctgcagcagcttccagagcgatctagacttctgtagcgattgtggcagcgtgcttcctctccctggggcacaggacacagtaacatgcatccgatgcggattcaatatcaacgtgagagattttgagggtaaagtggttaagactagcgttgtgtttcaccagctgggaacagctatgcctatgtctgttgaggagggccctgagtgtcagggaccggtagtcgatagaaggtgtcctcgatgcggtcacgaaggcatggcataccacacaagacagatgcgctccgcagatgagggacagaccgttttttatacatgtaccaactgcaagtttcaggagaaggaggactcgtag

SEQ ID NO: 99244 - DNA, 381 bp, Artificial Sequence
  derived and/or modified sequence
atgagcgtgatggacctggccaacacctgcagcagcttccagagcgacttggacttctgctcagattgtgggagcgtcctcccactccccggggctcaggacacggtcacatgcatccgctgcgggttcaacatcaacgtcagggattttgaaggcaaagtggtgaaaacttctgtggtttttcatcagctaggcactgccatgcccatgagtgtagaagagggccctgagtgtcagggcccagtggttgacaggagatgtcccaggtgcggtcacgaaggaatggcataccataccaggcaaatgcgcagcgccgacgaaggccaaaccgtattttacacctgtacaaactgcaagttccaggaaaaggaggatagctag

SEQ ID NO: 99245 - DNA, 381 bp, Artificial Sequence
  derived and/or modified sequence
atgagcgtgatggacctggccaacacctgcagcagcttccagagcgacctggacttctgttccgattgcggatctgtgctgccccttcctggggcccaggataccgtgacctgcattagatgtgggttcaatattaatgtgcgcgactttgagggaaaggtggtaaagacctccgtggttttccaccagttggggacggctatgcctatgtctgtagaggaggggccggagtgccaaggtccagttgtggatcggcgctgccctaggtgcggacacgaaggcatggcctatcatacacgacagatgcgaagtgccgacgaaggccagactgtgttttacacctgcacaaactgcaaatttcaggagaaggaggactcatag

SEQ ID NO: 99246 - DNA, 381 bp, Artificial Sequence
  derived and/or modified sequence
atgagcgtgatggacctggccaacacctgcagcagcttccagagcgaccttgacttttgctctgattgcggaagtgtccttcctctgcccggagcccaggatacggttacctgtatccggtgcggtttcaatataaacgtgcgagactttgagggcaaggtggtgaaaacttccgtcgtgtttcatcagctgggtaccgcaatgccaatgtcagttgaggaaggccctgagtgccagggtcccgtcgtggatcgccgctgcccaaggtgtgggcacgaaggcatggcatatcatactcgtcagatgagaagtgccgacgaaggacagaccgtgttttacacctgcaccaactgcaaatttcaggagaaagaagactcttag

SEQ ID NO: 99247 - DNA, 381 bp, Artificial Sequence
  derived and/or modified sequence
atgagcgtgatggacctggccaacacctgcagcagcttccagagcgacttggacttttgttccgactgtgggtccgtcttgcccttgccgggggcacaagacacagtaacttgtatcaggtgcgggttcaacatcaacgtgcgagactttgaagggaaggtcgtcaaaacttctgtagtgtttcatcaactcgggactgccatgcccatgtctgtggaggaggggccagagtgccaggggcccgttgtcgaccggaggtgtccacgttgcggccacgagggaatggcatatcatacaaggcagatgcggtcagccgatgaggggcagaccgtcttttatacttgcacaaattgcaaatttcaggaaaaagaggacagttag

SEQ ID NO: 99248 - DNA, 381 bp, Artificial Sequence
  derived and/or modified sequence
atgagcgtgatggacctggccaacacctgcagcagcttccagagcgacctcgacttttgctcagactgtgggtccgtcctgcccttgccaggcgctcaggacaccgtcacatgcatcagatgcgggtttaacattaatgtgcgggatttcgaagggaaggtggtcaaaacgtccgttgtgtttcaccagctgggaactgctatgccaatgtctgtggaagaaggaccagaatgtcagggccctgtggtcgacagaaggtgcccacgatgcgggcatgagggtatggcctaccacacaagacagatgcgcagcgctgatgaaggccagacagtcttctatacatgtacaaactgtaagttccaggagaaggaggattcctag

SEQ ID NO: 99249 - DNA, 381 bp, Artificial Sequence
  derived and/or modified sequence
atgagcgtgatggacctggccaacacctgcagcagcttccagagcgacctcgacttttgctctgattgcggttcagtgctgccattgcccggagcgcaggacactgtgacttgtattcgttgtgggtttaacattaacgtccgtgactttgagggtaaggtggtcaaaactagcgtggtgtttcaccagcttgggactgccatgcctatgtccgtggaagaaggtccagaatgccaggggcccgtagtagataggaggtgtcccaggtgcggccatgagggtatggcataccacaccagacagatgcgatccgcagacgaaggccagacagtgttttatacatgtactaactgcaagttccaggaaaaagaggactcttag

SEQ ID NO: 99250 - DNA, 381 bp, Artificial Sequence
  derived and/or modified sequence
atgagcgtgatggacctggccaacacctgcagcagcttccagagcgatctggatttctgctctgattgcggctccgtgctccctttacccggcgcccaggatacagtgacttgtattagatgtggcttcaacattaatgtgagggacttcgagggaaaagtggtcaagacttcagtagtttttcaccaattaggaactgctatgcctatgagcgtagaagaaggccctgaatgtcagggcccagtcgtcgatcgacggtgtccccgctgcggccacgagggcatggcatatcacacacgacaaatgaggtcagccgatgaagggcagactgtcttttacacgtgtaccaactgcaaattccaggaaaaggaagacagttag

SEQ ID NO: 99251 - DNA, 381 bp, Artificial Sequence
  derived and/or modified sequence
atgagcgtgatggacctggccaacacctgcagcagcttccagagcgacctggacttctgctcagactgtggatctgtcctgccacttccgggggcgcaggacacagtcacctgcatccgatgtggatttaatattaatgtgcgtgattttgagggcaaggtcgtgaaaacaagcgtggtatttcaccaacttgggacggccatgcctatgtccgtggaagaggggcctgagtgtcagggcccagttgtggacaggaggtgccccaggtgtggacacgaaggaatggcataccacacccggcaaatgaggtcagctgatgagggacaaacagtgttctacacctgtacaaactgcaagtttcaggagaaggaagactcctag

SEQ ID NO: 99252 - DNA, 381 bp, Artificial Sequence
  derived and/or modified sequence
atgagcgtgatggacctggccaacacctgcagcagcttccagagcgatctggatttctgcagcgactgtgggagtgtccttccccttcctggagctcaggacacagtcacttgtataaggtgtgggttcaatattaatgtgagagatttcgagggtaaagtcgtgaagacttccgtggtgttccatcaactgggcaccgcaatgcccatgtcagttgaagagggtccggagtgccagggcccagtagtggataggagatgtcctcgctgcggccacgaaggcatggcttaccatacccggcagatgcgctcagcggacgaaggacagaccgtcttttatacatgtacgaattgtaagtttcaagagaaagaagacagctag

SEQ ID NO: 99253 - DNA, 381 bp, Artificial Sequence
  derived and/or modified sequence
atgagcgtgatggacctggccaacacctgcagcagcttccagagcgacctcgatttctgctctgattgtggatccgtcctccctcttccaggggctcaagacacggtgacgtgtatcagatgtggcttcaatatcaatgtgagggacttcgaagggaaggtagtgaagaccagcgtcgtttttcaccagttgggaaccgcaatgccaatgtccgtcgaggaggggcccgagtgccagggcccagtagtggaccgtagatgcccaagatgtggtcacgagggtatggcctaccatactcgtcagatgaggtccgccgatgaggggcagactgtgttttacacttgcaccaattgcaagttccaagagaaagaagatagctag

SEQ ID NO: 99254 - DNA, 381 bp, Artificial Sequence
  derived and/or modified sequence
atgagcgtgatggacctggccaacacctgcagcagcttccagagcgacctcgatttctgctctgattgcggatcagtacttcctctgcccggggcccaggataccgtgacatgtatcaggtgcggattcaacattaatgttcgagactttgagggcaaagtggtcaagacctcagtggtcttccatcaacttggcaccgccatgccgatgagtgtggaggaaggccctgagtgccaaggccccgttgtggacagaaggtgtccacgatgtggccatgaggggatggcctaccacacccggcagatgaggagtgctgacgagggtcagacggtgttctatacctgtacgaactgtaagttccaggaaaaggaagacagctag

SEQ ID NO: 99255 - DNA, 381 bp, Artificial Sequence
  derived and/or modified sequence
atgagcgtgatggacctggccaacacctgcagcagcttccagagcgatttagacttttgttccgattgtggcagtgtgcttcctctgccaggcgcacaggatactgtgacttgtatccggtgcggatttaacatcaatgttagggactttgagggcaaggtggtcaaaacctctgtggtatttcaccagctcggaacagccatgcccatgtcggtggaagagggacccgaatgccagggcccggtcgtggacagaaggtgccctcggtgcgggcacgaaggcatggcatatcatacaagacagatgcggtcggctgacgaaggccagacagtgttttacacatgtaccaattgcaagttccaggagaaggaggacagctag

SEQ ID NO: 99256 - DNA, 381 bp, Artificial Sequence
  derived and/or modified sequence
atgagcgtgatggacctggccaacacctgcagcagcttccagagcgacctggatttctgtagtgattgcgggtccgtactcccgttgccaggcgcgcaagatacagtcacctgtatcagatgtggattcaatattaatgtgagagacttcgagggcaaagtcgtgaaaacctctgtcgtctttcatcaattagggacagcaatgccgatgagtgtggaggagggccccgagtgtcagggtccagtggtagaccgcagatgtccacgctgcggacacgaaggcatggcatatcatacaaggcagatgcggagtgccgacgaaggccagaccgtgttctacacttgtaccaactgcaaattccaggagaaagaagatagctag

SEQ ID NO: 99257 - DNA, 381 bp, Artificial Sequence
  derived and/or modified sequence
atgtccgtgatggatttggccaatacttgcagctcctttcagtctgatttggatttttgtagcgattgtggaagtgtgctgcctttgcctggcgcacaggatactgtcacctgcataaggtgcggatttaatatcaatgtgagagatttcgaagggaaagtggtaaaaacgtcagtcgttttccaccaactcggtactgctatgccgatgagcgtcgaagaggggcctgaatgccaaggtccagtggttgatcgaagatgtcccaggtgcggccacgaggggatggcataccacacccggcagatgagaagcgccgatgaagggcagaccgtgttttatacttgtacgaattgcaagtttcaggaaaaggaggactcatag

SEQ ID NO: 99258 - DNA, 381 bp, Artificial Sequence
  derived and/or modified sequence
atgagtgttatggatttggctaacacctgcagttcatttcagagcgatctagatttttgttcggattgcggttcagtgctgcctttaccaggggctcaggataccgtcacatgtattagatgtggttttaatattaatgttagggatttcgaagggaaggtggttaagacttctgtggtgtttcaccagcttggaactgctatgcccatgtccgtcgaagaaggacctgagtgtcagggtcctgtggtcgacagaaggtgtccccgttgcggccacgaaggaatggcatatcacaccagacaaatgcggtctgctgacgaagggcagactgtgttttatacctgcaccaactgcaaatttcaagaaaaagaggacagctag

SEQ ID NO: 99259 - DNA, 381 bp, Artificial Sequence
  derived and/or modified sequence
atgtcagtcatggatttggcaaatacttgctccagctttcaaagtgatctggatttctgttcagactgcgggagcgtgctgcctctgccgggagcacaggatacagtcacttgcattcgctgcggctttaatattaatgtgcgggattttgaaggtaaggtagtaaagacatctgtggtgttccaccagttgggcacagccatgccaatgagcgttgaggagggtcccgagtgtcagggaccagtcgtcgacaggagatgtcccaggtgcggtcatgagggcatggcatatcacaccaggcagatgcgaagcgccgacgaagggcaaaccgtgttctacacatgcacaaactgcaagttccaagaaaaggaggatagttag

SEQ ID NO: 99260 - DNA, 381 bp, Artificial Sequence
  derived and/or modified sequence
atgtccgtgatggaccttgctaatacctgttccagcttccagtcagatctcgatttctgtagcgattgcggcagcgtgctgcccctcccaggggcacaggataccgtgacatgtatcaggtgcgggttcaatatcaatgtgcgcgactttgagggcaaggtcgtcaaaacgagcgttgtctttcatcagctagggacagcaatgcccatgtcagttgaggaagggcctgaatgccagggccctgtggtggatcgccgatgcccccgatgcgggcacgaggggatggcctatcatacgaggcagatgagatcggccgacgagggtcagacagtgttctatacgtgtacaaactgcaagtttcaggagaaagaagatagttag

SEQ ID NO: 99261 - DNA, 381 bp, Artificial Sequence
  derived and/or modified sequence
atgtcagtcatggatcttgccaatacgtgtagtagctttcagagcgatttagacttttgcagcgattgcggctcagtgctacctctgcctggggcacaagacaccgtgacttgcatccggtgtgggtttaacatcaatgtcagggacttcgagggtaaggttgtgaagacttccgtggtattccatcagcttggcaccgccatgcccatgtccgtagaggaaggcccagagtgtcaaggtccagtggttgatcgtagatgtccacggtgcggccacgagggaatggcctatcatacaaggcagatgagatcggccgatgaaggtcagaccgtattctacacctgcactaactgcaaattccaggagaaagaggacagttag

SEQ ID NO: 99262 - DNA, 381 bp, Artificial Sequence
  derived and/or modified sequence
atgagcgtaatggacctcgccaatacatgctccagcttccagtctgaccttgacttctgctcggattgtggctctgtattgcctctccccggtgcacaggacacagtcacatgcatccggtgtggctttaacattaacgtgagggatttcgaagggaaagtggttaaaacctccgtggtgtttcatcagctagggaccgccatgccaatgtctgtggaagaagggcctgagtgccaaggccctgtggtcgacagaagatgccctcggtgcggtcatgaaggaatggcttaccacacgagacagatgagatcggccgacgaaggccagaccgtgttctacacgtgcacaaactgcaaatttcaggagaaggaggacagctag

SEQ ID NO: 99263 - DNA, 381 bp, Artificial Sequence
  derived and/or modified sequence
atgagcgtaatggaccttgccaacacttgctcaagtttccagagtgacctggatttctgcagtgactgtggatccgtgctgccattgcctggggcacaggacactgtaacctgtataaggtgtggcttcaatattaacgtgcgggatttcgaaggcaaggttgtaaagacttcagtggtctttcatcaactgggtacggctatgccgatgtcagtggaagaaggccctgaatgccaaggccctgtcgtggatcgccgatgtcctcggtgtggacacgaaggcatggcctatcatactcgtcagatgcgctccgccgatgaggggcagactgtgttttacacctgcaccaattgcaaattccaggagaaagaagacagttag

SEQ ID NO: 99264 - DNA, 381 bp, Artificial Sequence
  derived and/or modified sequence
atgagcgtcatggatttggctaacacttgctctagcttccagtcggatctcgatttctgctccgactgtggatctgttcttccactccccggagctcaggatacagtcacctgcattaggtgcgggttcaatataaacgtcagagacttcgaggggaaggtagtgaaaacctccgtagtgtttcaccagcttggtaccgccatgccaatgtccgtggaagagggacccgaatgccagggcccagtcgtggaccggcgttgcccaaggtgcggacacgaggggatggcctaccacacacgccagatgcggtctgctgatgagggacaaaccgtcttttacacgtgcaccaactgcaagtttcaggaaaaggaggatagctag

SEQ ID NO: 99265 - DNA, 381 bp, Artificial Sequence
  derived and/or modified sequence
atgtcagtgatggatctggcaaacacatgttccagcttccagtctgaccttgatttttgtagcgactgcggatccgtgctcccactaccaggcgcacaagatactgtaacttgcatccggtgtgggttcaacatcaatgtaagggattttgagggcaaggtcgtaaagacaagtgttgtcttccaccagctgggtactgcgatgcctatgtccgtggaggagggtcccgagtgtcagggcccagtcgtcgaccgacggtgccccagatgcgggcacgaaggaatggcctatcacactcgccaaatgagaagtgctgatgagggccaaaccgtattctacacttgcaccaattgcaaattccaagagaaagaagattcatag

SEQ ID NO: 99266 - DNA, 381 bp, Artificial Sequence
  derived and/or modified sequence
atgtctgtgatggatttggctaatacttgcagctcgtttcaatcagatctggacttttgttcggactgcggctcagttctacccctccctggcgcacaagacacagtaacctgcatccgatgcggcttcaatattaatgttagggattttgagggtaaagtggtaaagacctcagttgtctttcaccagttgggtaccgcaatgccaatgtctgttgaagagggacctgagtgtcagggccctgtggtcgatagaagatgtccgcgatgcgggcatgagggaatggcttatcatactcggcagatgaggagcgccgatgaaggtcaaactgtgttttacacttgcaccaactgcaagttccaggagaaagaagactcctag

SEQ ID NO: 99267 - DNA, 381 bp, Artificial Sequence
  derived and/or modified sequence
atgtccgtcatggatcttgctaacacatgtagctctttccagtccgatctagatttctgcagcgattgtggatctgtactgccattgcccggagcacaggataccgtgacctgtatacgttgtggctttaacattaatgtgagggatttcgaaggaaaggtggtgaagacttccgtcgtgtttcatcagcttggaaccgccatgccgatgtctgttgaagagggaccggagtgtcagggccctgtggttgaccgtcggtgcccgcgatgtggccatgagggtatggcatatcatacacgacagatgagatccgccgacgaaggccagacggtgttctacacttgcactaactgtaagttccaagaaaaggaagactcctag

SEQ ID NO: 99268 - DNA, 381 bp, Artificial Sequence
  derived and/or modified sequence
atgtccgtgatggacctggcgaatacgtgtagctctttccaatcggatctagacttctgcagcgactgtggaagcgtgcttccccttccaggcgctcaggacactgtgacatgcatccgatgtggctttaatattaacgttcgcgattttgaggggaaggtagtgaaaacttcagtagtcttccatcagttgggaacagccatgccaatgtcggtcgaggagggacctgaatgtcaaggccctgtggtggacagacgctgtcctcgctgcggacatgaaggcatggcataccacacacgccagatgcgatccgccgacgaaggacagaccgttttctacacatgtaccaactgcaagtttcaagagaaagaggactcttag

SEQ ID NO: 99269 - DNA, 381 bp, Artificial Sequence
  derived and/or modified sequence
atgagcgtaatggacttggctaatacttgctcgagtttccaaagcgatctggatttctgcagcgattgtggctccgtactccccctaccaggggctcaagacaccgtcacctgcatcaggtgcggatttaatataaacgtgcgcgatttcgaaggaaaggtggtgaaaacttcagtcgtgttccatcagttgggcacggcaatgcctatgtcggtagaagaagggccagagtgtcagggacccgtagtcgatagacggtgtcctcgctgcggccacgagggaatggcgtaccacactagacagatgaggagcgctgacgagggacagaccgtgttttatacctgtaccaattgtaagttccaggaaaaggaagactcttag

SEQ ID NO: 99270 - DNA, 381 bp, Artificial Sequence
  derived and/or modified sequence
atgtccgtgatggacctggctaacacttgctccagtttccaaagcgacctcgatttctgctcagactgcggaagcgtactgccactgccaggcgctcaggacacagtgacctgcattcggtgcgggttcaacattaatgtccgagactttgaaggcaaagtggttaagacaagcgtagtctttcatcagctcggaacagcaatgcccatgtctgtggaagaagggcctgaatgccagggacccgtggtggatcgtcgatgccccaggtgtggccacgagggaatggcataccacacgagacaaatgaggtctgctgatgagggccaaaccgtgttttatacctgcaccaactgcaagttccaggagaaggaggattcttag

SEQ ID NO: 99271 - DNA, 381 bp, Artificial Sequence
  derived and/or modified sequence
atgtccgtgatggaccttgccaatacatgctcctcctttcaatccgacttggacttctgttctgattgtggaagcgtgctgcccctgccaggagctcaggacacggttacgtgtatcaggtgtgggttcaatatcaatgtgcgtgactttgagggcaaagtcgttaagacgtcagtggtctttcaccaacttgggaccgccatgcctatgagcgtcgaagaagggcctgaatgtcagggcccagttgtggacagacggtgcccgagatgcggccacgaaggaatggcttatcatacgcgtcagatgagaagcgcggatgagggccaaacagtattctatacatgcacaaactgtaaattccaggagaaggaagactcctag

SEQ ID NO: 99272 - DNA, 381 bp, Artificial Sequence
  derived and/or modified sequence
atgagcgtgatggacctggccaatacttgtagcagcttccaatccgacctggacttttgcagcgattgcggctcagtcctcccactgcccggtgcgcaggatacagtcacttgcataaggtgcggattcaacatcaacgtgcgggatttcgaggggaaggtcgtgaaaacttcggtggtttttcaccagctcggcaccgctatgcccatgtccgtcgaagaggggcctgaatgtcagggcccagttgtcgatcgacgctgcccccgatgtggccatgagggtatggcataccatacaaggcagatgagatccgccgacgaggggcagacagtgttttacacatgcactaactgcaaattccaggaaaaagaggattcttag

SEQ ID NO: 99273 - DNA, 381 bp, Artificial Sequence
  derived and/or modified sequence
atgagtgtgatggacctagcgaatacctgctctagctttcaaagcgatctggatttttgttctgactgcgggtccgtgctgcccctgccgggtgcccaagataccgtcacctgcattagatgtggctttaatatcaatgtgcgtgatttcgaaggcaaggtggtaaagacatcagtagtcttccaccagctggggaccgcgatgcctatgagtgtcgaagaaggtccagaatgccagggcccagtggttgatcggagatgtccgagatgcgggcatgaaggcatggcgtaccatactcggcagatgagatccgcagacgagggccaaactgtgttctatacatgcactaactgtaaatttcaggagaaagaggattcctag

SEQ ID NO: 99274 - DNA, 381 bp, Artificial Sequence
  derived and/or modified sequence
atgagcgtgatggatttggctaatacttgttccagcttccaaagcgacttggacttctgctccgattgcggctcggtgcttcccctgcctggagcacaagatacagttacttgtataaggtgtggctttaatatcaacgtacgcgacttcgaaggcaaggtcgtaaagacatcggtggtgttccaccagcttgggaccgcaatgccaatgagcgtagaggaaggacctgagtgccagggcccagttgtcgaccgcaggtgtcccaggtgtggtcacgaagggatggcctaccacacccgccagatgcggtctgctgatgaaggacagacagtgttttatacctgtaccaactgtaagtttcaggagaaagaagatagctag

SEQ ID NO: 99275 - DNA, 381 bp, Artificial Sequence
  derived and/or modified sequence
atgagtgtgatggacttagcgaacacctgctcgtcgttccagtcggatctggacttctgctcggattgtggctctgtgttaccactgcccggagcccaagataccgtgacgtgtatcaggtgtggctttaacattaacgttagggacttcgaagggaaggttgtgaagacatctgtagtgttccatcaattgggcacagcaatgcccatgagcgtcgaagaaggacccgagtgccaaggaccggtagtggatcgtagatgtcccaggtgtggacatgaaggaatggcctaccacaccagacaaatgagaagcgccgatgaggggcagacagtgttttatacctgcacaaattgtaagtttcaggaaaaagaagacagttag

SEQ ID NO: 99276 - DNA, 381 bp, Artificial Sequence
  derived and/or modified sequence
atgagcgtcatggatcttgcgaatacatgcagtagctttcagagcgacctcgacttttgcagcgactgcggaagtgtgctgccgctccccggagctcaagatacagtcacctgcatcaggtgcgggtttaatataaatgtgcgcgacttcgaaggaaaagttgttaaaactagcgtggtgtttcatcagctgggtactgcaatgcccatgtccgtggaggaaggaccagagtgtcaaggccctgtggtcgacaggcgctgcccaaggtgcggacacgaggggatggcctatcatacaaggcaaatgaggtctgcagacgagggacagactgtgttctacacctgtacgaattgtaaattccaagaaaaggaggattcatag

SEQ ID NO: 99277 - DNA, 381 bp, Artificial Sequence
  derived and/or modified sequence
atgagcgtaatggatttggctaacacttgtagttcctttcagagtgatttggacttctgctctgattgcggctcagtgctaccactccctggggcacaggataccgttacctgcatccgttgtgggttcaatatcaacgtgagggacttcgagggcaaggttgtgaagacctccgttgttttccaccaactcgggaccgccatgcccatgagtgtggaggagggacccgaatgccaggggccagttgtggacaggcggtgcccgagatgcggacacgaaggcatggcatatcacactcggcagatgcgctcagccgatgaaggccagactgtgttttatacatgtactaattgcaagttccaagaaaaggaggacagctag

SEQ ID NO: 99278 - DNA, 381 bp, Artificial Sequence
  derived and/or modified sequence
atgtccgtgatggatttggcgaatacttgttctagcttccagagtgacttagatttttgttcagattgcgggtcagtgcttccgctaccgggtgctcaagacactgtgacatgcattaggtgtggtttcaatataaatgtacgggactttgagggtaaagtggtgaaaacatcggtggtgtttcaccagctgggaacagctatgccgatgtccgttgaggagggtcctgaatgtcaaggccctgtggtcgatcggaggtgcccccgatgtggccacgagggcatggcttaccatacgcgccaaatgaggtccgccgatgaaggacagacggttttctacacatgtacaaactgtaaattccaggaaaaggaagactcttag

SEQ ID NO: 99279 - DNA, 381 bp, Artificial Sequence
  derived and/or modified sequence
atgtctgttatggacctcgctaatacttgctctagtttccagtcagatctagatttttgctccgactgtggctccgtgcttcccctgccaggagctcaggacactgtcacttgcatcagatgcggattcaacattaatgtgagagactttgagggcaaggtagtcaagacctcagtggttttccatcagctcggaacagcgatgccaatgtctgtcgaagagggtccggagtgtcaggggcctgttgtggacagacgatgtcccaggtgcggacatgagggcatggcttaccacacaaggcagatgaggagtgcagacgagggtcaaacagtgttctacacctgcactaattgtaagttccaggagaaggaggatagttag

SEQ ID NO: 99280 - DNA, 381 bp, Artificial Sequence
  derived and/or modified sequence
atgtctgtgatggacctagctaatacatgttcctcctttcaatctgacctggatttttgcagcgactgcgggtctgtattgcctctaccaggagcccaggatactgtcacctgtatccggtgcggatttaatataaatgtgcgcgacttcgagggcaaggtggtgaagacctctgtggttttccaccagttggggaccgccatgcccatgtccgtagaggaggggcctgaatgtcaaggccctgttgtggacagaaggtgccctcgatgtggacacgaagggatggcttaccacacccgccagatgcggagcgcagacgaaggccagactgtcttttacacttgcacaaattgcaaatttcaggaaaaggaggatagttag

SEQ ID NO: 99281 - DNA, 381 bp, Artificial Sequence
  derived and/or modified sequence
atgtcagtgatggatctcgctaacacatgcagctctttccagtccgatctcgatttctgctccgattgtggttctgtgctgcccctgcccggagcccaggacactgtgacatgtattcgatgcggctttaacataaatgttcgcgattttgaggggaaggtcgtcaagactagcgtggttttccaccagttgggtacagcaatgcctatgtctgtggaagagggtcctgagtgtcaaggtcctgtggtcgatcgcagatgtccacgctgcggtcatgagggtatggcataccatactcgccagatgcggagcgccgatgaaggccaaaccgtattttacacatgcacgaactgcaagtttcaggagaaagaggattcttag

SEQ ID NO: 99282 - DNA, 381 bp, Artificial Sequence
  derived and/or modified sequence
atgtcagtcatggatctggccaacacctgcagttctttccagagcgacctggacttttgcagcgattgcggctccgttctacctctccccggtgcacaggataccgtgacttgcattcgttgcggctttaacattaacgtgcgagatttcgaaggaaaggtagtcaagacttccgtggtcttccaccaactgggaaccgccatgcctatgtcagtggaagaggggcctgagtgtcaggggccagttgtggataggcgctgcccacggtgtggacacgaaggaatggcctaccatacacggcagatgaggtcggctgacgaggggcagacagttttctacacgtgtacgaactgcaaattccaggaaaaggaggactcatag

SEQ ID NO: 99283 - DNA, 381 bp, Artificial Sequence
  derived and/or modified sequence
atgtctgtgatggatctagctaatacatgcagctcgtttcagtctgacctggatttctgcagtgattgtggctctgtgctgcccttgccaggcgctcaggacacagtaacctgtattcggtgtggattcaacataaacgttcgagactttgagggcaaagtagtgaaaacatcagtcgtcttccaccagcttgggactgcgatgccaatgtccgtcgaggagggacctgagtgccaggggcctgtggtcgaccgtcggtgtccgcgttgtggacacgaggggatggcctatcacactagacagatgagaagtgccgatgaggggcagacggtgttctacacttgcactaattgcaaatttcaggagaaggaggattcatag

SEQ ID NO: 99284 - DNA, 381 bp, Artificial Sequence
  derived and/or modified sequence
atgtcagtgatggatctggcaaacacgtgttcctcttttcagtctgacctggatttctgttccgattgtgggtctgtgcttcctttgccgggagctcaggacaccgtcacctgcatccgctgtggatttaacatcaatgtgagggacttcgaggggaaggtggtcaagacttctgtagtatttcaccagttggggaccgcaatgccaatgtccgtagaagagggacccgaatgtcagggtcccgtggtcgatcgacgttgcccgagatgtggccacgaaggaatggcttatcatacccggcagatgagaagtgccgacgagggccagaccgtcttttatacttgcactaactgcaaattccaggaaaaagaggactcctag

SEQ ID NO: 99285 - DNA, 381 bp, Artificial Sequence
  derived and/or modified sequence
atgagtgtgatggatctggcaaacacctgctcatcttttcaatcagacctcgacttctgttcagactgcggttctgtgctacccttacctggggcacaggataccgtaacctgcatcagatgcggttttaatataaatgttagagattttgaagggaaagtggtgaagacaagtgtagtcttccaccagctgggcaccgctatgccaatgtccgtggaggagggtcctgagtgccaggggcctgtagtcgataggagatgcccaaggtgcggccatgaaggtatggcctaccataccagacagatgaggtctgctgacgaggggcagactgttttttacacttgcacaaattgcaagtttcaagagaaggaggattcgtag

SEQ ID NO: 99286 - DNA, 381 bp, Artificial Sequence
  derived and/or modified sequence
atgtccgtaatggacctcgcgaacacctgtagctcttttcagtccgatcttgacttctgctccgactgcggttcggtgctcccactaccaggggctcaggacacagtgacatgtattaggtgcggtttcaatatcaacgtacgggatttcgaagggaaggtcgtgaaaacttcagtggtcttccaccaactcggtactgccatgccaatgagcgtggaagaaggtccggagtgccaggggccagtcgtggatcgccgatgtccacgttgtgggcacgagggtatggcctaccacacacgacagatgcggagtgccgatgaaggacagaccgtgttttatacatgcactaactgcaagttccaagagaaggaggatagctag

SEQ ID NO: 99287 - DNA, 381 bp, Artificial Sequence
  derived and/or modified sequence
atgagcgtgatggacctggccaatacatgttccagcttccagtccgacctcgatttttgtagcgactgtggatcagtactccccttgcccggagcccaagataccgtgacgtgcatcaggtgtgggtttaatatcaacgttcgggactttgagggcaaggtggtgaagactagcgttgtgttccaccagctgggcactgcgatgccgatgtccgtcgaggaggggcctgagtgccagggccctgtcgtagacagacgatgcccccgttgcggtcacgaggggatggcctaccacacaagacagatgcgttctgcagatgaaggtcagaccgtgttctatacatgtaccaattgcaagttccaggagaaggaggatagctag

SEQ ID NO: 99288 - DNA, 381 bp, Artificial Sequence
  derived and/or modified sequence
atgtccgtgatggatcttgctaacacttgctcctcttttcagtccgatctagatttttgtagcgattgcgggtccgtgctccctctccccggagcccaggacaccgtaacatgcatacgttgtggattcaacatcaacgtccgcgactttgagggaaaagttgttaagacctccgtcgttttccatcaactggggacagccatgcccatgtccgtagaggagggccctgagtgccaaggtccagttgtggatcggaggtgccccagatgcgggcatgagggcatggcttaccacacacgccagatgcggagcgcagacgagggccaaacggtgttctatacctgcacaaactgtaagttccaggaaaaggaggatagctag

SEQ ID NO: 99289 - DNA, 864 bp, Artificial Sequence
  derived and/or modified sequence
gccgcgggcgcagagctggcgctctagcccacggagttggttaactcctctcaccggcccctggaaagggttccaagtcctttagtacccgacgctgtctgggaattccgggcgtttcggctccttggtcgcagaggcaggaggcgtgcgtggcaggagggttcgggttatatactcctaggtcctgggacagaatagttacgacctctgggacaggaactcttctctcttttgttaataaacttccaactccctcctcagacccgaccgcatgtctgtcatggacctcgccaatacttgctccagctttcagtcggacctggatttctgttcagattgcggctcggtcctgcctctgcccggggctcaggatacggtcacctgtattcgctgtggcttcaacatcaacgttcgggactttgaggggaaggttgtgaagacttcggttgtgttccaccaactggggacagccatgcctatgtcggtggaggaagggcctgagtgccagggacctgtggttgacaggcgctgccctcgatgtggtcatgaaggaatggcataccacaccagacagatgcgttcagccgatgaagggcaaactgtcttctacacctgtaccaactgcaagttccaggagaaggaagactcttgacctttttcctgggcaactctacagtccctccctcctttcggaaggtgaaggatactgggtttttagatgccttgtccatcctgtctggttgcaatgttttgctcccagaagagaatcagatcatcatgtggggattaccattgttcctggagtactcctacccttagttgaatttccttattaaagttatatttttctataagaccctgaca

SEQ ID NO: 99290 - DNA, 743 bp, Artificial Sequence
  derived and/or modified sequence
gggcgcagagctggcgctctagcccacggagttggttaactcctctcaccggcccctggaaagggttccaagtcctttagtacccgacgctgtctgggaattccgggcgtttcggctccttggtcgcagaggcaggaggcacccgaccgcatgtctgtcatggacctcgccaatacttgctccagctttcagtcggacctggatttctgttcagattgcggctcggtcctgcctctgcccggggctcaggatacggtcacctgtattcgctgtggcttcaacatcaacgttcgggactttgaggggaaggttgtgaagacttcggttgtgttccaccaactggggacagccatgcctatgtcggtggaggaagggcctgagtgccagggacctgtggttgacaggcgctgccctcgatgtggtcatgaaggaatggcataccacaccagacagatgcgttcagccgatgaagggcaaactgtcttctacacctgtaccaactgcaagttccaggagaaggaagactcttgacctttttcctgggcaactctacagtccctccctcctttcggaaggtgaaggatactgggtttttagatgccttgtccatcctgtctggttgcaatgttttgctcccagaagagaatcagatcatcatgtggggattaccattgttcctggagtactcctacccttagttgaatttccttattaaagttatatttttctataagaccctgaca

SEQ ID NO: 99291 - DNA, 736 bp, Artificial Sequence
  derived and/or modified sequence
gcgggcgcagagctggcgctctagcccacggagttggttaactcctctcaccggcccctggaaagggttccaagtcctttagtacccgacgctgtctgggaattccgggcgtttcggctccttggtcgcagagacccgaccgcatgtctgtcatggacctcgccaatacttgctccagctttcagtcggacctggatttctgttcagattgcggctcggtcctgcctctgcccggggctcaggatacggtcacctgtattcgctgtggcttcaacatcaacgttcgggactttgaggggaaggttgtgaagacttcggttgtgttccaccaactggggacagccatgcctatgtcggtggaggaagggcctgagtgccagggacctgtggttgacaggcgctgccctcgatgtggtcatgaaggaatggcataccacaccagacagatgcgttcagccgatgaagggcaaactgtcttctacacctgtaccaactgcaagttccaggagaaggaagactcttgacctttttcctgggcaactctacagtccctccctcctttcggaaggtgaaggatactgggtttttagatgccttgtccatcctgtctggttgcaatgttttgctcccagaagagaatcagatcatcatgtggggattaccattgttcctggagtactcctacccttagttgaatttccttattaaagttatatttttctataagaccctgaca

SEQ ID NO: 99292 - DNA, 754 bp, Artificial Sequence
  derived and/or modified sequence
gcagagctggcgctctagcccacggagttggttaactcctctcaccggcccctggaaagggttccaagtcctttagtacccgacgctgtctgggaattccgggcgtttcggctccttggtcgcagaggcaggaggcgtgcgtggcaggaggacccgaccgcatgtctgtcatggacctcgccaatacttgctccagctttcagtcggacctggatttctgttcagattgcggctcggtcctgcctctgcccggggctcaggatacggtcacctgtattcgctgtggcttcaacatcaacgttcgggactttgaggggaaggttgtgaagacttcggttgtgttccaccaactggggacagccatgcctatgtcggtggaggaagggcctgagtgccagggacctgtggttgacaggcgctgccctcgatgtggtcatgaaggaatggcataccacaccagacagatgcgttcagccgatgaagggcaaactgtcttctacacctgtaccaactgcaagttccaggagaaggaagactcttgacctttttcctgggcaactctacagtccctccctcctttcggaaggtgaaggatactgggtttttagatgccttgtccatcctgtctggttgcaatgttttgctcccagaagagaatcagatcatcatgtggggattaccattgttcctggagtactcctacccttagttgaatttccttattaaagttatatttttctataagaccctgaca

SEQ ID NO: 99293 - DNA, 736 bp, Artificial Sequence
  derived and/or modified sequence
gcgggcgcagagctggcgctctagcccacggagttggttaactcctctcaccggcccctggaaagggttccaagtgctttagtacccgacgctgtctgggaattccgggcgtttcggctccttggtcgcagagacccgaccgcatgtctgtcatggacctcgccaatacttgctccagctttcagtcggacctggatttctgttcagattgcggctcggtcctgcctctgcccggggctcaggatacggtcacctgtattcgctgtggcttcaacatcaacgttcgggactttgaggggaaggttgtgaagacttcggttgtgttccaccaactggggacagccatgcctatgtcggtggaggaagggcctgagtgccagggacctgtggttgacaggcgctgccctcgatgtggtcatgaaggaatggcataccacaccagacaaatgcgttcagccgatgaagggcaaactgtcttctacacctgtaccaactgcaagttccaggagaaggaagactcttgacctttttcctgggcaactctgcagtccctccctcctttcggaaggtgaaggatactgggtttttagatgccttgtccatcctgtctggttgcaatgttttgctcccagaagagaatcagatcatcatgtggggattaccattgttcctggagtactcctacccttagttgaatttccttattaaagttatatttttctataagaccctgaca

SEQ ID NO: 99294 - DNA, 755 bp, Artificial Sequence
  derived and/or modified sequence
gcagagctggcgctctagcccacggagttggttaactcctctcaccggcccctggaaagggttccaagtgctttagtacccgacgctgtctgggaattccgggcgtttcggctccttggtcgcagaggcaggagggcgtgcgtggcaggaggacccgaccgcatgtctgtcatggacctcgccaatacttgctccagctttcagtcggacctggatttctgttcagattgcggctcggtcctgcctctgcccggggctcaggatacggtcacctgtattcgctgtggcttcaacatcaacgttcgggactttgaggggaaggttgtgaagacttcggttgtgttccaccaactggggacagccatgcctatgtcggtggaggaagggcctgagtgccagggacctgtggttgacaggcgctgccctcgatgtggtcatgaaggaatggcataccacaccagacaaatgcgttcagccgatgaagggcaaactgtcttctacacctgtaccaactgcaagttccaggagaaggaagactcttgacctttttcctgggcaactctgcagtccctccctcctttcggaaggtgaaggatactgggtttttagatgccttgtccatcctgtctggttgcaatgttttgctcccagaagagaatcagatcatcatgtggggattaccattgttcctggagtactcctacccttagttgaatttccttattaaagttatatttttctataagaccctgaca

SEQ ID NO: 99295 - DNA, 744 bp, Artificial Sequence
  derived and/or modified sequence
gggcgcagagctggcgctctagcccacggagttggttaactcctctcaccggcccctggaaagggttccaagtgctttagtacccgacgctgtctgggaattccgggcgtttcggctccttggtcgcagaggcaggagggcacccgaccgcatgtctgtcatggacctcgccaatacttgctccagctttcagtcggacctggatttctgttcagattgcggctcggtcctgcctctgcccggggctcaggatacggtcacctgtattcgctgtggcttcaacatcaacgttcgggactttgaggggaaggttgtgaagacttcggttgtgttccaccaactggggacagccatgcctatgtcggtggaggaagggcctgagtgccagggacctgtggttgacaggcgctgccctcgatgtggtcatgaaggaatggcataccacaccagacaaatgcgttcagccgatgaagggcaaactgtcttctacacctgtaccaactgcaagttccaggagaaggaagactcttgacctttttcctgggcaactctgcagtccctccctcctttcggaaggtgaaggatactgggtttttagatgccttgtccatcctgtctggttgcaatgttttgctcccagaagagaatcagatcatcatgtggggattaccattgttcctggagtactcctacccttagttgaatttccttattaaagttatatttttctataagaccctgaca

SEQ ID NO: 99296 - DNA, 865 bp, Artificial Sequence
  derived and/or modified sequence
gccgcgggcgcagagctggcgctctagcccacggagttggttaactcctctcaccggcccctggaaagggttccaagtgctttagtacccgacgctgtctgggaattccgggcgtttcggctccttggtcgcagaggcaggagggcgtgcgtggcaggagggttcgggttatatactcctaggtcctgggacagaatagttacgacctctgggacaggaactcttctctcttttgttaataaacttccaactccctcctcagacccgaccgcatgtctgtcatggacctcgccaatacttgctccagctttcagtcggacctggatttctgttcagattgcggctcggtcctgcctctgcccggggctcaggatacggtcacctgtattcgctgtggcttcaacatcaacgttcgggactttgaggggaaggttgtgaagacttcggttgtgttccaccaactggggacagccatgcctatgtcggtggaggaagggcctgagtgccagggacctgtggttgacaggcgctgccctcgatgtggtcatgaaggaatggcataccacaccagacaaatgcgttcagccgatgaagggcaaactgtcttctacacctgtaccaactgcaagttccaggagaaggaagactcttgacctttttcctgggcaactctgcagtccctccctcctttcggaaggtgaaggatactgggtttttagatgccttgtccatcctgtctggttgcaatgttttgctcccagaagagaatcagatcatcatgtggggattaccattgttcctggagtactcctacccttagttgaatttccttattaaagttatatttttctataagaccctgaca

SEQ ID NO: 99297 - DNA, 736 bp, Artificial Sequence
  derived and/or modified sequence
gcgggcgcagagctggcgctctagcccacggagttggttaactcctctcaccggcccctggaaagggttccaagtcctttagtacccgacgctgtctgggaattccgggcgtttcggctccttggtcgcagagacccgaccgcatgtctgtcatggacctcgccaatacttgctccagctttcagtcggacctggatttctgttcagattgcggctcggtcctgcctctgcccggggctcaggatacggtcacctgtattcgctgtggcttcaacatcaacgttcgggactttgaggggaaggttgtgaagacttcggttgtgttccaccaactggggacagccatgcctatgtcggtggaggaagggcctgagtgccagggacctgtggttgacaggcgctgccctcgatgtggtcatgaaggaatggcataccacaccagacagatgcgttcagccgatgaagggcaaactgtcttctacacctgtaccaactgcaagttccaggagaaggaagactcttgacctttttcctgggcaactctacagtccctccctcctttcggaaggtgcaggatactgggtttttagatgccttgtccatcctgtctggttgcaatgttttgctcccagaagagaatcagatcatcatgtggggattaccattgttcctggagtactcctacccttagttgaatttccttattaaagttatatttttctataagaccctgaca

SEQ ID NO: 99298 - DNA, 743 bp, Artificial Sequence
  derived and/or modified sequence
gggcgcagagctggcgctctagcccacggagttggttaactcctctcaccggcccctggaaagggttccaagtcctttagtacccgacgctgtctgggaattccgggcgtttcggctccttggtcgcagaggcaggaggcacccgaccgcatgtctgtcatggacctcgccaatacttgctccagctttcagtcggacctggatttctgttcagattgcggctcggtcctgcctctgcccggggctcaggatacggtcacctgtattcgctgtggcttcaacatcaacgttcgggactttgaggggaaggttgtgaagacttcggttgtgttccaccaactggggacagccatgcctatgtcggtggaggaagggcctgagtgccagggacctgtggttgacaggcgctgccctcgatgtggtcatgaaggaatggcataccacaccagacagatgcgttcagccgatgaagggcaaactgtcttctacacctgtaccaactgcaagttccaggagaaggaagactcttgacctttttcctgggcaactctacagtccctccctcctttcggaaggtgcaggatactgggtttttagatgccttgtccatcctgtctggttgcaatgttttgctcccagaagagaatcagatcatcatgtggggattaccattgttcctggagtactcctacccttagttgaatttccttattaaagttatatttttctataagaccctgaca

SEQ ID NO: 99299 - DNA, 754 bp, Artificial Sequence
  derived and/or modified sequence
gcagagctggcgctctagcccacggagttggttaactcctctcaccggcccctggaaagggttccaagtcctttagtacccgacgctgtctgggaattccgggcgtttcggctccttggtcgcagaggcaggaggcgtgcgtggcaggaggacccgaccgcatgtctgtcatggacctcgccaatacttgctccagctttcagtcggacctggatttctgttcagattgcggctcggtcctgcctctgcccggggctcaggatacggtcacctgtattcgctgtggcttcaacatcaacgttcgggactttgaggggaaggttgtgaagacttcggttgtgttccaccaactggggacagccatgcctatgtcggtggaggaagggcctgagtgccagggacctgtggttgacaggcgctgccctcgatgtggtcatgaaggaatggcataccacaccagacagatgcgttcagccgatgaagggcaaactgtcttctacacctgtaccaactgcaagttccaggagaaggaagactcttgacctttttcctgggcaactctacagtccctccctcctttcggaaggtgcaggatactgggtttttagatgccttgtccatcctgtctggttgcaatgttttgctcccagaagagaatcagatcatcatgtggggattaccattgttcctggagtactcctacccttagttgaatttccttattaaagttatatttttctataagaccctgaca

SEQ ID NO: 99300 - DNA, 864 bp, Artificial Sequence
  derived and/or modified sequence
gccgcgggcgcagagctggcgctctagcccacggagttggttaactcctctcaccggcccctggaaagggttccaagtcctttagtacccgacgctgtctgggaattccgggcgtttcggctccttggtcgcagaggcaggaggcgtgcgtggcaggagggttcgggttatatactcctaggtcctgggacagaatagttacgacctctgggacaggaactcttctctcttttgttaataaacttccaactccctcctcagacccgaccgcatgtctgtcatggacctcgccaatacttgctccagctttcagtcggacctggatttctgttcagattgcggctcggtcctgcctctgcccggggctcaggatacggtcacctgtattcgctgtggcttcaacatcaacgttcgggactttgaggggaaggttgtgaagacttcggttgtgttccaccaactggggacagccatgcctatgtcggtggaggaagggcctgagtgccagggacctgtggttgacaggcgctgccctcgatgtggtcatgaaggaatggcataccacaccagacagatgcgttcagccgatgaagggcaaactgtcttctacacctgtaccaactgcaagttccaggagaaggaagactcttgacctttttcctgggcaactctacagtccctccctcctttcggaaggtgcaggatactgggtttttagatgccttgtccatcctgtctggttgcaatgttttgctcccagaagagaatcagatcatcatgtggggattaccattgttcctggagtactcctacccttagttgaatttccttattaaagttatatttttctataagaccctgaca

SEQ ID NO: 99301 - protein, 235 aa, Artificial Sequence
  derived and/or modified sequence
MFIWTSGRTSSSYRHDEKRNIYQKIRDHDLLDKRKTVTALKAGEDRAILLGLAMMVCSIMMYFLLGITLLRSYMQSVWTEESQCTLLNASITETFNCSFSCGPDCWKLSQYPCLQVYVNLTSSGEKLLLYHTEETIKINQKCSYIPKCGKNFEESMSLVNVVMENFRKYQHFSCYSDPEGNQKSVILTKLYSSNVLFHSLFWPTCMMAGGVAIVAMVKLTQYLSLLCERIQRINR

SEQ ID NO: 99302 - protein, 137 aa, Artificial Sequence
  derived and/or modified sequence
MFIWTSGRTSSSYRHDEKRNIYQKIRDHDLLDKRKTVTALKAGEDRAILLGLAMMVCSIMMYFLLGITLLRSYMQSVWTEESQCTLLNASITETFNCSFSCGPDCWKLSQYPCLQVYVNLTSSGEKLLLYHTEETIK

SEQ ID NO: 99303 - protein, 100 aa, Artificial Sequence
  derived and/or modified sequence
MFIWTSGRTSSSYRHDEKRNIYQKIRDHDLLDKRKTVTALKAGEDRAILLGLAMMVCSIMMYFLLGITLLRSYMQSVWTEESQCTLLNASITETFNCSFS

SEQ ID NO: 99304 - protein, 216 aa, Artificial Sequence
  derived and/or modified sequence
MFIWTSGRTSSSYRHDEKRNIYQKIRDHDLLGLAMMVCSIMMYFLLGITLLRSYMQSVWTEESQCTLLNASITETFNCSFSCGPDCWKLSQYPCLQVYVNLTSSGEKLLLYHTEETIKINQKCSYIPKCGKNFEESMSLVNVVMENFRKYQHFSCYSDPEGNQKSVILTKLYSSNVLFHSLFWPTCMMAGGVAIVAMVKLTQYLSLLCERIQRINR

SEQ ID NO: 99305 - DNA, 708 bp, Artificial Sequence
  derived and/or modified sequence
atgttcatctggaccagcggcagaaccagcagcagctacagacacgacgagaagagaaacatctaccagaagatcagagaccacgacctgctggacaagagaaagaccgtgaccgccctgaaggccggcgaggacagagccatcctgctgggcctggccatgatggtgtgcagcatcatgatgtacttcctgctgggcatcaccctgctgagaagctacatgcagagcgtgtggaccgaggagagccagtgcaccctgctgaacgccagcatcaccgagaccttcaactgcagcttcagctgcggccccgactgctggaagctgagccagtacccctgcctgcaggtgtacgtgaacctgaccagcagcggcgagaagctgctgctgtaccacaccgaggagaccatcaagatcaaccagaagtgcagctacatccccaagtgcggcaagaacttcgaggagagcatgagcctggtgaacgtggtgatggagaacttcagaaagtaccagcacttcagctgctacagcgaccccgagggcaaccagaagagcgtgatcctgaccaagctgtacagcagcaacgtgctgttccacagcctgttctggcccacctgcatgatggccggcggcgtggccatcgtggccatggtgaagctgacccagtacctgagcctgctgtgcgagagaatccagagaatcaacagatag

SEQ ID NO: 99306 - DNA, 414 bp, Artificial Sequence
  derived and/or modified sequence
atgttcatctggaccagcggcagaaccagcagcagctacagacacgacgagaagagaaacatctaccagaagatcagagaccacgacctgctggacaagagaaagaccgtgaccgccctgaaggccggcgaggacagagccatcctgctgggcctggccatgatggtgtgcagcatcatgatgtacttcctgctgggcatcaccctgctgagaagctacatgcagagcgtgtggaccgaggagagccagtgcaccctgctgaacgccagcatcaccgagaccttcaactgcagcttcagctgcggccccgactgctggaagctgagccagtacccctgcctgcaggtgtacgtgaacctgaccagcagcggcgagaagctgctgctgtaccacaccgaggagaccatcaagtag

SEQ ID NO: 99307 - DNA, 303 bp, Artificial Sequence
  derived and/or modified sequence
atgttcatctggaccagcggcagaaccagcagcagctacagacacgacgagaagagaaacatctaccagaagatcagagaccacgacctgctggacaagagaaagaccgtgaccgccctgaaggccggcgaggacagagccatcctgctgggcctggccatgatggtgtgcagcatcatgatgtacttcctgctgggcatcaccctgctgagaagctacatgcagagcgtgtggaccgaggagagccagtgcaccctgctgaacgccagcatcaccgagaccttcaactgcagcttcagctag

SEQ ID NO: 99308 - DNA, 651 bp, Artificial Sequence
  derived and/or modified sequence
atgttcatctggaccagcggcagaaccagcagcagctacagacacgacgagaagagaaacatctaccagaagatcagagaccacgacctgctgggcctggccatgatggtgtgcagcatcatgatgtacttcctgctgggcatcaccctgctgagaagctacatgcagagcgtgtggaccgaggagagccagtgcaccctgctgaacgccagcatcaccgagaccttcaactgcagcttcagctgcggccccgactgctggaagctgagccagtacccctgcctgcaggtgtacgtgaacctgaccagcagcggcgagaagctgctgctgtaccacaccgaggagaccatcaagatcaaccagaagtgcagctacatccccaagtgcggcaagaacttcgaggagagcatgagcctggtgaacgtggtgatggagaacttcagaaagtaccagcacttcagctgctacagcgaccccgagggcaaccagaagagcgtgatcctgaccaagctgtacagcagcaacgtgctgttccacagcctgttctggcccacctgcatgatggccggcggcgtggccatcgtggccatggtgaagctgacccagtacctgagcctgctgtgcgagagaatccagagaatcaacagatag

SEQ ID NO: 99309 - DNA, 708 bp, Artificial Sequence
  derived and/or modified sequence
atgtttatctggacatccggaagaacatcatccagctaccggcacgacgagaaacggaacatttatcagaaaattcgggatcacgatctgctggacaagcgaaagacagtcaccgcgctgaaagctggagaggatagggcaatcctgttaggattggcgatgatggtctgctctatcatgatgtattttctattgggaattaccttgttacggtcttacatgcagtctgtgtggacggaggaatcccagtgcacactgttgaatgccagcattactgaaacgtttaactgttctttcagctgtggcccggactgttggaagttaagccagtatccctgcttgcaggtgtacgttaacctaacaagttccggagagaaattgctcttataccatacagaagagacaataaagatcaatcagaagtgctcgtatatcccgaagtgcggcaaaaacttcgaggaatcgatgtccctcgttaatgtggtgatggagaactttcggaaataccagcacttctcttgttatagtgacccagagggcaatcaaaaaagcgtgattctgacaaagctttactcgtccaacgtgctgttccatagcctgttttggccaacatgcatgatggcggggggtgtggctattgtcgcgatggtgaagcttacacaataccttagcctgttgtgtgaaaggatccaaagaatcaatcgctag

SEQ ID NO: 99310 - DNA, 708 bp, Artificial Sequence
  derived and/or modified sequence
atgttcatctggacgtccgggcgaactagctccagttaccgacacgatgagaaaaggaacatttaccaaaagattagagatcacgacctgcttgacaaacggaagaccgtaaccgccctgaaggctggcgaagacagggcaatcctcctcggactggcaatgatggtgtgctctatcatgatgtactttctccttggaattaccttgctgagatcatacatgcagagcgtttggaccgaagagagccagtgtaccctcctgaacgcctcgatcaccgaaacctttaactgcagcttttcctgtggccccgattgctggaaactcagtcaatatccatgcctccaggtgtacgtgaatctgacttcttctggcgaaaagctgctcctctatcacactgaggaaaccattaagatcaaccagaagtgttcttacattcctaagtgcggtaaaaactttgaagagagcatgagcctggtgaacgtggttatggaaaactttcggaaatatcagcacttcagctgctactccgatccagagggtaaccagaagagtgttatcctcacaaagctgtacagcagtaacgtgctttttcactcactattctggcccacctgtatgatggccgggggggtagcgatcgtcgccatggtcaagttaacccaatatctttcacttctgtgtgagcggattcaacgcatcaacaggtag

SEQ ID NO: 99311 - DNA, 708 bp, Artificial Sequence
  derived and/or modified sequence
atgtttatttggactagtggacgcactagtagctcctacaggcatgacgaaaagcgaaacatctaccagaagatcagagaccacgatcttctggacaaaaggaagaccgtcaccgctctcaaagctggggaggatcgtgccatccttctgggactcgcgatgatggtgtgcagcatcatgatgtacttcctgttaggcattaccctgctgagatcctacatgcagtccgtgtggaccgaagaaagccagtgcacactgttgaatgccagtatcaccgagacctttaactgtagtttttcatgtggaccagattgctggaaactgtcgcaatatccctgcctgcaggtttacgttaacctgaccagtagtggcgagaagctgcttctgtaccatactgaggagaccataaagattaatcagaaatgttcatatatcccaaagtgcgggaaaaacttcgaggagtccatgtcgctggtgaacgtggtgatggagaacttcagaaaataccaacactttagttgttacagtgatcccgagggaaatcaaaagagcgtcattctgactaaattgtacagctccaatgtcctttttcactcccttttctggccaacctgcatgatggctgggggtgtggccatcgtggccatggtgaagctgacccagtacttgagcctgctttgtgagcgtatccagagaatcaaccgctag

SEQ ID NO: 99312 - DNA, 414 bp, Artificial Sequence
  derived and/or modified sequence
atgttcatatggacctctggacggaccagctcatcgtaccgccatgacgaaaaaagaaatatctatcagaagattagagaccacgacctgctagacaaaagaaaaactgtgacagctctgaaggctggggaggatcgggcgatactgctgggcctggccatgatggtatgtagcataatgatgtatttcctcttgggcatcacactgctcaggtcatatatgcagagcgtctggacggaagagtcccagtgtaccctccttaacgcctcaatcacagagacatttaactgcagtttttcttgtggcccagactgttggaaactctcacaatacccttgcctacaggtgtatgtgaatctgacttctagcggtgaaaagctgctactgtatcacacggaggagacaattaagtag

SEQ ID NO: 99313 - DNA, 708 bp, Artificial Sequence
  derived and/or modified sequence
atgttcatatggacgagcggacggacctccagttcctaccgccatgacgagaaaaggaatatctaccagaaaatacgcgatcatgatctcctggataaacggaaaaccgtcactgccttaaaagcaggggaggacagggcaatacttcttggattggccatgatggtgtgtagtatcatgatgtactttctgttaggcatcaccctgttgagaagctacatgcagagcgtgtggaccgaggagtctcagtgtacactcctgaatgctagtattacggagactttcaactgttctttctcatgcggaccggattgctggaagctgtcgcagtacccatgtctgcaggtgtacgtgaacctgacaagcagcggtgaaaagctcctcttgtatcacactgaggagacgataaaaataaatcagaagtgttcttatattcctaaatgtgggaagaattttgaggagtccatgtcactggtcaacgttgtgatggagaacttccggaagtaccagcacttctcctgctactctgatcccgaggggaatcagaaatctgtgattcttaccaagctctactcaagcaatgtgctgttccattccttgttctggcctacatgcatgatggctggcggggtggctatcgtagcgatggtaaagttgactcaatacctctcattactttgtgaaagaatccagcggataaatcggtag

SEQ ID NO: 99314 - DNA, 303 bp, Artificial Sequence
  derived and/or modified sequence
atgtttatctggacctcaggacggacctcaagtagctatcgccacgatgagaagcggaacatctatcaaaagatacgcgatcacgacctgctggacaagcgcaagaccgtgaccgcactcaaggctggggaagacagagctattctgttaggactggccatgatggtctgctccattatgatgtattttctcctgggcattacactgcttcgtagttatatgcaaagcgtgtggacggaagagagccagtgcactctcctgaacgcctcaattaccgaaaccttcaattgttccttctcatag

SEQ ID NO: 99315 - DNA, 651 bp, Artificial Sequence
  derived and/or modified sequence
atgtttatctggacaagtggccgcacatccagcagttatcgacatgacgaaaagagaaatatttatcagaaaattagagaccatgatctcttgggccttgctatgatggtgtgttctatcatgatgtacttcttgctgggcataacattactccggtcttacatgcaaagtgtctggacagaggaaagccaatgtactctgcttaacgcttccatcactgagacttttaactgtagctttagttgcggacccgactgctggaagctttctcagtatccttgcctgcaagtgtacgtcaatcttacttccagcggtgagaaacttctgttatatcatactgaggaaacgatcaagattaaccagaaatgcagctacatacccaagtgtggcaaaaatttcgaagagagtatgagtctcgtgaacgttgtcatggaaaacttccggaagtatcagcatttcagctgctattccgatcccgaggggaaccagaagtccgtcatcctcacgaagctctattcctcaaacgtcctctttcatagcctattctggcccacttgcatgatggctggtggcgtggctatagtcgccatggtgaaacttacgcagtacctgagcttactctgtgaaagaatccaacgcattaaccgctag

SEQ ID NO: 99316 - DNA, 708 bp, Artificial Sequence
  derived and/or modified sequence
atgttcatctggaccagcggccgcaccagcagcagctacagacatgatgagaagaggaacatctaccagaagatccgggaccatgacctgctggacaagaggaagacagtgacagccctgaaggccggggaggaccgggccatcctgctgggcctggccatgatggtgtgcagcatcatgatgtacttcctgctgggcatcaccctgctgcggagctacatgcagagcgtgtggacagaggagagccagtgcaccctgctgaatgccagcatcacagagaccttcaactgcagcttcagctgtggccctgactgctggaagctgagccagtacccctgcctgcaggtgtatgtgaacctgaccagcagtggagagaagctgctgctgtaccacacagaggagaccatcaagatcaaccagaagtgcagctacatccccaagtgtgggaagaactttgaggagagcatgagcctggtgaatgtggtgatggagaacttcaggaagtaccagcacttcagctgctacagcgaccctgagggcaaccagaagagcgtcatcctgaccaagctgtacagcagcaatgtgctcttccacagcctcttctggcccacctgcatgatggccggcggcgtggccatcgtggccatggtgaagctgacccagtacctgagcctgctgtgtgagcgcatccagaggatcaacagatag

SEQ ID NO: 99317 - DNA, 414 bp, Artificial Sequence
  derived and/or modified sequence
atgttcatctggaccagcggccgcaccagcagcagctacagacatgatgagaagaggaacatctaccagaagatccgggaccatgacctgctggacaagaggaagacagtgacagccctgaaggccggggaggaccgggccatcctgctgggcctggccatgatggtgtgcagcatcatgatgtacttcctgctgggcatcaccctgctgcggagctacatgcagagcgtgtggacagaggagagccagtgcaccctgctgaatgccagcatcacagagaccttcaactgcagcttcagctgtggccctgactgctggaagctgagccagtacccctgcctgcaggtgtatgtgaacctgaccagcagtggagagaagctgctgctgtaccacacagaggagaccatcaagtag

SEQ ID NO: 99318 - DNA, 303 bp, Artificial Sequence
  derived and/or modified sequence
atgttcatctggaccagcggccgcaccagcagcagctacagacatgatgagaagaggaacatctaccagaagatccgggaccatgacctgctggacaagaggaagacagtgacagccctgaaggccggggaggaccgggccatcctgctgggcctggccatgatggtgtgcagcatcatgatgtacttcctgctgggcatcaccctgctgcggagctacatgcagagcgtgtggacagaggagagccagtgcaccctgctgaatgccagcatcacagagaccttcaactgcagcttctcctag

SEQ ID NO: 99319 - DNA, 651 bp, Artificial Sequence
  derived and/or modified sequence
atgttcatctggaccagcggccgcaccagcagcagctacagacatgatgagaagaggaacatctaccagaagatccgggaccatgacctgctgggcctggccatgatggtgtgcagcatcatgatgtacttcctgctgggcatcaccctgctgcggagctacatgcagagcgtgtggacagaggagagccagtgcaccctgctgaatgccagcatcacagagaccttcaactgcagcttcagctgtggccctgactgctggaagctgagccagtacccctgcctgcaggtgtatgtgaacctgaccagcagcggggagaagctgctgctgtaccacacagaggagaccatcaagatcaaccagaagtgcagctacatccccaagtgtgggaagaactttgaggagagcatgagcctggtgaatgtggtgatggagaacttcaggaagtaccagcacttcagctgctacagcgaccctgagggcaaccagaagagcgtcatcctgaccaagctgtacagcagcaatgtgctcttccacagcctcttctggcccacctgcatgatggccggcggcgtggccatcgtggccatggtgaagctgacccagtacctgagcctgctgtgtgagcgcatccagaggatcaacagatag

SEQ ID NO: 99320 - DNA, 708 bp, Artificial Sequence
  derived and/or modified sequence
atgttcatctggaccagcggccggaccagcagcagctaccggcacgacgagaagcgcaacatttatcagaaaattcgcgatcatgatctgttggacaagcggaaaaccgttacagccctcaaggccggggaggatcgggccatattgttgggcttggctatgatggtctgtagtatcatgatgtactttttactcgggatcaccctcctgcggtcttacatgcaaagcgtctggactgaggaaagtcaatgcactcttctcaacgcttctatcacggaaacctttaattgcagtttttcttgcgggcccgactgctggaagttgagccagtatccctgcctccaggtgtatgtgaacctcacgtcctctggggaaaaacttctgctgtatcataccgaggagacaataaaaataaatcagaagtgtagctatattcctaaatgtggaaagaattttgaggagtcaatgtctcttgttaatgtggtaatggagaacttccggaagtatcagcacttctcatgctacagcgaccctgagggcaaccaaaaatctgtcattctgaccaagctctactcatcgaatgttcttttccattctctgttttggccaacatgcatgatggctgggggggtagcaatcgttgccatggttaagctcacacaatatctgtcgctgctttgtgaacgcattcaaaggatcaatcgatag

SEQ ID NO: 99321 - DNA, 708 bp, Artificial Sequence
  derived and/or modified sequence
atgttcatctggaccagcggccggaccagcagcagctaccggcacgatgaaaaaaggaacatttaccagaaaataagggaccatgacttactcgataagcgcaaaaccgtaaccgccctgaaggccggggaagatagagccattttgctcggactggccatgatggtgtgctcaattatgatgtactttctcctcggaatcaccctcctccgtagctatatgcagagcgtctggacagaagagtctcagtgtactctactcaacgcttctatcacagagacttttaattgctcattttcttgcgggccagattgctggaagttgtctcagtacccctgtctgcaggtgtacgtgaatcttaccagcagcggagagaagcttcttctttatcacaccgaggagactatcaaaatcaaccagaagtgcagctatattccaaaatgcggcaagaacttcgaagaatccatgagtctcgtcaatgtagtaatggagaatttccggaagtatcagcatttttcttgttactctgatccggaagggaatcagaaaagtgtcattttaactaagctgtactcttccaacgtgttgttccacagtcttttttggcccacatgcatgatggccggtggagtcgcaatcgtcgcaatggtgaaacttacgcagtatttgagtctcttgtgcgagaggatccagcgtattaatcgctag

SEQ ID NO: 99322 - DNA, 708 bp, Artificial Sequence
  derived and/or modified sequence
atgttcatctggaccagcggccggaccagcagcagctaccggcacgatgagaaaaggaacatttatcagaagattagagatcacgacctgctcgataaaaggaaaaccgtgactgccctcaaagctggtgaagatagggccatcttgttaggcctggccatgatggtttgctcaattatgatgtactttcttctgggaatcaccctgctacgcagttacatgcaatccgtctggacggaagaatcccagtgcactctgctcaatgcctccatcactgaaacctttaattgttcctttagttgtggtcctgattgttggaaacttagtcagtatccatgcctgcaagtgtatgtaaacctaacctcttccggcgaaaagctgcttctgtatcatacagaggagaccattaaaattaaccagaagtgctcctatatacctaaatgcgggaagaacttcgaagaaagtatgtcactagtaaacgtggtgatggaaaatttcagaaagtaccaacacttctcatgttactcagaccccgaaggtaatcagaagtccgtcatcctgaccaagctatactcctctaacgtgctgtttcatagtcttttctggcctacctgtatgatggctgggggagttgcaatagtggccatggtaaagctaacccagtacctgagcctgctttgtgagcggattcagcgcatcaatcgctag

SEQ ID NO: 99323 - DNA, 414 bp, Artificial Sequence
  derived and/or modified sequence
atgttcatctggaccagcggccggaccagcagcagctaccggcacgacgaaaagaggaacatttatcagaagataagagaccacgacttacttgataaacggaagacagtgacagccctgaaggcgggagaggatcgcgccattctactcggactcgccatgatggtatgcagcatcatgatgtactttctgttgggcatcaccctcttaagaagttatatgcaaagcgtgtggactgaggagtcacagtgcacattattaaatgcaagtatcactgagacatttaactgctctttttcatgcggccccgattgctggaaactctcccaatacccctgcttgcaggtttatgtgaacctcacatcctctggagaaaaactattgctttaccacaccgaggaaaccatcaagtag

SEQ ID NO: 99324 - DNA, 708 bp, Artificial Sequence
  derived and/or modified sequence
atgttcatctggaccagcggccggaccagcagcagctaccggcacgacgagaagagaaatatttatcagaaaattcgagaccacgacttgttggataagagaaaaacggttaccgccttaaaagctggagaggaccgcgccatactcctgggcttagcaatgatggtctgttctataatgatgtattttctgctgggcatcactttgctccgctcttatatgcagagcgtctggaccgaagagagtcagtgcaccctgcttaacgcaagcatcaccgagaccttcaactgttcattttcctgtggacctgattgctggaaactgtctcagtacccctgtcttcaggtttatgtcaatctgacgagctccggcgagaagctcctcctctatcatacggaagagaccattaaaatcaaccagaagtgttcctatatccccaagtgcggtaaaaatttcgaagaatcaatgtctctcgtgaacgttgttatggaaaactttcgcaaataccagcacttcagctgttattcagatcctgagggtaatcaaaagtccgtgatcctgaccaagctttatagttccaatgtgcttttccatagtttgttttggccaacttgcatgatggcgggcggggtggctatcgtcgcgatggtgaagctcactcagtatctgagcctcctctgcgagaggattcagagaatcaacaggtag

SEQ ID NO: 99325 - DNA, 303 bp, Artificial Sequence
  derived and/or modified sequence
atgttcatctggaccagcggccggaccagcagcagctaccggcacgatgagaaaaggaatatctatcagaagatccgggatcatgatttgctggataagcgcaagaccgtgactgccctaaaggctggagaggatcgagcaatcttattaggactggccatgatggtgtgcagtataatgatgtacttcctcctggggattaccctgctgaggtcgtatatgcagagcgtctggaccgaggagagccaatgcaccctgctgaatgccagcatcacagagacttttaattgttctttttcttag

SEQ ID NO: 99326 - DNA, 651 bp, Artificial Sequence
  derived and/or modified sequence
atgttcatctggaccagcggccggaccagcagcagctaccggcacgatgagaagcgtaatatttaccagaaaatccgagaccatgatctgttgggactcgcgatgatggtatgctccatcatgatgtattttcttctcgggattactctgctgagatcttatatgcagagcgtctggactgaggagagccagtgcactctgttaaacgcctcaataaccgaaacgttcaactgcagcttttcatgcggaccagattgctggaaactgtctcagtatccctgtctgcaggtctacgtgaatttgacttcgtccggcgagaagctcctgctgtaccatactgaagagacgatcaagatcaaccagaaatgcagctacatccctaagtgcggaaagaatttcgaagaaagtatgtcactcgttaatgtggtgatggagaatttccgtaaatatcagcactttagctgttactcggaccctgagggtaatcaaaagtctgttatcctcactaaactctacagctccaatgtgctcttccactctctgttctggcctacttgtatgatggccggaggtgttgctatcgtcgccatggtaaaactcacccagtacctgtccttgctctgtgagcgcattcagcgcatcaatcgatag

SEQ ID NO: 99327 - DNA, 2303 bp, Artificial Sequence
  derived and/or modified sequence
cactgagagctatttgttgctgttaacttcattgtgtacctcttctaggtctttttgccattcctccaggacatccaccataaggaaaggagaccctggaccaacattctctaagatgtttatatggaccagtggccggacctcttcatcttatagacatgatgaaaaaagaaatatttaccagaaaatcagggaccatgacctcctggacaaaaggaaaacagtcacagcactgaaggcaggagaggaccgagctattctcctgggactggctatgatggtgtgctccatcatgatgtattttctgctgggaatcacactcctgcgctcatacatgcagagcgtgtggaccgaagagtctcaatgcaccttgctgaatgcgtccatcacggaaacatttaattgctccttcagctgtggtccagactgctggaaactttctcagtacccctgcctccaggtgtacgttaacctgacttcttccggggaaaagctcctcctctaccacacagaagagacaataaaaatcaatcagaagtgctcctatatacctaaatgtggaaaaaattttgaagaatccatgtccctggtgaatgttgtcatggaaaacttcaggaagtatcaacacttctcctgctattctgacccagaaggaaaccagaagagtgttatcctaacaaaactctacagttccaacgtgctgttccattcactcttctggccaacctgtatgatggctgggggtgtggcaattgttgccatggtgaaacttacacagtacctctccctactatgtgagaggatccaacggatcaatagataaatgcaaaaatggataaaataatttttgttaaagctcaaatactgttttctttcattcttcaccaaagaaccttaagtttgtaacgtgcagtctgttatgagttccctaatatattcttatatgtagagcaataatgcaaaagctgttctatatgcaaacatgatgtctttattattcaggagaataaataactgttttgtgttggttggtggttttcataatcttatttctgtactggaactagtactttcttctctcattccgccaaaacagggctcagttattcatttgccaagcttcgtggaggaatgtaggtgacatcaatgtgataaagtctgtgttctgagttgtcagatctcttgaagacaatatttttcatcacttattgtttactaaagctacagccaaaaatatttttttttcttattctaaactgagccctatagcaagtgaagggaccagatttcctaattaaaggaagttaggtacttttcttgtattttttaccatatcactgtaaagaagaggggaaacccagccagctactttttttcatcactttttattcataacttcagatttgtaaaactaatttccaaaatataagctgttttcattagccagttctataatatcttcctgtgatttatgtagaaaatgaacacaccccttttccatttaagaccctgctactgtgtgaagagatgatacttacaaggagtgtcattacctgtgagctgactgaatgttggtaggtgctccattacaatccaggaaagtctgtgttactgatatttgtgtggaaatctttatttcacttcaatttaaccattagatggtaaaattaagatgctacttgttggtaaaaattggtggactggtttcaatgggtaaatgtgttgtggcaaattaatgtgttggaatattgctctttgtgaatttgtgcttaagtcaatgaatgtgtagtatctccttctgacaagcattccctattgggattttaaagctatgtgcacagaatattagtctcttctacatgttttatttttctatttataattcccttttttgttgttatattttatacacagaatagatcttttttctaacacatatttgaactgaataacagacttaaagaaagcctttgttcacattgctatttacttttgtgtttgggggaaaatacgagggattgattttaaataaaaaacattccatctttcatttaatatcaatatcaaaagaagaagacaaacatctatctttctcatctatatttaagtacctttttgtaatgtagtatcaaagttttttaggtaatgcaaaattttacaaatcatttgtggaatgaatggtaaaactaatctgatgaaatggaaaattattctgcaatattgtaattcatagtttgacttttcataagcaaataaatccctaggatgtaatcaggacttcaaatgtgtaattaaattttttt

SEQ ID NO: 99328 - DNA, 1563 bp, Artificial Sequence
  derived and/or modified sequence
tatagttaaggaggatttggaaatctgatccagtgcagggcgatgtcggtctgggaaggaagactgtgagccctctctccctttttaatatgagaattcgaaagcagtggggaagtgatgttggacctatcacagcattgctaacagacagcctattacagtatttaataaaaacagaaacagcatgcctatcataggctaataaatcctacctcctgcacgctttaaaacagtatgaagcagctttaacggagctccagataactaatttcaagcatggctgtctagcgtgcctgtcactcctattgtccttccaaactctttcagacattttgagcagggagtattaaagctatgagttagaaagggttgtgacattaatggtccacaaaggctttaggcacaagaggtaatgatgattaccggtggctatttggaggactgcaccggatcgctgtcattaaaaattaagcgtggcttttgaggaagatgtgacaactaccggagggcccttccagagaaatgtactgaaaaagtctacgcaatgtctgggatttgctaaacaatacctggaaagcagacaggtctttttgccattcctccaggacatccaccataaggaaaggagaccctggaccaacattctctaagatgtttatatggaccagtggccggacctcttcatcttatagacatgatgaaaaaagaaatatttaccagaaaatcagggaccatgacctcctggacaaaaggaaaacagtcacagcactgaaggcaggagaggaccgagctattctcctgggactggctatgatggtgtgctccatcatgatgtattttctgctgggaatcacactcctgcgctcatacatgcagagcgtgtggaccgaagagtctcaatgcaccttgctgaatgcgtccatcacggaaacatttaattgctccttcagctgtggtccagactgctggaaactttctcagtacccctgcctccaggtgtacgttaacctgacttcttccggggaaaagctcctcctctaccacacagaagagacaataaaaatcaatcagaagtgctcctatatacctaaatgtggaaaaaattttgaagaatccatgtccctggtgaatgttgtcatggaaaacttcaggaagtatcaacacttctcctgctattctgacccagaaggaaaccagaagagtgttatcctaacaaaactctacagttccaacgtgctgttccattcactcttctggccaacctgtatgatggctgggggtgtggcaattgttgccatggtgaaacttacacagtacctctccctactatgtgagaggatccaacggatcaatagataaatgcaaaaatggataaaataatttttgttaaagctcaaatactgttttctttcattcttcaccaaagaaccttaagtttgtaacgtgcagtctgttatgagttccctaatatattcttatatgtagagcaataatgcaaaagctgttctatatgcaaacatgatgtctttattattcaggagaataaataactgttttgtgttg

SEQ ID NO: 99329 - DNA, 2552 bp, Artificial Sequence
  derived and/or modified sequence
ctgtgcttcagtgggcttttcactacctttagttagttgcactaggctggttgctgtttaccttgcatggttgactgctctcttctcacattgtgtgccaggaagggcactgcaccttggtataaatgctgctgggcaccgttctgttttctttcttttcttaatcctatccaagtatgcagtacgctcttgggtcgtctcatgagacccaggggcatgttggaaagaactgagagaaagagcaacaaagcggcgagtggtgtgagagggcagcacgcgctgtgggtctttttgccattcctccaggacatccaccataaggaaaggagaccctggaccaacattctctaagatgtttatatggaccagtggccggacctcttcatcttatagacatgatgaaaaaagaaatatttaccagaaaatcagggaccatgacctcctggacaaaaggaaaacagtcacagcactgaaggcaggagaggaccgagctattctcctgggactggctatgatggtgtgctccatcatgatgtattttctgctgggaatcacactcctgcgctcatacatgcagagcgtgtggaccgaagagtctcaatgcaccttgctgaatgcgtccatcacggaaacatttaattgctccttcagctgtggtccagactgctggaaactttctcagtacccctgcctccaggtgtacgttaacctgacttcttccggggaaaagctcctcctctaccacacagaagagacaataaaaatcaatcagaagtgctcctatatacctaaatgtggaaaaaattttgaagaatccatgtccctggtgaatgttgtcatggaaaacttcaggaagtatcaacacttctcctgctattctgacccagaaggaaaccagaagagtgttatcctaacaaaactctacagttccaacgtgctgttccattcactcttctggccaacctgtatgatggctgggggtgtggcaattgttgccatggtgaaacttacacagtacctctccctactatgtgagaggatccaacggatcaatagataaatgcaaaaatggataaaataatttttgttaaagctcaaatactgttttctttcattcttcaccaaagaaccttaagtttgtaacgtgcagtctgttatgagttccctaatatattcttatatgtagagcaataatgcaaaagctgttctatatgcaaacatgatgtctttattattcaggagaataaataactgttttgtgttggttggtggttttcataatcttatttctgtactggaactagtactttcttctctcattccgccaaaacagggctcagttattcatttgccaagcttcgtggaggaatgtaggtgacatcaatgtgataaagtctgtgttctgagttgtcagatctcttgaagacaatatttttcatcacttattgtttactaaagctacagccaaaaatatttttttttcttattctaaactgagccctatagcaagtgaagggaccagatttcctaattaaaggaagttaggtacttttcttgtattttttaccatatcactgtaaagaagaggggaaacccagccagctactttttttcatcactttttattcataacttcagatttgtaaaactaatttccaaaatataagctgttttcattagccagttctataatatcttcctgtgatttatgtagaaaatgaacacaccccttttccatttaagaccctgctactgtgtgaagagatgatacttacaaggagtgtcattacctgtgagctgactgaatgttggtaggtgctccattacaatccaggaaagtctgtgttactgatatttgtgtggaaatctttatttcacttcaatttaaccattagatggtaaaattaagatgctacttgttggtaaaaattggtggactggtttcaatgggtaaatgtgttgtggcaaattaatgtgttggaatattgctctttgtgaatttgtgcttaagtcaatgaatgtgtagtatctccttctgacaagcattccctattgggattttaaagctatgtgcacagaatattagtctcttctacatgttttatttttctatttataattcccttttttgttgttatattttatacacagaatagatcttttttctaacacatatttgaactgaataacagacttaaagaaagcctttgttcacattgctatttacttttgtgtttgggggaaaatacgagggattgattttaaataaaaaacattccatctttcatttaatatcaatatcaaaagaagaagacaaacatctatctttctcatctatatttaagtacctttttgtaatgtagtatcaaagttttttaggtaatgcaaaattttacaaatcatttgtggaatgaatggtaaaactaatctgatgaaatggaaaattattctgcaatattgtaattcatagtttgacttttcataagcaaataaatccctaggatgtaatcaggacttcaaatgtgtaattaaatttttttaaaaaaaatcta

SEQ ID NO: 99330 - DNA, 554 bp, Artificial Sequence
  derived and/or modified sequence
aaatccctctgtgctgttttgagtgaaacagggaaccagcgtccgccatctgacagttcctccaggtcttttaaggtctttttgccattcctccaggacatccaccataaggaaaggagaccctggaccaacattctctaagatgtttatatggaccagtggccggacctcttcatcttatagacatgatgaaaaaagaaatatttaccagaaaatcagggaccatgacctcctggacaaaaggaaaacagtcacagcactgaaggcaggagaggaccgagctattctcctgggactggctatgatggtgtgctccatcatgatgtattttctgctgggaatcacactcctgcgctcatacatgcagagcgtgtggaccgaagagtctcaatgcaccttgctgaatgcgtccatcacggaaacatttaattgctccttcagctgtggtccagactgctggaaactttctcagtacccctgcctccaggtgtacgttaacctgacttcttccggggaaaagctcctcctctaccacacagaagagacaataaaaa

SEQ ID NO: 99331 - DNA, 1455 bp, Artificial Sequence
  derived and/or modified sequence
agtgcagggcgatgtcggtctgggaaggaagactgtgagccctctctccctttttaatatgagaattcgaaagcagtggggaagtgatgttggacctatcacagcattgctaacagacagcctattacagtatttaataaaaacagaaacagcatgcctatcataggctaataaatcctacctcctgcacgctttaaaacagtatgaagcagctttaacggagctccagataactaatttcaagcatggctgtctagcgtgcctgtcactcctattgtccttccaaactctttcagacattttgagcagggagtattaaagctatgagttagaaagggttgtgacattaatggtccacaaaggctttaggcacaagaggtaatgatgattaccggtggctatttggaggactgcaccggatcgctgtcattaaaaattaagcgtggcttttgaggaagatgtgacaactaccggaggtctttttgccattcctccaggacatccaccataaggaaaggagaccctggaccaacattctctaagatgtttatatggaccagtggccggacctcttcatcttatagacatgatgaaaaaagaaatatttaccagaaaatcagggaccatgacctcctggacaaaaggaaaacagtcacagcactgaaggcaggagaggaccgagctattctcctgggactggctatgatggtgtgctccatcatgatgtattttctgctgggaatcacactcctgcgctcatacatgcagagcgtgtggaccgaagagtctcaatgcaccttgctgaatgcgtccatcacggaaacatttaattgctccttcagctgtggtccagactgctggaaactttctcagtacccctgcctccaggtgtacgttaacctgacttcttccggggaaaagctcctcctctaccacacagaagagacaataaaaatcaatcagaagtgctcctatatacctaaatgtggaaaaaattttgaagaatccatgtccctggtgaatgttgtcatggaaaacttcaggaagtatcaacacttctcctgctattctgacccagaaggaaaccagaagagtgttatcctaacaaaactctacagttccaacgtgctgttccattcactcttctggccaacctgtatgatggctgggggtgtggcaattgttgccatggtgaaacttacacagtacctctccctactatgtgagaggatccaacggatcaatagataaatgcaaaaatggataaaataatttttgttaaagctcaaatactgttttctttcattcttcaccaaagaaccttaagtttgtaacgtgcagtctgttatgagttccctaatatattcttatatgtagagcaataatgcaaaagctgttctatatgcaaacatgatgtctttattattcaggagaataaataactgttttgtgttg

SEQ ID NO: 99332 - DNA, 599 bp, Artificial Sequence
  derived and/or modified sequence
gctgggcaccgttctgttttctttcttttcttaatcctatccaagtatgcagtacgctcttgggtcgtctcatgagacccaggggcatgttggaaagaactgagagaaagagcaacaaagcggcgagtggtgtgagagggcagcacgcgctgtggggcccttccagagaaatgtactgaaaaagtctacgcaatgtctgggatttgctaaacaatacctggaaagcagacaggtctttttgccattcctccaggacatccaccataaggaaaggagaccctggaccaacattctctaagatgtttatatggaccagtggccggacctcttcatcttatagacatgatgaaaaaagaaatatttaccagaaaatcagggaccatgacctcctggacaaaaggaaaacagtcacagcactgaaggcaggagaggaccgagctattctcctgggactggctatgatggtgtgctccatcatgatgtattttctgctgggaatcacactcctgcgctcatacatgcagagcgtgtggaccgaagagtctcaatgcaccttgctgaatgcgtccatcacggaaacatttaattgctccttcagc

SEQ ID NO: 99333 - DNA, 651 bp, Artificial Sequence
  derived and/or modified sequence
atgtttatatggaccagtggccggacctcttcatcttatagacatgatgaaaaaagaaatatttaccagaaaatcagggaccatgacctcctgggactggctatgatggtgtgctccatcatgatgtattttctgctgggaatcacactcctgcgctcatacatgcagagcgtgtggaccgaagagtctcaatgcaccttgctgaatgcgtccatcacggaaacatttaattgctccttcagctgtggtccagactgctggaaactttctcagtacccctgcctccaggtgtacgttaacctgacttcttccggggaaaagctcctcctctaccacacagaagagacaataaaaatcaatcagaagtgctcctatatacctaaatgtggaaaaaattttgaagaatccatgtccctggtgaatgttgtcatggaaaacttcaggaagtatcaacacttctcctgctattctgacccagaaggaaaccagaagagtgttatcctaacaaaactctacagttccaacgtgctgttccattcactcttctggccaacctgtatgatggctgggggtgtggcaattgttgccatggtgaaacttacacagtacctctccctactatgtgagaggatccaacggatcaatagataa

SEQ ID NO: 99334 - DNA, 708 bp, Artificial Sequence
  derived and/or modified sequence
atgttcatctggacatccggccgaacgagttcctcgtatagacatgacgagaagaggaacatttaccagaagattagggatcacgacttgctcgacaagcgaaaaacagtgacagccctgaaggctggagaagaccgtgcaatactgctggggttggccatgatggtctgctcgatcatgatgtattttctcctggggattacactcctccgatcttacatgcagagcgtctggaccgaagagtcccagtgcactcttctgaacgcctcgatcacagaaacgttcaattgctctttttcatgtggcccagattgttggaagctttcacaatatccgtgtttgcaagtctacgtcaatctgaccagtagtggggagaagttattactgtaccataccgaagaaaccattaaaatcaatcaaaagtgctcctacattccaaaatgcggcaaaaatttcgaggaatcaatgtctttggtgaatgtagtgatggagaactttaggaaatatcaacacttcagttgctattcagacccagagggcaaccagaagtctgtgattctcaccaaactttactcgtctaacgtattatttcactcactattttggcctacatgcatgatggccggaggggtagccatcgtcgctatggtaaagcttacccagtatctgtctctactgtgcgagagaatccaacgcattaatagatag

SEQ ID NO: 99335 - DNA, 708 bp, Artificial Sequence
  derived and/or modified sequence
atgtttatctggaccagcggaaggacttcttcttcctatagacacgatgagaaaagaaacatctatcagaagattcgagaccacgatctgctggacaaaaggaagacggtgacagctctcaaagctggtgaggacagagccatactgctgggccttgctatgatggtgtgcagtatcatgatgtacttcctgttgggcattactctcctgagatcctatatgcagtccgtctggacagaggaaagtcagtgtaccctgctgaacgcgagtattacagaaacttttaactgtagcttcagctgtgggccagattgttggaagctgtctcagtacccatgtctccaagtctatgtgaatttaacaagttcaggcgagaagcttctgctgtatcataccgaagagaccattaagattaatcagaagtgcagttatatacctaagtgcggcaaaaacttcgaagagtctatgtcactggtgaacgtggtgatggagaatttcagaaagtaccaacacttctcttgttacagtgacccagagggtaatcagaaaagtgtgatcctgactaaattgtactcatcaaacgtgctgtttcactcattgttctggccaacatgtatgatggccggaggggtggctatcgtggccatggttaagctcacccagtatctgtcactgctgtgcgagaggatccagaggatcaataggtag

SEQ ID NO: 99336 - DNA, 708 bp, Artificial Sequence
  derived and/or modified sequence
atgtttatatggacgagcgggagaacttcatcctcttacagacatgatgagaagcgcaatatctatcagaagatacgcgatcatgacctgctcgacaaacgaaagactgtgaccgcactgaaggccggtgaggatagggctattctgcttggcctggctatgatggtgtgctcaataatgatgtacttcctgttgggcattacgttacttcggagctacatgcaatccgtttggacagaggagtctcagtgcactttgctgaacgctagcatcacagagacttttaactgttccttcagctgtggacctgactgctggaagttatcacagtatccatgtctacaagtgtacgtgaatctgactagctctggagagaaacttctgctttatcatacagaggagactatcaagattaaccagaaatgctcctacattcccaagtgcggcaaaaactttgaggaaagtatgtcacttgtgaatgtggtaatggagaatttcagaaaatatcagcacttctcttgttactcagaccccgaaggaaaccagaaatcagttatcctgaccaagctgtacagcagtaacgtgctgtttcactcactcttttggcccacttgcatgatggccggtggggtggcaatcgtggcgatggtgaaactgacgcagtacctgagtttgttgtgcgagaggattcagcggatcaatcgctag

SEQ ID NO: 99337 - DNA, 414 bp, Artificial Sequence
  derived and/or modified sequence
atgtttatatggacctcaggcagaacttcctccagctatcgacacgacgaaaagagaaatatttaccaaaagattcgcgatcacgacctcctcgacaagcggaagactgtgaccgctctgaaggccggagaggaccgggcaatactcttggggcttgccatgatggtctgttcaatcatgatgtactttttgctgggaatcactctgctcagatcctacatgcaatctgtgtggactgaagagtcacaatgcaccctgctgaacgctagtataactgagactttcaattgtagtttttcttgtggacctgattgttggaagctgagtcagtacccctgcctccaggtgtacgtgaacctcacctcatctggggagaaattgctgctttaccacacagaggaaactattaagtag

SEQ ID NO: 99338 - DNA, 708 bp, Artificial Sequence
  derived and/or modified sequence
atgtttatctggacatctggcagaacatcctcaagttacaggcacgacgaaaagagaaatatttatcagaagatacgggaccatgacctgctggataagcgaaagaccgtgaccgccctcaaggctggggaggaccgcgctatcctgctgggcctggctatgatggtttgcagtatcatgatgtattttctattgggtattactctactcaggtcctatatgcagtcagtctggacagaggagtcccagtgcactttactcaacgcttccatcactgaaacatttaattgttccttctcctgtgggcctgattgctggaagttatcacagtatccttgcctgcaggtatacgtgaacctgacttctagtggcgaaaagctgttactgtatcatactgaagaaaccatcaagattaaccagaaatgttcctacattcctaagtgcgggaaaaatttcgaagaatcaatgagtctggtgaacgtagtgatggaaaattttaggaaataccagcacttctcttgctattcagatccagagggtaaccaaaaaagtgtgatcctgacgaagctgtatagctcaaacgtactctttcattctctcttctggcctacatgcatgatggccggaggcgtagccattgtggctatggttaaactaacccagtacttaagtctcctatgtgaaaggattcagcgaattaaccgctag

SEQ ID NO: 99339 - DNA, 303 bp, Artificial Sequence
  derived and/or modified sequence
atgttcatctggacctctggcaggacatcctcaagctatcgacacgacgagaaaaggaacatctatcaaaagattagagatcatgatcttcttgataagaggaagacagttacagctttaaaggccggagaggatcgcgctatcctgctcggactggctatgatggtgtgttcaatcatgatgtactttctgttagggataacgctgctgagaagctatatgcagagtgtgtggactgaggaaagccagtgcaccctcttgaatgctagtatcacagaaacattcaattgctctttttcttag

SEQ ID NO: 99340 - DNA, 651 bp, Artificial Sequence
  derived and/or modified sequence
atgtttatttggacttccggacgaacctcaagctcgtatagacacgacgaaaagcgaaatatataccaaaaaattcgggaccacgatctgctgggacttgccatgatggtttgttcaatcatgatgtacttcctcttaggcatcaccctgctgaggtcatacatgcagtccgtctggaccgaagagtcccagtgcactctgctcaacgcatctatcacagagacatttaactgctctttctcctgcggccctgactgctggaagctcagccagtacccttgccttcaggtctacgtgaatctaacatccagcggagaaaaacttctgttatatcatactgaggagactataaagatcaatcagaaatgctcctatatccccaaatgcggcaaaaacttcgaagagtctatgtctctggtgaacgtggtcatggaaaattttcgcaaataccagcacttcagctgttacagtgatccggaaggaaatcagaaaagcgttatcctgactaaactatacagttcaaacgtgctctttcacagcctcttttggcctacatgcatgatggctggcggtgtcgcaatcgtggcaatggtcaagctaacccagtatctctccctcttatgcgagagaatacagcgcatcaaccggtag

SEQ ID NO: 99341 - protein, 706 aa, Artificial Sequence
  derived and/or modified sequence
MAGLTAAAPRPGVLLLLLSILHPSRPGGVPGAIPGGVPGGVFYPGAGLGALGGGALGPGGKPLKPVPGGLAGAGLGAGLGAFPAVTFPGALVPGGVADAAAAYKAAKAGAGLGGVPGVGGLGVSAGAVVPQPGAGVKPGKVPGVGLPGVYPGGVLPGARFPGVGVLPGVPTGAGVKPKAPGVGGAFAGIPGVGPFGGPQPGVPLGYPIKAPKLPGGYGLPYTTGKLPYGYGPGGVAGAAGKAGYPTGTGVGPQAAAAAAAKAAAKFGAGAAGVLPGVGGAGVPGVPGAIPGIGGIAGVGTPAAAAAAAAAAKAAKYGAAAGLVPGGPGFGPGVVGVPGAGVPGVGVPGAGIPVVPGAGIPGAAVPGVVSPEAAAKAAAKAAKYGARPGVGVGGIPTYGVGAGGFPGFGVGVGGIPGVAGVPGVGGVPGVGGVPGVGISPEAQAAAAAKAAKYGVGTPAAAAAKAAAKAAQFGLVPGVGVAPGVGVAPGVGVAPGVGLAPGVGVAPGVGVAPGVGVAPGIGPGGVAAAAKSAAKVAAKAQLRAAAGLGAGIPGLGVGVGVPGLGVGAGVPGLGVGAGVPGFGAVPGALAAAKAAKYGAAVPGVLGGLGALGGVGIPGGVVGAGPAAAAAAAKAAAKAAQFGLVGAAGLGGLGVGGLGVPGVGGLGGIPPAAAAKAAKYGVAARPGFGLSPIFPGGACLGKACGRKRK

SEQ ID NO: 99342 - protein, 714 aa, Artificial Sequence
  derived and/or modified sequence
MAGLTAAAPRPGVLLLLLSILHPSRPGGVPGAIPGGVPGGVFYPALGPGGKPLKPVPGGLAGAGLGAGLGAFPAVTFPGALVPGGVADAAAAYKAAKAGAGLGGVPGVGGLGVSAGAVVPQPGAGVKPGKVPGVGLPGVYPGGVLPGARFPGVGVLPGVPTGAGVKPKAPGVGGAFAGIPGVGPFGGPQPGVPLGYPIKAPKLPGGYGLPYTTGKLPYGYGPGGVAGAAGKAGYPTGTGVGPQAAAAAAAKAAAKFGAGAAGVLPGVGGAGVPGVPGAIPGIGGIAGVGTPAAAAAAAAAAKAAKYGAAAGLVPGGPGFGPGVVGVPGAGVPGVGVPGAGIPVVPGAGIPGAAVPGVVSPEAAAKAAAKAAKYGARPGVGVGGIPTYGVGAGGFPGFGVGVGGIPGVAGVPGVGGVPGVGGVPGVGISPEAQAAAAAKAAKYGVGTPAAAAAKAAAKAAQFGLVPGVGVAPGVGVAPGVGVAPGVGLAPGVGVAPGVGVAPGVGVAPGIGPGGVAAAAKSAAKVAAKAQLRAAAGLGAGIPGLGVGVGVPGLGVGAGVPGLGVGAGVPGFGAVPGALAAAKAAKYGAAVPGVLGGLGALGGVGIPGGVVGAGPAAAAAAAKAAAKAAQFGLVGAAGLGGLGVGGLGVPGVGGLGGIPPAAAAKAAKYGAAGLGGVLGGAGQFPLGGVAARPGFGLSPIFPGGACLGKACGRKRK

SEQ ID NO: 99343 - protein, 214 aa, Artificial Sequence
  derived and/or modified sequence
MAGLTAAAPRPGVLLLLLSILHPSRPGGVPGAIPGGVPGGVFYPGAGLGALGGGALGPGGKPLKPVPGGLAGAGLGAGLGAFPAVTFPGALVPGGVADAAAAYKAAKAGAGLGGVPGVGGLGVSAGAVVPQPGAGVKPGKVPGVGLPGVYPGGVLPGVGPFGGPQPGVPLGYPIKAPKLPGGYGLPYTTGKLPYGYGPGGVAGAAGKAGYPTGT

SEQ ID NO: 99344 - protein, 167 aa, Artificial Sequence [sequence omitted]

SEQ ID NO: 99345 - protein, 176 aa, Artificial Sequence
  derived and/or modified sequence
MAGLTAAAPRPGVLLLLLSILHPSRPGGVPGAIPGGVPGGVFYPGAGLGALGGGALGPGGKPLKPVPGGLAGAGLGAGLGAFPAVTFPGALVPGGVADAAAAYKAAKAGAGLGGVPGVGGLGVSAGAVVPQPGAGVKPGKVPGVGGAFAGIPGVGPFGGPQPGVPLGYPIKAPKLP

SEQ ID NO: 99346 - DNA, 2175 bp, Artificial Sequence
  derived and/or modified sequence
atggccggcctgaccgccgccgcccccagacccggcgtgctgctgctgctgctgagcatcctgcaccccagcagacccggcggcgtgcccggcgccatccccggcggcgtgcccggcggcgtgttctaccccggcgccggcctgggcgccctgggcggcggcgccctgggccccggcggcaagcccctgaagcccgtgcccggcggcctggccggcgccggcctgggcgccggcctgggcgccttccccgccgtgaccttccccggcgccctggtgcccggcggcgtggccgacgccgccgccgcctacaaggccgccaaggccggcgccggcctgggcggcgtgcccggcgtgggcggcctgggcgtgagcgccggcgccgtggtgccccagcccggcgccggcgtgaagcccggcaaggtgcccggcgtgggcctgcccggcgtgtaccccggcggcgtgctgcccggcgccagattccccggcgtgggcgtgctgcccggcgtgcccaccggcgccggcgtgaagcccaaggcccccggcgtgggcggcgccttcgccggcatccccggcgtgggccccttcggcggcccccagcccggcgtgcccctgggctaccccatcaaggcccccaagctgcccggcggctacggcctgccctacaccaccggcaagctgccctacggctacggccccggcggcgtggccggcgccgccggcaaggccggctaccccaccggcaccggcgtgggcccccaggccgccgccgccgccgccgccaaggccgccgccaagttcggcgccggcgccgccggcgtgctgcccggcgtgggcggcgccggcgtgcccggcgtgcccggcgccatccccggcatcggcggcatcgccggcgtgggcacccccgccgccgccgccgccgccgccgccgccgccaaggccgccaagtacggcgccgccgccggcctggtgcccggcggccccggcttcggccccggcgtggtgggcgtgcccggcgccggcgtgcccggcgtgggcgtgcccggcgccggcatccccgtggtgcccggcgccggcatccccggcgccgccgtgcccggcgtggtgagccccgaggccgccgccaaggccgccgccaaggccgccaagtacggcgccagacccggcgtgggcgtgggcggcatccccacctacggcgtgggcgccggcggcttccccggcttcggcgtgggcgtgggcggcatccccggcgtggccggcgtgcccggcgtgggcggcgtgcccggcgtgggcggcgtgcccggcgtgggcatcagccccgaggcccaggccgccgccgccgccaaggccgccaagtacggcgtgggcacccccgccgccgccgccgccaaggccgccgccaaggccgcccagttcggcctggtgcccggcgtgggcgtggcccccggcgtgggcgtggcccccggcgtgggcgtggcccccggcgtgggcctggcccccggcgtgggcgtggcccccggcgtgggcgtggcccccggcgtgggcgtggcccccggcatcggccccggcggcgtggccgccgccgccaagagcgccgccaaggtggccgccaaggcccagctgagagccgccgccggcctgggcgccggcatccccggcctgggcgtgggcgtgggcgtgcccggcctgggcgtgggcgccggcgtgcccggcctgggcgtgggcgccggcgtgcccggcttcggcgccgtgcccggcgccctggccgccgccaaggccgccaagtacggcgccgccgtgcccggcgtgctgggcggcctgggcgccctgggcggcgtgggcatccccggcggcgtggtgggcgccggccccgccgccgccgccgccgccgccaaggccgccgccaaggccgcccagttcggcctggtgggcgccgccggcctgggcggcctgggcgtgggcggcctgggcgtgcccggcgtgggcggcctgggcggcatcccccccgccgccgccgccaaggccgccaagtacggcgccgccggcctgggcggcgtgctgggcggcgccggccagttccccctgggcggcgtggccgccagacccggcttcggcctgagccccatcttccccggcggcgcctgcctgggcaaggcctgcggcagaaagagaaagtag

SEQ ID NO: 99347 - DNA, 2274 bp, Artificial Sequence
  derived and/or modified sequence
atggccggcctgaccgccgccgcccccagacccggcgtgctgctgctgctgctgagcatcctgcaccccagcagacccggcggcgtgcccggcgccatccccggcggcgtgcccggcggcgtgttctaccccggcgccggcctgggcgccctgggcggcggcgccctgggccccggcggcaagcccctgaagcccgtgcccggcggcctggccggcgccggcctgggcgccggcctgggcgccttccccgccgtgaccttccccggcgccctggtgcccggcggcgtggccgacgccgccgccgcctacaaggccgccaaggccggcgccggcctgggcggcgtgcccggcgtgggcggcctgggcgtgagcgccggcgccgtggtgccccagcccggcgccggcgtgaagcccggcaaggtgcccggcgtgggcctgcccggcgtgtaccccggcggcgtgctgcccggcgccagattccccggcgtgggcgtgctgcccggcgtgcccaccggcgccggcgtgaagcccaaggcccccggcgtgggcggcgccttcgccggcatccccggcgtgggccccttcggcggcccccagcccggcgtgcccctgggctaccccatcaaggcccccaagctgcccggcggctacggcctgccctacaccaccggcaagctgccctacggctacggccccggcggcgtggccggcgccgccggcaaggccggctaccccaccggcaccggcgtgggcccccaggccgccgccgccgccgccgccaaggccgccgccaagttcggcgccggcgccgccggcgtgctgcccggcgtgggcggcgccggcgtgcccggcgtgcccggcgccatccccggcatcggcggcatcgccggcgtgggcacccccgccgccgccgccgccgccgccgccgccgccaaggccgccaagtacggcgccgccgccggcctggtgcccggcggccccggcttcggccccggcgtggtgggcgtgcccggcgccggcgtgcccggcgtgggcgtgcccggcgccggcatccccgtggtgcccggcgccggcatccccggcgccgccgtgcccggcgtggtgagccccgaggccgccgccaaggccgccgccaaggccgccaagtacggcgccagacccggcgtgggcgtgggcggcatccccacctacggcgtgggcgccggcggcttccccggcttcggcgtgggcgtgggcggcatccccggcgtggccggcgtgcccggcgtgggcggcgtgcccggcgtgggcggcgtgcccggcgtgggcatcagccccgaggcccaggccgccgccgccgccaaggccgccaagtacggcgtgggcacccccgccgccgccgccgccaaggccgccgccaaggccgcccagttcggcctggtgcccggcgtgggcgtggcccccggcgtgggcgtggcccccggcgtgggcgtggcccccggcgtgggcctggcccccggcgtgggcgtggcccccggcgtgggcgtggcccccggcgtgggcgtggcccccggcatcggccccggcggcgtggccgccgccgccaagagcgccgccaaggtggccgccaaggcccagctgagagccgccgccggcctgggcgccggcatccccggcctgggcgtgggcgtgggcgtgcccggcctgggcgtgggcgccggcgtgcccggcctgggcgtgggcgccggcgtgcccggcttcggcgccggcgccgacgagggcgtgagaagaagcctgagccccgagctgagagagggcgaccccagcagcagccagcacctgcccagcacccccagcagccccagagtgcccggcgccctggccgccgccaaggccgccaagtacggcgccgccgtgcccggcgtgctgggcggcctgggcgccctgggcggcgtgggcatccccggcggcgtggtgggcgccggccccgccgccgccgccgccgccgccaaggccgccgccaaggccgcccagttcggcctggtgggcgccgccggcctgggcggcctgggcgtgggcggcctgggcgtgcccggcgtgggcggcctgggcggcatcccccccgccgccgccgccaaggccgccaagtacggcgccgccggcctgggcggcgtgctgggcggcgccggccagttccccctgggcggcgtggccgccagacccggcttcggcctgagccccatcttccccggcggcgcctgcctgggcaaggcctgcggcagaaagagaaagtag

SEQ ID NO: 99348 - DNA, 2136 bp, Artificial Sequence
  derived and/or modified sequence
atggccggcctgaccgccgccgcccccagacccggcgtgctgctgctgctgctgagcatcctgcaccccagcagacccggcggcgtgcccggcgccatccccggcggcgtgcccggcggcgtgttctaccccggcgccggcctgggcgccctgggcggcggcgccctgggccccggcggcaagcccctgaagcccgtgcccggcggcctggccggcgccggcctgggcgccggcctgggcgccttccccgccgtgaccttccccggcgccctggtgcccggcggcgtggccgacgccgccgccgcctacaaggccgccaaggccggcgccggcctgggcggcgtgcccggcgtgggcggcctgggcgtgagcgccgcccccagcgtgcccggcgccgtggtgccccagcccggcgccggcgtgaagcccggcaaggtgcccggcgtgggcctgcccggcgtgtaccccggcggcgtgctgcccggcgccagattccccggcgtgggcgtgctgcccggcgtgcccaccggcgccggcgtgaagcccaaggcccccggcgtgggcggcgccttcgccggcatccccggcgtgggccccttcggcggcccccagcccggcgtgcccctgggctaccccatcaaggcccccaagctgcccggcggctacggcctgccctacaccaccggcaagctgccctacggctacggccccggcggcgtggccggcgccgccggcaaggccggctaccccaccggcaccggcgtgggcccccaggccgccgccgccgccgccgccaaggccgccgccaagttcggcgccggcgccgccggcgtgctgcccggcgtgggcggcgccggcgtgcccggcgtgcccggcgccatccccggcatcggcggcatcgccggcgtgggcacccccgccgccgccgccgccgccgccgccgccgccaaggccgccaagtacggcgccgccgccggcctggtgcccggcggccccggcttcggccccggcgtggtgggcgtgcccggcgccggcgtgcccggcgtgggcgtgcccggcgccggcatccccgtggtgcccggcgccggcatccccggcgccgccgtgcccggcgtggtgagccccgaggccgccgccaaggccgccgccaaggccgccaagtacggcgccagacccggcgtgggcgtgggcggcatccccacctacggcgtgggcgccggcggcttccccggcttcggcgtgggcgtgggcggcatccccggcgtggccggcgtgcccggcgtgggcggcgtgcccggcgtgggcggcgtgcccggcgtgggcatcagccccgaggcccaggccgccgccgccgccaaggccgccaagtacggcgtgggcacccccgccgccgccgccgccaaggccgccgccaaggccgcccagttcggcctggtgcccggcgtgggcgtggcccccggcgtgggcgtggcccccggcgtgggcgtggcccccggcgtgggcctggcccccggcgtgggcgtggcccccggcgtgggcgtggcccccggcgtgggcgtggcccccggcatcggccccggcggcgtggccgccgccgccaagagcgccgccaaggtggccgccaaggcccagctgagagccgccgccggcctgggcgccggcatccccggcctgggcgtgggcgtgggcgtgcccggcctgggcgtgggcgccggcgtgcccggcctgggcgtgggcgccggcgtgcccggcttcggcgccgtgcccggcgccctggccgccgccaaggccgccaagtacggcgccgccgtgcccggcgtgctgggcggcctgggcgccctgggcggcgtgggcatccccggcggcgtggtgggcgccggccccgccgccgccgccgccgccgccaaggccgccgccaaggccgcccagttcggcctggtgggcgccgccggcctgggcggcctgggcgtgggcggcctgggcgtgcccggcgtgggcggcctgggcggcatcccccccgccgccgccgccaaggccgccaagtacggcgtggccgccagacccggcttcggcctgagccccatcttccccggcggcgcctgcctgggcaaggcctgcggcagaaagagaaagtag

SEQ ID NO: 99349 - DNA, 2379 bp, Artificial Sequence
  derived and/or modified sequence
atggccggcctgaccgccgccgcccccagacccggcgtgctgctgctgctgctgagcatcctgcaccccagcagacccggcggcgtgcccggcgccatccccggcggcgtgcccggcggcgtgttctaccccggcgccggcctgggcgccctgggcggcggcgccctgggccccggcggcaagcccctgaagcccgtgcccggcggcctggccggcgccggcctgggcgccggcctgggcgccttccccgccgtgaccttccccggcgccctggtgcccggcggcgtggccgacgccgccgccgcctacaaggccgccaaggccggcgccggcctgggcggcgtgcccggcgtgggcggcctgggcgtgagcgccggcgccgtggtgccccagcccggcgccggcgtgaagcccggcaaggtgcccggcgtgggcctgcccggcgtgtaccccggcggcgtgctgcccggcgccagattccccggcgtgggcgtgctgcccggcgtgcccaccggcgccggcgtgaagcccaaggcccccggcgtgggcggcgccttcgccggcatccccggcgtgggccccttcggcggcccccagcccggcgtgcccctgggctaccccatcaaggcccccaagctgcccggcggctacggcctgccctacaccaccggcaagctgccctacggctacggccccggcggcgtggccggcgccgccggcaaggccggctaccccaccggcaccggcgtgggcccccaggccgccgccgccgccgccgccaaggccgccgccaagttcggcgccggcgccgccggcgtgctgcccggcgtgggcggcgccggcgtgcccggcgtgcccggcgccatccccggcatcggcggcatcgccggcgtgggcacccccgccgccgccgccgccgccgccgccgccgccaaggccgccaagtacggcgccgccgccggcctggtgcccggcggccccggcttcggccccggcgtggtgggcgtgcccggcgccggcgtgcccggcgtgggcgtgcccggcgccggcatccccgtggtgcccggcgccggcatccccggcgccgccgtgcccggcgtggtgagccccgaggccgccgccaaggccgccgccaaggccgccaagtacggcgccagacccggcgtgggcgtgggcggcatccccacctacggcgtgggcgccggcggcttccccggcttcggcgtgggcgtgggcggcatccccggcgtggccggcgtgcccggcgtgggcggcgtgcccggcgtgggcggcgtgcccggcgtgggcatcagccccgaggcccaggccgccgccgccgccaaggccgccaagtacggcgccgccggcgccggcgtgctgggcggcctggtgcccggcgcccccggcgccgtgcccggcgtgcccggcaccggcggcgtgcccggcgtgggcacccccgccgccgccgccgccaaggccgccgccaaggccgcccagttcgccctgctgaacctggccggcctggtgcccggcgtgggcgtggcccccggcgtgggcgtggcccccggcgtgggcgtggcccccggcgtgggcctggcccccggcgtgggcgtggcccccggcgtgggcgtggcccccggcgtgggcgtggcccccggcatcggccccggcggcgtggccgccgccgccaagagcgccgccaaggtggccgccaaggcccagctgagagccgccgccggcctgggcgccggcatccccggcctgggcgtgggcgtgggcgtgcccggcctgggcgtgggcgccggcgtgcccggcctgggcgtgggcgccggcgtgcccggcttcggcgccggcgccgacgagggcgtgagaagaagcctgagccccgagctgagagagggcgaccccagcagcagccagcacctgcccagcacccccagcagccccagagtgcccggcgccctggccgccgccaaggccgccaagtacggcgccgccgtgcccggcgtgctgggcggcctgggcgccctgggcggcgtgggcatccccggcggcgtggtgggcgccggccccgccgccgccgccgccgccgccaaggccgccgccaaggccgcccagttcggcctggtgggcgccgccggcctgggcggcctgggcgtgggcggcctgggcgtgcccggcgtgggcggcctgggcggcatcccccccgccgccgccgccaaggccgccaagtacggcgccgccggcctgggcggcgtgctgggcggcgccggccagttccccctgggcggcgtggccgccagacccggcttcggcctgagccccatcttccccggcggcgcctgcctgggcaaggcctgcggcagaaagagaaagtag

SEQ ID NO: 99350 - DNA, 2034 bp, Artificial Sequence
  derived and/or modified sequence
atggccggcctgaccgccgccgcccccagacccggcgtgctgctgctgctgctgagcatcctgcaccccagcagacccggcggcgtgcccggcgccatccccggcggcgtgcccggcggcgtgttctaccccgccctgggccccggcggcaagcccctgaagcccgtgcccggcggcctggccggcgccggcctgggcgccggcctgggcgccttccccgccgtgaccttccccggcgccctggtgcccggcggcgtggccgacgccgccgccgcctacaaggccgccaaggccggcgccggcctgggcggcgtgcccggcgtgggcggcctgggcgtgagcgccggcgccgtggtgccccagcccggcgccggcgtgaagcccggcaaggtgcccggcgtgggcctgcccggcgtgtaccccggcggcgtgctgcccggcgccagattccccggcgtgggcgtgctgcccggcgtgcccaccggcgccggcgtgaagcccaaggcccccggcgtgggcggcgccttcgccggcatccccggcgtgggccccttcggcggcccccagcccggcgtgcccctgggctaccccatcaaggcccccaagctgcccggcggctacggcctgccctacaccaccggcaagctgccctacggctacggccccggcggcgtggccggcgccgccggcaaggccggctaccccaccggcaccggcgtgggcccccaggccgccgccgccgccgccgccaaggccgccgccaagttcggcgccggcgccgccggcgtgctgcccggcgtgggcggcgccggcgtgcccggcgtgcccggcgccatccccggcatcggcggcatcgccggcgtgggcacccccgccgccgccgccgccgccgccgccgccgccaaggccgccaagtacggcgccgccgccggcctggtgcccggcggccccggcttcggccccggcgtggtgggcgtgcccggcgccggcgtgcccggcgtgggcgtgcccggcgccggcatccccgtggtgcccggcgccggcatccccggcgccgccgtgcccggcgtggtgagccccgaggccgccgccaaggccgccgccaaggccgccaagtacggcgccagacccggcgtgggcgtgggcggcatccccacctacggcgtgggcgccggcggcttccccggcttcggcgtgggcgtgggcggcatccccggcgtggccggcgtgcccggcgtgggcggcgtgcccggcgtgggcggcgtgcccggcgtgggcatcagccccgaggcccaggccgccgccgccgccaaggccgccaagtacggcctggtgcccggcgtgggcgtggcccccggcgtgggcgtggcccccggcgtgggcgtggcccccggcgtgggcctggcccccggcgtgggcgtggcccccggcgtgggcgtggcccccggcgtgggcgtggcccccggcatcggccccggcggcgtggccgccgccgccaagagcgccgccaaggtggccgccaaggcccagctgagagccgccgccggcctgggcgccggcatccccggcctgggcgtgggcgtgggcgtgcccggcctgggcgtgggcgccggcgtgcccggcctgggcgtgggcgccggcgtgcccggcttcggcgccgtgcccggcgccctggccgccgccaaggccgccaagtacggcgccgccgtgcccggcgtgctgggcggcctgggcgccctgggcggcgtgggcatccccggcggcgtggtgggcgccggccccgccgccgccgccgccgccgccaaggccgccgccaaggccgcccagttcggcctggtgggcgccgccggcctgggcggcctgggcgtgggcggcctgggcgtgcccggcgtgggcggcctgggcggcatcccccccgccgccgccgccaaggccgccaagtacggcgtggccgccagacccggcttcggcctgagccccatcttccccggcggcgcctgcctgggcaaggcctgcggcagaaagagaaagtag

SEQ ID NO: 99351 - DNA, 2118 bp, Artificial Sequence
  derived and/or modified sequence
atggccggcctgaccgccgccgcccccagacccggcgtgctgctgctgctgctgagcatcctgcaccccagcagacccggcggcgtgcccggcgccatccccggcggcgtgcccggcggcgtgttctaccccggcgccggcctgggcgccctgggcggcggcgccctgggccccggcggcaagcccctgaagcccgtgcccggcggcctggccggcgccggcctgggcgccggcctgggcgccttccccgccgtgaccttccccggcgccctggtgcccggcggcgtggccgacgccgccgccgcctacaaggccgccaaggccggcgccggcctgggcggcgtgcccggcgtgggcggcctgggcgtgagcgccggcgccgtggtgccccagcccggcgccggcgtgaagcccggcaaggtgcccggcgtgggcctgcccggcgtgtaccccggcggcgtgctgcccggcgccagattccccggcgtgggcgtgctgcccggcgtgcccaccggcgccggcgtgaagcccaaggcccccggcgtgggcggcgccttcgccggcatccccggcgtgggccccttcggcggcccccagcccggcgtgcccctgggctaccccatcaaggcccccaagctgcccggcggctacggcctgccctacaccaccggcaagctgccctacggctacggccccggcggcgtggccggcgccgccggcaaggccggctaccccaccggcaccggcgtgggcccccaggccgccgccgccgccgccgccaaggccgccgccaagttcggcgccggcgccgccggcgtgctgcccggcgtgggcggcgccggcgtgcccggcgtgcccggcgccatccccggcatcggcggcatcgccggcgtgggcacccccgccgccgccgccgccgccgccgccgccgccaaggccgccaagtacggcgccgccgccggcctggtgcccggcggccccggcttcggccccggcgtggtgggcgtgcccggcgccggcgtgcccggcgtgggcgtgcccggcgccggcatccccgtggtgcccggcgccggcatccccggcgccgccgtgcccggcgtggtgagccccgaggccgccgccaaggccgccgccaaggccgccaagtacggcgccagacccggcgtgggcgtgggcggcatccccacctacggcgtgggcgccggcggcttccccggcttcggcgtgggcgtgggcggcatccccggcgtggccggcgtgcccggcgtgggcggcgtgcccggcgtgggcggcgtgcccggcgtgggcatcagccccgaggcccaggccgccgccgccgccaaggccgccaagtacggcctggtgcccggcgtgggcgtggcccccggcgtgggcgtggcccccggcgtgggcgtggcccccggcgtgggcctggcccccggcgtgggcgtggcccccggcgtgggcgtggcccccggcgtgggcgtggcccccggcatcggccccggcggcgtggccgccgccgccaagagcgccgccaaggtggccgccaaggcccagctgagagccgccgccggcctgggcgccggcatccccggcctgggcgtgggcgtgggcgtgcccggcctgggcgtgggcgccggcgtgcccggcctgggcgtgggcgccggcgtgcccggcttcggcgccgtgcccggcgccctggccgccgccaaggccgccaagtacggcgccgccgtgcccggcgtgctgggcggcctgggcgccctgggcggcgtgggcatccccggcggcgtggtgggcgccggccccgccgccgccgccgccgccgccaaggccgccgccaaggccgcccagttcggcctggtgggcgccgccggcctgggcggcctgggcgtgggcggcctgggcgtgcccggcgtgggcggcctgggcggcatcccccccgccgccgccgccaaggccgccaagtacggcgccgccggcctgggcggcgtgctgggcggcgccggccagttccccctgggcggcgtggccgccagacccggcttcggcctgagccccatcttccccggcggcgcctgcctgggcaaggcctgcggcagaaagagaaagtag

SEQ ID NO: 99352 - DNA, 645 bp, Artificial Sequence
  derived and/or modified sequence
atggccggcctgaccgccgccgcccccagacccggcgtgctgctgctgctgctgagcatcctgcaccccagcagacccggcggcgtgcccggcgccatccccggcggcgtgcccggcggcgtgttctaccccggcgccggcctgggcgccctgggcggcggcgccctgggccccggcggcaagcccctgaagcccgtgcccggcggcctggccggcgccggcctgggcgccggcctgggcgccttccccgccgtgaccttccccggcgccctggtgcccggcggcgtggccgacgccgccgccgcctacaaggccgccaaggccggcgccggcctgggcggcgtgcccggcgtgggcggcctgggcgtgagcgccggcgccgtggtgccccagcccggcgccggcgtgaagcccggcaaggtgcccggcgtgggcctgcccggcgtgtaccccggcggcgtgctgcccggcgtgggccccttcggcggcccccagcccggcgtgcccctgggctaccccatcaaggcccccaagctgcccggcggctacggcctgccctacaccaccggcaagctgccctacggctacggccccggcggcgtggccggcgccgccggcaaggccggctaccccaccggcacctag

SEQ ID NO: 99353 - DNA, 504 bp, Artificial Sequence
  derived and/or modified sequence
atggccggcctgaccgccgccgcccccagacccggcgtgctgctgctgctgctgagcatcctgcaccccagcagacccggcggcgtgcccggcgccatccccggcggcgtgcccggcggcgtgttctaccccggcgccggcctgggcgccctgggcggcggcgccctgggccccggcggcaagcccctgaagcccgtgcccggcggcctggccggcgccggcctgggcgccggcctgggcgccttccccgccgtgaccttccccggcgccctggtgcccggcggcgtggccgacgccgccgccgcctacaaggccgccaaggccggcgtgggccccttcggcggcccccagcccggcgtgcccctgggctaccccatcaaggcccccaagctgcccggcggctacggcctgccctacaccaccggcaagctgccctacggctacggccccggcggcgtggccggcgccgccggcaaggccggctaccccaccggcaccggctag

SEQ ID NO: 99354 - DNA, 2079 bp, Artificial Sequence
  derived and/or modified sequence
atggccggcctgaccgccgccgcccccagacccggcgtgctgctgctgctgctgagcatcctgcaccccagcagacccggcggcgtgcccggcgccatccccggcggcgtgcccggcggcgtgttctaccccggcgccggcctgggcgccctgggcggcggcgccctgggccccggcggcaagcccctgaagcccgtgcccggcggcctggccggcgccggcctgggcgccggcctgggcgccttccccgccgtgaccttccccggcgccctggtgcccggcggcgtggccgacgccgccgccgcctacaaggccgccaaggccggcgccggcctgggcggcgtgcccggcgtgggcggcctgggcgtgagcgccgcccccagcgtgcccggcgccgtggtgccccagcccggcgccggcgtgaagcccggcaaggtgcccggcgtgggcctgcccggcgtgtaccccggcggcgtgctgcccggcgccagattccccggcgtgggcgtgctgcccggcgtgcccaccggcgccggcgtgaagcccaaggcccccggcgtgggcggcgccttcgccggcatccccggcgtgggccccttcggcggcccccagcccggcgtgcccctgggctaccccatcaaggcccccaagctgcccggcggctacggcctgccctacaccaccggcaagctgccctacggctacggccccggcggcgtggccggcgccgccggcaaggccggctaccccaccggcaccggcgtgggcccccaggccgccgccgccgccgccgccaaggccgccgccaagttcggcgccggcgccgccggcgtgctgcccggcgtgggcggcgccggcgtgcccggcgtgcccggcgccatccccggcatcggcggcatcgccggcgtgggcacccccgccgccgccgccgccgccgccgccgccgccaaggccgccaagtacggcgccgccgccggcctggtgcccggcggccccggcttcggccccggcgtggtgggcgtgcccggcgccggcgtgcccggcgtgggcgtgcccggcgccggcatccccgtggtgcccggcgccggcatccccggcgccgccgtgcccggcgtggtgagccccgaggccgccgccaaggccgccgccaaggccgccaagtacggcgccagacccggcgtgggcgtgggcggcatccccacctacggcgtgggcgccggcggcttccccggcttcggcgtgggcgtgggcggcatccccggcgtggccggcgtgcccggcgtgggcggcgtgcccggcgtgggcggcgtgcccggcgtgggcatcagccccgaggcccaggccgccgccgccgccaaggccgccaagtacggcctggtgcccggcgtgggcgtggcccccggcgtgggcgtggcccccggcgtgggcgtggcccccggcgtgggcctggcccccggcgtgggcgtggcccccggcgtgggcgtggcccccggcgtgggcgtggcccccggcatcggccccggcggcgtggccgccgccgccaagagcgccgccaaggtggccgccaaggcccagctgagagccgccgccggcctgggcgccggcatccccggcctgggcgtgggcgtgggcgtgcccggcctgggcgtgggcgccggcgtgcccggcctgggcgtgggcgccggcgtgcccggcttcggcgccgtgcccggcgccctggccgccgccaaggccgccaagtacggcgccgccgtgcccggcgtgctgggcggcctgggcgccctgggcggcgtgggcatccccggcggcgtggtgggcgccggccccgccgccgccgccgccgccgccaaggccgccgccaaggccgcccagttcggcctggtgggcgccgccggcctgggcggcctgggcgtgggcggcctgggcgtgcccggcgtgggcggcctgggcggcatcccccccgccgccgccgccaaggccgccaagtacggcgtggccgccagacccggcttcggcctgagccccatcttccccggcggcgcctgcctgggcaaggcctgcggcagaaagagaaagtag

SEQ ID NO: 99355 - DNA, 507 bp, Artificial Sequence
  derived and/or modified sequence
atggccggcctgaccgccgccgcccccagacccggcgtgctgctgctgctgctgagcatcctgcaccccagcagacccggcggcgtgcccggcgccatccccggcggcgtgcccggcggcgtgttctaccccggcgccggcctgggcgccctgggcggcggcgccctgggccccggcggcaagcccctgaagcccggcgtgggccccttcggcggcccccagcccggcgtgcccctgggctaccccatcaaggcccccaagctgcccggctacggccccggcggcgtggccggcgccgccggcaaggccggctaccccaccggcaccggcgtgggcccccaggccgccgccgccgccgccgccaaggccgccgccaagttcggcgccggcgccgccggcgtgctgcccggcgtgggcggcgccggcgtgcccggcgtgcccggcgccatccccggcatcggcggcatcgccggcgtgggcacccccgccgccgccgccgccgcctag

SEQ ID NO: 99356 - DNA, 885 bp, Artificial Sequence
  derived and/or modified sequence
atggccggcctgaccgccgccgcccccagacccggcgtgctgctgctgctgctgagcatcctgcaccccagcagacccggcggcgtgcccggcgccatccccggcggcgtgcccggcggcgtgttctaccccggcgccggcctgggcgccctgggcggcggcgccctgggccccggcggcaagcccctgaagcccggcctgggcgccttccccgccgtgaccttccccggcgccctggtgcccggcggcgtggccgacgccgccgccgcctacaaggccgccaaggccggcgccggcctgggcggcgtgcccggcgtgggcggcctgggcgtgagcgccggcgccgtggtgccccagcccggcgccggcgtgaagcccggcaaggtgcccggcgtgggcctgcccggcgtgtaccccggcggcgtgctgcccggcgccagattccccggcgtgggcgtgctgcccggcgtgcccaccggcgccggcgtgaagcccaaggcccccggcgtgggccccttcggcggcccccagcccggcgtgcccctgggctaccccatcaaggcccccaagctgcccggcggctacggcctgccctacaccaccggcaagctgccctacggctacggccccggcggcgtggccggcgccgccggcaaggccggctaccccaccggcaccggcgtgggcccccaggccgccgccgccgccgccgccaaggccgccgccaagttcggcgccggcgccgccggcgtgctgcccggcgtgggcggcgccggcgtgcccggcgtgcccggcgccatccccggcatcggcggcatcgccggcgtgggcacccccgccgccgccgccgccgccgccgccgccgccaaggccgccaagtactag

SEQ ID NO: 99357 - DNA, 531 bp, Artificial Sequence
  derived and/or modified sequence
atggccggcctgaccgccgccgcccccagacccggcgtgctgctgctgctgctgagcatcctgcaccccagcagacccggcggcgtgcccggcgccatccccggcggcgtgcccggcggcgtgttctaccccggcgccggcctgggcgccctgggcggcggcgccctgggccccggcggcaagcccctgaagcccgtgcccggcggcctggccggcgccggcctgggcgccggcctgggcgccttccccgccgtgaccttccccggcgccctggtgcccggcggcgtggccgacgccgccgccgcctacaaggccgccaaggccggcgccggcctgggcggcgtgcccggcgtgggcggcctgggcgtgagcgccggcgccgtggtgccccagcccggcgccggcgtgaagcccggcaaggtgcccggcgtgggcggcgccttcgccggcatccccggcgtgggccccttcggcggcccccagcccggcgtgcccctgggctaccccatcaaggcccccaagctgccctag

SEQ ID NO: 99358 - DNA, 1992 bp, Artificial Sequence
  derived and/or modified sequence
atggccggcctgaccgccgccgcccccagacccggcgtgctgctgctgctgctgagcatcctgcaccccagcagacccggcggcgtgcccggcgccatccccggcggcgtgcccggcggcgtgttctaccccggcgccggcctgggcgccctgggcggcggcgccctgggccccggcggcaagcccctgaagcccgtgcccggcggcctggccggcgccggcctgggcgccggcgccggcctgggcggcgtgcccggcgtgggcggcctgggcgtgagcgccggcgccgtggtgccccagcccggcgccggcgtgaagcccggcaaggtgcccggcgtgggcctgcccggcgtgtaccccggcggcgtgctgcccggcgccagattccccggcgtgggcgtgctgcccggcgtgcccaccggcgccggcgtgaagcccaaggcccccggcgtgggcggcgccttcgccggcatccccggcgtgggccccttcggcggcccccagcccggcgtgcccctgggctaccccatcaaggcccccaagctgcccggcggctacggcctgccctacaccaccggcaagctgccctacggctacggccccggcggcgtggccggcgccgccggcaaggccggctaccccaccggcaccggcgtgggcccccaggccgccgccgccgccgccgccaaggccgccgccaagttcggcgccggcgccgccggcgtgctgcccggcgtgggcggcgccggcgtgcccggcgtgcccggcgccatccccggcatcggcggcatcgccggcgtgggcacccccgccgccgccgccgccgccgccgccgccgccaaggccgccaagtacggcgccgccgccggcctggtgcccggcggccccggcttcggccccggcgtggtgggcgtgcccggcgccggcgtgcccggcgtgggcgtgcccggcgccggcatccccgtggtgcccggcgccggcatccccggcgccgccgtgcccggcgtggtgagccccgaggccgccgccaaggccgccgccaaggccgccaagtacggcgccagacccggcgtgggcgtgggcggcatccccacctacggcgtgggcgccggcggcttccccggcttcggcgtgggcgtgggcggcatccccggcgtggccggcgtgcccggcgtgggcggcgtgcccggcgtgggcggcgtgcccggcgtgggcatcagccccgaggcccaggccgccgccgccgccaaggccgccaagtacggcgtgggcacccccgccgccgccgccgccaaggccgccgccaaggccgcccagttcggcctggtgcccggcgtgggcgtggcccccggcgtgggcgtggcccccggcatcggccccggcggcgtggccgccgccgccaagagcgccgccaaggtggccgccaaggcccagctgagagccgccgccggcctgggcgccggcatccccggcctgggcgtgggcgtgggcgtgcccggcctgggcgtgggcgccggcgtgcccggcctgggcgtgggcgccggcgtgcccggcttcggcgccgtgcccggcgccctggccgccgccaaggccgccaagtacggcgccgccgtgcccggcgtgctgggcggcctgggcgccctgggcggcgtgggcatccccggcggcgtggtgggcgccggccccgccgccgccgccgccgccgccaaggccgccgccaaggccgcccagttcggcctggtgggcgccgccggcctgggcggcctgggcgtgggcggcctgggcgtgcccggcgtgggcggcctgggcggcatcccccccgccgccgccgccaaggccgccaagtacggcgccgccggcctgggcggcgtgctgggcggcgccggccagttccccctgggcggcgtggccgccagacccggcttcggcctgagccccatcttccccggcggcgcctgcctgggcaaggcctgcggcagaaagagaaagtag

SEQ ID NO: 99359 - DNA, 2121 bp, Artificial Sequence
  derived and/or modified sequence
atggccggcctgaccgccgccgcccccagacccggcgtgctgctgctgctgctgagcatcctgcaccccagcagacccggcggcgtgcccggcgccatccccggcggcgtgcccggcggcgtgttctaccccggcgccggcctgggcgccctgggcggcggcgccctgggccccggcggcaagcccctgaagcccgtgcccggcggcctggccggcgccggcctgggcgccggcctgggcgccttccccgccgtgaccttccccggcgccctggtgcccggcggcgtggccgacgccgccgccgcctacaaggccgccaaggccggcgccggcctgggcggcgtgcccggcgtgggcggcctgggcgtgagcgccggcgccgtggtgccccagcccggcgccggcgtgaagcccggcaaggtgcccggcgtgggcctgcccggcgtgtaccccggcggcgtgctgcccggcgccagattccccggcgtgggcgtgctgcccggcgtgcccaccggcgccggcgtgaagcccaaggcccccggcgtgggcggcgccttcgccggcatccccggcgtgggccccttcggcggcccccagcccggcgtgcccctgggctaccccatcaaggcccccaagctgcccggcggctacggcctgccctacaccaccggcaagctgccctacggctacggccccggcggcgtggccggcgccgccggcaaggccggctaccccaccggcaccggcgtgggcccccaggccgccgccgccgccgccgccaaggccgccgccaagttcggcgccggcgccgccggcgtgctgcccggcgtgggcggcgccggcgtgcccggcgtgcccggcgccatccccggcatcggcggcatcgccggcgtgggcacccccgccgccgccgccgccgccgccgccgccgccaaggccgccaagtacggcgccgccgccggcctggtgcccggcggccccggcttcggccccggcgtggtgggcgtgcccggcgccggcgtgcccggcgtgggcgtgcccggcgccggcatccccgtggtgcccggcgccggcatccccggcgccgccgtgcccggcgtggtgagccccgaggccgccgccaaggccgccgccaaggccgccaagtacggcgccagacccggcgtgggcgtgggcggcatccccacctacggcgtgggcgccggcggcttccccggcttcggcgtgggcgtgggcggcatccccggcgtggccggcgtgcccggcgtgggcggcgtgcccggcgtgggcggcgtgcccggcgtgggcatcagccccgaggcccaggccgccgccgccgccaaggccgccaagtacggcgtgggcacccccgccgccgccgccgccaaggccgccgccaaggccgcccagttcggcctggtgcccggcgtgggcgtggcccccggcgtgggcgtggcccccggcgtgggcgtggcccccggcgtgggcctggcccccggcgtgggcgtggcccccggcgtgggcgtggcccccggcgtgggcgtggcccccggcatcggccccggcggcgtggccgccgccgccaagagcgccgccaaggtggccgccaaggcccagctgagagccgccgccggcctgggcgccggcatccccggcctgggcgtgggcgtgggcgtgcccggcctgggcgtgggcgccggcgtgcccggcctgggcgtgggcgccggcgtgcccggcttcggcgccgtgcccggcgccctggccgccgccaaggccgccaagtacggcgccgccgtgcccggcgtgctgggcggcctgggcgccctgggcggcgtgggcatccccggcggcgtggtgggcgccggccccgccgccgccgccgccgccgccaaggccgccgccaaggccgcccagttcggcctggtgggcgccgccggcctgggcggcctgggcgtgggcggcctgggcgtgcccggcgtgggcggcctgggcggcatcccccccgccgccgccgccaaggccgccaagtacggcgtggccgccagacccggcttcggcctgagccccatcttccccggcggcgcctgcctgggcaaggcctgcggcagaaagagaaagtag

SEQ ID NO: 99360 - DNA, 2145 bp, Artificial Sequence
  derived and/or modified sequence
atggccggcctgaccgccgccgcccccagacccggcgtgctgctgctgctgctgagcatcctgcaccccagcagacccggcggcgtgcccggcgccatccccggcggcgtgcccggcggcgtgttctaccccgccctgggccccggcggcaagcccctgaagcccgtgcccggcggcctggccggcgccggcctgggcgccggcctgggcgccttccccgccgtgaccttccccggcgccctggtgcccggcggcgtggccgacgccgccgccgcctacaaggccgccaaggccggcgccggcctgggcggcgtgcccggcgtgggcggcctgggcgtgagcgccggcgccgtggtgccccagcccggcgccggcgtgaagcccggcaaggtgcccggcgtgggcctgcccggcgtgtaccccggcggcgtgctgcccggcgccagattccccggcgtgggcgtgctgcccggcgtgcccaccggcgccggcgtgaagcccaaggcccccggcgtgggcggcgccttcgccggcatccccggcgtgggccccttcggcggcccccagcccggcgtgcccctgggctaccccatcaaggcccccaagctgcccggcggctacggcctgccctacaccaccggcaagctgccctacggctacggccccggcggcgtggccggcgccgccggcaaggccggctaccccaccggcaccggcgtgggcccccaggccgccgccgccgccgccgccaaggccgccgccaagttcggcgccggcgccgccggcgtgctgcccggcgtgggcggcgccggcgtgcccggcgtgcccggcgccatccccggcatcggcggcatcgccggcgtgggcacccccgccgccgccgccgccgccgccgccgccgccaaggccgccaagtacggcgccgccgccggcctggtgcccggcggccccggcttcggccccggcgtggtgggcgtgcccggcgccggcgtgcccggcgtgggcgtgcccggcgccggcatccccgtggtgcccggcgccggcatccccggcgccgccgtgcccggcgtggtgagccccgaggccgccgccaaggccgccgccaaggccgccaagtacggcgccagacccggcgtgggcgtgggcggcatccccacctacggcgtgggcgccggcggcttccccggcttcggcgtgggcgtgggcggcatccccggcgtggccggcgtgcccggcgtgggcggcgtgcccggcgtgggcggcgtgcccggcgtgggcatcagccccgaggcccaggccgccgccgccgccaaggccgccaagtacggcgtgggcacccccgccgccgccgccgccaaggccgccgccaaggccgcccagttcggcctggtgcccggcgtgggcgtggcccccggcgtgggcgtggcccccggcgtgggcgtggcccccggcgtgggcctggcccccggcgtgggcgtggcccccggcgtgggcgtggcccccggcgtgggcgtggcccccggcatcggccccggcggcgtggccgccgccgccaagagcgccgccaaggtggccgccaaggcccagctgagagccgccgccggcctgggcgccggcatccccggcctgggcgtgggcgtgggcgtgcccggcctgggcgtgggcgccggcgtgcccggcctgggcgtgggcgccggcgtgcccggcttcggcgccgtgcccggcgccctggccgccgccaaggccgccaagtacggcgccgccgtgcccggcgtgctgggcggcctgggcgccctgggcggcgtgggcatccccggcggcgtggtgggcgccggccccgccgccgccgccgccgccgccaaggccgccgccaaggccgcccagttcggcctggtgggcgccgccggcctgggcggcctgggcgtgggcggcctgggcgtgcccggcgtgggcggcctgggcggcatcccccccgccgccgccgccaaggccgccaagtacggcgccgccggcctgggcggcgtgctgggcggcgccggccagttccccctgggcggcgtggccgccagacccggcttcggcctgagccccatcttccccggcggcgcctgcctgggcaaggcctgcggcagaaagagaaagtag

SEQ ID NO: 99361 - DNA, 2175 bp, Artificial Sequence
  derived and/or modified sequence
atggcagggctgaccgccgccgcacctcggcccggtgtcctcttgctcctgctgagcattctgcacccttctagacccgggggagttcccggcgctattccaggcggagtgccaggaggagtgttctatcccggggccggcctgggggccctcggcggcggagctctcgggccaggaggaaaacccctaaagcccgtccccggcgggctggctggtgcaggtctgggggccggactcggagccttcccggccgtcacattccccggggcactagtcccgggtggcgtcgccgacgccgcggcggcttacaaagcggctaaggccggcgcgggcctgggcggtgtaccaggcgtggggggtcttggcgtgtcagcaggtgcagtggtgccacagcctggagccggcgtcaagccagggaaggtgcctggtgtgggactccctggggtgtatcctgggggcgtgctcccgggagctagatttccgggggtgggggtcctccctggtgtgcccacaggcgcgggcgtaaagcccaaagctcctggtgtggggggcgcatttgcagggatcccaggcgtggggccgttcggaggtccccagcctggagtgccccttggatatcccataaaggctcccaagctgcctggcggttatggcctcccgtatacgacgggcaaactgccttacggatatggacccgggggggtggctggcgcggctgggaaggctggatatcccactgggaccggcgtgggtccgcaggctgccgccgctgcggcggcaaaggcggccgcaaagttcggggcaggggccgctggtgtgcttcctggggtcggtggagccggcgtgcccggtgtgccgggggcaatccctggaattggaggaatcgccggcgtgggcactcccgcagcagctgccgctgccgcggcagctgccaaagcggcaaaatacggagccgcagccggcctcgttccaggcggacccggcttcgggcctggcgtcgtgggcgttcctggcgcaggcgtcccaggagtcggtgtgcccggcgccgggatccccgtggtgcccggcgccggcattcctggcgcagccgtgccgggagtagtgtcccccgaggctgctgccaaggctgccgcaaaggcggcaaagtatggagcccgaccaggcgtgggcgttggcgggatccctacatacggggttggagctggcgggttccccggcttcggcgtgggcgtgggaggcatcccaggtgtggccggggtgcctggcgttggcggtgtgcccggagtgggaggggttcctggagttggaatctcccccgaagctcaggctgcagctgctgccaaagcagcaaagtacggcgttggcacccctgcagcagcagccgcaaaggccgcagcaaaggcagcacagttcggcctggtgcccggagtcggtgtggctcctggcgtcggcgtcgcacccggcgtaggcgtagctccgggggttggattggctcctggtgtgggggtggccccaggagtcggtgtggcaccgggagttggagtagctcccggcattgggcctgggggagtggcagcggctgccaagtcggccgcgaaggtggcagctaaagcccaacttcgggccgccgcaggcttgggtgctggcattccaggcctaggcgtgggagtgggagtcccaggactgggagtgggggcaggcgtgcctggactcggagtgggtgccggcgtgcctgggttcggagccgtgcccggtgcccttgctgccgccaaggcagcgaaatatggcgccgccgtcccgggagtcctagggggattaggcgccctgggcggcgtgggcatacctgggggtgtggtgggagctggtccggcggccgctgctgcagccgccaaggccgctgctaaggcagcccaatttgggcttgtgggcgccgccggcttaggcgggctcggagtgggcgggcttggagtgccgggagtgggggggctggggggtattcccccagccgcggcagcgaaggcagctaagtatggtgcagccggactgggtggcgtgcttggcggagctggtcagttccccctgggtggtgtcgcagcccggccaggcttcggactttctcccatttttcccggcggcgcttgccttggaaaagcatgcggccgaaaacggaagtag

SEQ ID NO: 99362 - DNA, 2274 bp, Artificial Sequence
  derived and/or modified sequence
atggcagggctgaccgctgctgcccctagaccaggagtcctgctgctcctgctgagcatattgcacccctcgagacccggaggtgtacctggagccataccaggtggtgttcccggcggcgtgttttatccgggggctggcttgggagctcttggaggcggggccctgggaccgggaggaaagcctctaaagcccgtgcccggtggtcttgctggcgccggtttaggagccggacttggagctttccctgccgtaacattccctggcgctctcgtgcccggcggcgtggccgatgccgccgccgcatataaagccgccaaggccggtgcaggcctaggtggggttcccggcgtggggggactgggcgtctccgcaggcgctgttgtgccccagccaggcgccggtgtgaagcctggaaaggtcccaggtgttggtctcccgggcgtgtatccaggtggtgtactccctggagcaagatttcctggggtgggtgtgttaccaggcgtgccaacaggcgctggggtcaagcccaaagcacctggcgttggtggagccttcgccgggattccgggggtgggcccctttggcgggccacaaccaggggttcccctggggtatccgattaaggctcctaaactgcccggtggctatgggctcccatatacgacaggtaagctgccctacggatacggtcccggcggagtggcaggggcagctgggaaggctggctatcccaccggtactggggtggggccgcaggctgccgccgctgcagcggctaaggccgcagctaaattcggcgccggggccgcgggcgtactgcccggagtagggggggccggtgtccctggggtgcctggagcgattccgggaatcggagggattgctggtgtgggaactcccgcagccgcggcggctgcagcagctgccgctaaggcggctaaatatggagccgccgccgggctcgtgcccgggggacccggcttcgggccaggagtggtgggtgtacccggtgctggagtgcctggcgtgggcgttccaggcgctgggattccggttgttcctggcgctggcatccccggggccgccgtgcccggagtcgtgagccccgaagccgctgccaaggccgcagcgaaggctgccaagtacggagcaaggcctggagtcggtgttggcggaattccaacgtacggggtgggagctggagggttcccggggtttggcgtgggggtggggggcattcccggggtggctggtgtgccaggtgtcggcggtgtgcccggggtggggggtgttcctggcgtgggaatatctcccgaggcccaggctgccgctgcggccaaggctgctaaatacggagttggcacacccgccgccgcagccgccaaggctgccgcaaaagctgcacagttcgggctggtacctggagtcggggttgctcctggcgttggggttgcgcccggagtcggcgttgcaccgggagtgggactcgcacccggtgtcggcgtggcccctggggtcggggtagctccaggagtaggcgttgcgccgggcatcggccctggcggggtcgccgccgctgccaagtctgctgccaaagtggcagctaaagcacagttgagggcggctgcaggtctgggcgcaggaattccagggctcggcgttggcgttggcgtaccaggcctgggcgtgggggcaggtgtaccaggattaggagtcggcgccggagtccctggcttcggagccggggccgatgagggcgtccggcgctcccttagtcctgagttacgggagggcgatccctctagctcccagcatctgccaagcaccccctcaagtcctcgcgtgcctggcgccctggctgccgccaaagccgcgaagtacggggccgcggtccctggcgtgcttggtggcctcggcgccctgggtggtgtgggaatccccggcggcgtcgtcggagcaggccctgcggccgctgcggctgcagcgaaggctgcagccaaagctgctcaattcggtctggtcggcgccgcgggtctgggtggtctaggtgtcggaggcctcggagtgccaggcgtgggggggttaggcgggattccgccggctgccgccgccaaggcagccaagtatggtgccgcaggtttgggcggagtgctggggggggcagggcagtttcctctgggcggcgttgccgctaggcccggattcgggctcagtccaattttccctgggggcgcctgccttggcaaggcttgcggccggaaaagaaagtag

SEQ ID NO: 99363 - DNA, 2136 bp, Artificial Sequence
  derived and/or modified sequence
atggccggtctgaccgccgctgcacctagacccggcgtgctgctccttctgctgagcattttgcatccgagcagacccggcggagttcctggggccatcccgggcggggtcccgggcggcgtgttctacccaggcgctggtttaggggccctgggcggaggcgctctggggccgggcggcaagcccctcaagcccgttcccgggggactggccggtgctggcttgggtgccggcctaggtgccttcccggcagttacatttcccggagcactagtgccgggtggagtggccgatgccgctgctgcatataaggccgcaaaggcaggtgccgggctcgggggtgttccaggcgtgggggggcttggggtgtctgcagcgcctagcgtgccaggggcagtggtgccacagcccggggcgggcgtaaaacccgggaaagtgcccggcgtcggcctgcctggcgtctaccctggcggcgtgctgcccggagcacgattcccaggagtcggggttttacctggagtgccaacaggagctggagttaagcctaaagcacctggagttggtggggctttcgcgggcattcccggtgtgggaccattcgggggaccgcaaccaggagttccgctgggctatcccattaaagcaccaaagctgccaggcggctacggccttccatacaccaccggcaagctaccctacggatacggcccgggcggggtggcaggtgctgccggtaaggcaggctatcctactggcaccggagtggggccccaggccgccgcagcagctgcagcaaaggcagccgcaaagtttggcgcaggagctgcaggagttctccctggggtaggtggagcgggagtgccgggggtgccgggagccatccccggcatcggcggcatcgcaggtgtgggtacccctgctgcagctgccgcagccgcggctgccgccaaagcagctaagtatggcgcggctgccgggctggtacccggaggtccaggctttggccccggagtggtgggcgtgcccggcgccggcgtgcctggggtgggcgtaccgggagccggaattcccgtggttcccggggccggaatcccaggcgctgctgtcccgggcgtggtaagccccgaggccgcggccaaagcagcggccaaggccgccaaatatggggcaagaccaggcgtcggtgtgggagggatccctacgtatggcgttggagctggcggattccctggattcggagtcggcgtcggtgggatccccggtgtggcaggagtgccgggtgttggaggcgtacctggcgtgggaggggtcccaggagtgggaatctctccggaagcccaagccgctgcagctgcaaaagctgccaagtacggagttgggactcctgctgctgctgcagcaaaagctgctgcgaaagcagcccagttcggtctggtgccaggggtcggggtggccccaggagtcggagtcgcaccaggagtcggcgtcgcacctggcgtgggattggcccccggcgttggagtggctcctggtgtcggtgtcgcgccaggggtgggagtggcgccgggtatcggtccaggcggcgtcgccgcagcggcaaagtccgctgcgaaggtggctgccaaagcacagcttagggccgccgccggcctgggagcaggcattcccggcctgggtgtgggggtgggcgtgccaggcctaggtgtcggcgccggggttcccgggcttggagtcggagccggggttcctgggttcggcgcagtacccggagctttggcagccgcgaaggccgctaagtacggcgcagccgtgcccggagtgttaggaggattaggtgccctgggtggagttgggatacctgggggcgtcgtgggtgcaggacccgccgccgccgcagccgctgctaaggccgccgcaaaagcagcgcagttcggcctcgtgggtgctgccgggctcggtggccttggagtcggcggcctgggagtccctggagtcggcggtctgggggggattccacccgccgccgcggctaaagctgcaaaatacggggtcgctgcacgccctggcttcggactctcgcccatcttcccagggggtgcttgcctgggaaaggcctgtgggcgcaagagaaagtag

SEQ ID NO: 99364 - DNA, 2379 bp, Artificial Sequence
  derived and/or modified sequence
atggcgggcctgaccgccgctgcaccacgacctggtgttctgttgctcctcctgagcattttgcacccatcccggcctggaggagttcccggcgctatccccgggggcgtgcccggaggtgtgttctaccccggggcaggtctgggcgccctgggggggggagcactgggacctggcggcaagcctctcaaacctgttcccggcggccttgcgggggcggggttgggcgccggcttgggggccttcccggccgtgacatttcctggcgctttggtgcccgggggggtagcagatgctgcagctgcatataaggctgccaaagccggcgcaggcttggggggcgtaccaggggtggggggactgggcgtcagcgccggagccgtggtcccgcagccaggcgcgggcgtaaaaccagggaaagtgcccggcgtgggactgcccggggtctatcccgggggcgtcctgcctggtgctcgctttcctggggttggcgtcctccccggcgttcccaccggcgcaggcgtaaaacctaaagcccctggcgtcggtggtgcttttgcaggaattcctggagtcgggccattcggtggccctcaacctggcgtgccgcttggctacccgattaaggcacccaagctgcccggcggctacggattgccgtacacaacagggaagcttccatatggctacggacccggaggcgttgccggggctgcaggcaaggcgggctatcctaccggtactggggttggaccacaagctgcagctgccgctgctgcaaaagctgctgccaagtttggcgctggagctgccggagtcctgcctggcgttggaggggccggcgttccgggtgtgccaggtgcaattccaggaataggtgggatagctggagtgggcactcctgcagccgctgccgccgcagcagcagccgcaaaagctgcgaagtatggggctgctgccggccttgttccaggcgggcccggatttggacccggcgtggtcggcgtccccggcgccggggtgccgggcgtcggcgtgccgggcgccggaataccggtagtgcccggggcgggtattcccggcgcagccgtccccggtgtcgtatcacccgaagccgccgccaaggccgccgccaaagctgccaagtacggggctaggccaggagttggcgtcggtggaatcccaacttacggagtgggcgccggtgggttcccaggatttggcgtgggggtggggggaattccaggcgtcgctggagtccctggcgtaggaggtgtacccggagttggcggtgtacccggcgtcggcataagcccggaggcccaggctgccgccgcagccaaagcagccaaatacggcgccgctggtgcaggcgttcttgggggcctagtgcccggcgcacctggcgctgtccctggtgtacctggtaccggtggagtccccggagtcggcacgccagcggccgcagccgctaaggcagctgcaaaggccgctcagtttgcactgcttaatctcgcagggctggtaccaggagtgggcgttgcaccaggggtgggtgtggcacccggggtcggtgtggctcccggcgttggtcttgcacctggggtgggggtagctcctggtgtcggagtggcccccggagttggggtggcccccggaatcggcccgggaggtgtggccgcagctgcaaagtccgcggcaaaggtggcggccaaggctcagcttcgcgccgccgcggggctgggcgctgggatccccggtctgggagtgggcgttggcgtccccggactcggcgtgggcgcgggggtccccggactgggagtaggggctggcgtgcctggcttcggcgctggggctgatgagggcgtacgtcggtctctgtccccagagctcagagaaggagacccaagtagcagtcagcacctccccagtacgccctcatcccccagggttcctggcgcccttgccgcagctaaggctgctaagtatggagccgcagttccgggcgtgttaggtggcctgggcgcactcggaggcgtgggaattcctggaggggttgtcggcgccgggccagctgcggcggctgccgcggccaaggcggccgccaaggcggctcagttcggattggtaggggctgccggcctcggtggccttggagttggcgggctgggcgttcctggagtggggggacttggagggatcccacctgccgccgccgctaaagcagcaaaatacggggcggctgggttgggaggcgtgctgggtggcgctggacagtttcctctcggtggcgtcgccgccagaccggggttcggattgagccctatattcccgggtggtgcttgtttaggtaaggcttgcggccggaaaagaaagtag

SEQ ID NO: 99365 - DNA, 2034 bp, Artificial Sequence
  derived and/or modified sequence
atggcagggctgactgcagcggccccccgaccaggtgttcttttgctgctgctgagcatcctccacccctcccggcctggtggagtacccggcgcaatccctgggggggtgcctggcggcgtgttctatcccgctctgggtcccggcgggaaacccctaaagccagttcccgggggtctggccggagccggcctgggagctggcctcggcgcttttcccgctgtcactttcccaggggcactggtccccgggggcgtggctgatgctgccgccgcctataaggctgctaaggctggggccggactgggtggggtgcccggggtggggggcctgggcgtatctgccggcgctgtggtcccccagccaggtgctggagtaaaaccaggcaaagtgccaggtgtaggactcccaggtgtgtaccccgggggcgtgctgcccggtgcgagattccccggggttggcgtgttacctggcgtcccaaccggagcaggggtgaagccaaaggcccccggcgttggtggcgcattcgcaggcatacctggggtcgggcctttcgggggcccacagccaggggtcccattgggttatccgataaaagctcccaaactgccaggaggatacgggctcccttatacaactggcaagctaccatatgggtacgggcctgggggcgtggccggcgctgccggaaaggccggctatccgactgggacgggtgttgggccacaggcagccgccgccgccgccgcgaaagctgctgcaaagtttggagccggtgcagctggggtcttgcctggggtgggtggggccggcgtgcctggcgttccaggcgccatccctggcatcggtggtatcgcaggcgttggaacaccagccgctgccgcggccgctgccgccgccgctaaagcagccaagtacggagcggcggccggcctggtccctggagggccaggatttgggcccggcgtcgtgggagtgccgggcgccggcgtgcctggcgtgggcgtgccaggagctgggataccagtcgttcctggggcggggattccaggcgcagcagtccccggggttgtcagtccagaggcagcagccaaggccgcagctaaggcagcaaagtacggagcaagaccaggggtgggggtgggaggcattccaacatatggggtgggggccggcggattcccaggcttcggcgtgggagtgggaggcattcccggggtggccggcgtgccaggagtgggcggggtgcccggcgtcggcggtgttccaggcgttggtatcagccctgaggcgcaggcggcagccgcggcgaaagctgccaagtatggtctcgtgcctggcgtcggcgttgctccaggggtcggggtggcccctggcgttggggtggctccaggagttgggctggccccgggggttggcgtcgcgccgggggtgggagtggcacccggagtgggcgtagcgccaggcatcggaccaggcggagtggctgccgcagccaaatctgcagcgaaggttgccgcaaaagctcaactgagagctgcagcgggcctgggggctggaattccgggcctgggcgtcggggtgggggtgccgggactgggtgtgggggcaggagtacccgggctcggcgtgggagctggggtcccggggttcggcgctgtacctggtgcactggctgctgcaaaagctgcaaagtacggagccgcagttcccggcgtcctggggggcctcggagcgttggggggcgtgggcataccaggaggtgtggtgggcgctggccctgccgccgcggcggctgccgcaaaggctgccgccaaggctgcccagttcgggcttgtgggggccgccggcctgggagggttaggggttggtggcctgggagtccctggcgtgggaggactgggcgggattccacccgcagctgcagctaaagcggctaagtatggcgttgctgcacgccctggattcggtctgtctcccatctttcctggcggcgcttgcttgggtaaagcctgcggacggaaaaggaaatag

SEQ ID NO: 99366 - DNA, 2118 bp, Artificial Sequence
  derived and/or modified sequence
atggccggcctgaccgccgctgcccccaggcccggtgtcttactccttctcctttcaatcttgcaccctagtcggccaggaggggttccgggcgctataccaggcggtgtccccggtggcgtcttctaccccggggctggcttgggagccttagggggtggcgcactaggcccgggcggcaagcccctcaaaccagtccctgggggcctggcgggagccggcctgggtgccgggttaggagctttcccagccgtgaccttcccgggggctttggtgcccgggggtgtggccgatgccgccgctgcatacaaagcagccaaggcgggcgccggcttaggaggagtgcctggtgtgggcggactgggggtgagtgctggcgctgtcgttccacagccgggagccggcgtaaaacccggcaaagtgcccggtgtcggactaccaggcgtctacccgggcggagtgttgcccggtgcccgctttcccggcgtgggcgtgctgcctggagtgcctacgggggcaggagtaaaacccaaggctcctggtgtgggaggagcctttgctggtatccccggagtcggaccttttggcggccctcaacctggggtgccgttaggataccccatcaaagcccccaagctgcctggcggctacggcctgccatacactacagggaaacttccctatggttacggcccaggaggagttgcaggtgcagccggtaaagcaggctaccctaccgggacgggcgtgggtccacaggccgcggccgctgccgcagccaaggccgccgcaaagtttggggcaggtgcagctggtgtgctcccaggcgtggggggcgcaggagtgccaggagtgccaggcgccattccaggaatcggtgggatcgcgggagtgggaacacctgcagcagctgctgccgctgctgccgcggcaaaggccgccaaatatggggcagctgctggattggtgcctggtggacctgggtttggaccgggcgtggtgggcgtgcctggtgctggggttcctggcgtgggcgtccccggagcaggcatcccggtggtcccgggcgcaggaataccaggggctgcagtacctggcgttgtgtcacccgaagccgcggccaaagctgcagccaaagctgccaagtacggagccaggcctggtgttggtgtgggaggcattcctacatatggcgtgggggccgggggcttccccgggttcggtgtaggggtcgggggaatccctggcgtggccggggtgccaggtgttgggggcgtaccaggagtaggaggtgtccctggagtggggattagtccagaagcccaggcagccgcggctgcgaaggctgccaaatatgggctcgtcccgggggtgggggtggccccaggagtgggtgtcgcccctggtgtcggggtcgcaccaggggtaggcctagcccctggggtcggcgtggcacccggcgtcggcgtagcacctggcgtcggcgtagcccctgggattgggccaggcggcgtggcggccgccgccaagagcgccgcgaaagtcgcagctaaggctcagcttagggctgcagccggactgggtgctggtatccccggtctaggggtgggggtgggcgtgcctggtctaggcgttggcgccggagtccccggtttgggggttggtgcaggggtgcctggttttggcgcagttccaggcgctctggccgccgccaaagctgcaaagtacggggcagctgttcctggggtactgggagggctcggagcattaggcggggtggggattcctggtggggtggtgggcgcaggcccagccgcagcagccgccgccgctaaagccgcggccaaagctgcccaatttggtttggttggagccgccgggctaggtggtcttggcgtcggcggacttggcgtccctggtgtgggcgggctgggtggaatccctccggccgcagctgccaaagctgctaaatacggtgctgccggcctgggcggtgtgctcgggggagctggccagtttcctctaggaggagtcgcagctaggcccggattcggcttgtcccctatcttcccagggggggcatgtcttggaaaagcatgtggacgcaagagaaagtag

SEQ ID NO: 99367 - DNA, 645 bp, Artificial Sequence
  derived and/or modified sequence
atggccggcctgaccgcagccgccccaagaccaggcgtgcttctcctgcttctgtcaatcttgcaccccagccggcctggaggtgttcccggagccatacccggcggggttcctgggggcgtattctaccctggagcggggctaggagctctgggcggaggcgcactgggacctggcggaaagccattaaagccagtccccggtggtctggctggggccggcctcggagcaggactcggcgcttttcctgcagttaccttccccggagcccttgtaccaggcggcgtggctgatgctgctgccgcatacaaggcagccaaggccggagctggtctaggcggagtgcccggtgtggggggtctgggcgtgagcgctggtgcggtggttccacaacctggcgctggcgttaagccagggaaggtacccggtgtgggactgcctggggtctaccccggcggggtactccccggcgtcgggcccttcggcggcccacagcctggcgtaccactgggttacccaatcaaagccccgaagctccctggtgggtatgggctgccttatactacaggcaaactgccatatggctatgggcctggaggtgtagccggcgccgccggtaaagcgggctaccctactggtacttag

SEQ ID NO: 99368 - DNA, 504 bp, Artificial Sequence
  derived and/or modified sequence
atggcaggcttaacagccgccgcaccgaggcccggggtgctgctccttttgctgtcaatcttacacccatctaggcccggcggcgtaccaggggccatccccggaggcgttcctggtggcgtgttctacccaggggccggcctgggggctctgggcggaggcgccctaggtccaggcggaaagccattgaagccggtcccgggcggactggccggcgctgggcttggagcaggtctgggcgcatttcccgccgttacctttcctggcgctttagtgcctggcggtgtcgctgatgcggccgccgcttataaggccgctaaagccggcgtgggcccgtttggggggccccagcctggcgtgcctttgggttatcctataaaagctcccaaactgcctggaggctacgggttaccctacactactggaaagctaccctacgggtacggccctgggggcgtagcaggggccgccggcaaggcaggataccccacaggaactggctag

SEQ ID NO: 99369 - DNA, 507 bp, Artificial Sequence
  derived and/or modified sequence
atggcaggcctcacagctgcagctccccgcccaggggtccttctcctccttctaagtattcttcaccctagcaggcccgggggtgttccaggcgccatacctggtggcgtgcccggaggtgtgttttaccctggtgccggactcggcgctctcggggggggcgccctcggcccaggaggaaagccgctgaagcccggcgtcgggccgttcggaggacctcagccaggggtgccccttgggtatcccatcaaagctcctaaactgcccggctatggccctgggggagtagctggagcagcaggcaaagccggttaccccaccggaacgggtgttggaccgcaggcagcagctgccgccgccgcaaaggctgccgcaaaatttggcgcaggcgctgccggcgttctccccggagtaggcggtgctggcgtgccgggagtgccaggcgctatcccaggcatcggagggattgcaggagttgggactcccgcagcagccgccgccgcttag

SEQ ID NO: 99370 - DNA, 885 bp, Artificial Sequence
  derived and/or modified sequence
atggcaggactgacagcagccgctccgcgacctggcgtcctcctgctcctgctctcaatcctgcacccctctcgccccggaggcgtgcctggcgcaataccaggaggggtccctggcggggtgttctatcccggggccggcttgggtgcactcggcgggggggcacttggcccaggaggcaagcccctcaagcccggattgggcgctttcccagccgtgacattcccaggtgccctggtgcctggtggcgttgccgacgctgctgccgcttacaaggcagcgaaagctggcgcgggtctggggggggtgcctggggttgggggcttgggcgtttcagcaggcgccgtcgtaccccagcccggcgccggagtcaaacccggtaaagtccctggtgttgggttgcctggggtctatccgggcggcgtgctgccaggtgccagattccccggggtcggtgtactcccaggagtacccacaggggctggcgtgaaacccaaagcacctggtgtgggcccctttggtggacctcagcctggggtacccttaggataccccattaaggcgcctaagctgcccggtggttatggcctgccctacacaaccggtaagctgccatatgggtacggccccgggggagttgctggggcggcaggcaaggccggctatcccactggcacgggcgtgggaccccaggcagccgctgcagctgctgcgaaagcggcagccaagttcggcgcaggagccgcaggcgtccttcctggggtgggcggcgcaggggtgcccggagtgcccggcgccataccgggcattggtgggatcgcaggcgtcggcactcccgctgcggccgccgctgccgccgcggctgcaaaggcggcaaagtactag

SEQ ID NO: 99371 - DNA, 531 bp, Artificial Sequence
  derived and/or modified sequence
atggccggcctgacagccgccgcccctcgtccaggggtgttactcctgctcctctctatcctccatccgtcacgtcctggtggcgttccaggggccattcctggaggagtcccaggcggagtcttttatcccggagccggcctgggtgctctaggtggcggagccctggggccgggcggaaagcctcttaagccagtcccaggggggctggctggagcgggcctcggggctggactgggcgcattcccggcagttacctttcccggagccctggtccccgggggtgtggcagacgccgcggcagcctataaagccgctaaagccggggctggactgggtggcgtgcccggagttggcggcttgggggtcagcgcaggtgccgttgtgccccagcccggggcaggcgttaagcctgggaaggtgcccggagtcggaggggcttttgctgggatccccggggttgggcccttcggcgggccccagcctggcgttcctctcggctaccccataaaggcccccaaactcccttag

SEQ ID NO: 99372 - DNA, 1992 bp, Artificial Sequence
  derived and/or modified sequence
atggccggcctgacagcagctgcgcctaggcccggagtgctactgctgctgctcagcatacttcatccaagccgaccaggcggcgtgccaggggcaatccctggcggggtgccaggcggcgtcttctaccctggggccgggttgggcgccttgggaggaggggctctgggacctggtggcaaacctctcaagcccgtgccaggtggactagctggagctggcctgggcgctggcgctggcttggggggcgtgcccggtgtgggcggattaggagtctctgcaggcgcagtagtgcctcagccaggtgcaggcgtcaagcctggcaaggttccaggggtcgggttgcctggagtttatccaggaggagttctccctggtgcccggtttcctggtgtgggcgtgctgcctggagttccgaccggcgccggggtaaagccgaaggcaccaggcgtgggtggcgcattcgccggcattccaggggtaggtccatttgggggcccgcagcccggagtgcccctggggtatcccataaaagcaccgaaactgccaggagggtatgggctgccttacactaccggcaagcttccttatggatatgggcccgggggggttgccggtgcagctggcaaggccggctatcccacaggcacaggtgttgggccccaggctgccgccgccgcagctgccaaggccgcagccaaatttggcgctggtgccgctggtgtgctgcccggggtcgggggggccggagtccctggtgtgcccggggccattcccggcattgggggcatcgctggcgtggggacacctgcagccgcagctgcagctgccgcagctgctaaagccgcaaagtacggggcagcggcaggtctggtgccaggtggacctgggttcggtcccggtgtcgtaggcgtcccaggagcaggcgttccgggggtgggtgtccctggggcaggcatccccgtggttcccggcgcaggtatccccggtgctgccgtgccaggagtggtgtccccagaggccgctgccaaggccgccgcgaaggcagcaaagtacggcgcacgtccaggcgtaggggtcggtggcatccccacctacggagtgggcgccgggggcttccctggcttcggcgtgggcgtgggggggatccctggcgtggcaggcgttccaggcgttgggggtgtgccgggagtgggaggcgtgccaggggtgggtatctcccccgaggcgcaggccgccgccgcagccaaggctgccaagtacggcgtggggacacctgcagcagcagcagctaaggccgcagccaaggccgctcagttcgggctcgtgccaggcgtgggagtggcgccaggcgtcggcgtggcccctggaatcggtcctggcggcgtggccgctgccgctaagagtgccgcaaaggtcgctgcaaaggcccagcttcgcgcagccgctggacttggagccggaattccaggcctgggagtgggggtgggagtccctggcctgggtgtcggcgccggtgtgcccggactcggggtcggagcaggagtgcccggcttcggagcggtccctggcgccctagccgctgcaaaggccgccaagtatggagccgccgtgccgggggtccttgggggacttggcgccttaggtggagtgggcatacccggcggcgttgtcggagccggtcccgccgccgctgccgccgctgctaaagcagctgctaaagcggcccagtttggcctggtaggtgccgccggactcggagggctgggagtggggggcctcggggtccctggcgtgggtgggctgggcggaataccacctgccgccgcagcaaaggccgccaagtacggggccgccggtttgggcggtgtactcgggggggccggccaattccctttaggcggagtagctgcgcgacctggttttggactgtcacccatcttccccggcggggcctgcttaggaaaagcatgcggacgtaagcgcaagtag

SEQ ID NO: 99373 - DNA, 2121 bp, Artificial Sequence
  derived and/or modified sequence
atggccggcctgaccgctgccgctccacgtcctggagtgttgctgttactcttgagcattctccacccctctaggcccggtggtgtgcccggcgccattccagggggagttcctggaggggtgttctatcccggcgcgggcctgggagccctggggggcggcgcactcgggcccgggggcaagcccctcaaacctgttccaggtggactggctggcgctggtttaggggccggcctgggcgccttccccgcagtcacgtttccaggcgccttagtgccaggaggggttgccgacgctgctgctgcttataaggctgcgaaggccggagccgggctgggcggagttccaggtgtgggcgggctaggcgtcagtgctggcgctgtggtgccacagcccggagcaggcgtcaaacccggaaaggttcccggagtggggctacccggggtgtaccccggcggggtgctgccaggggcccgttttcctggagtgggggtgctccctggagttccaaccggtgctggagtgaagcccaaggccccgggtgtgggcggcgccttcgccgggatccctggcgtgggtccttttggaggtcctcaacctggagtcccgctcggatatccaattaaagccccaaagctccctggaggttacggacttccctacactactggcaagcttccatatggatatggtccgggcggcgttgccggggcagctggcaaggctggctaccccaccgggaccggcgttggcccccaggccgccgccgctgccgccgcaaaagctgctgcgaaattcggtgccggagccgcaggggtgctcccaggagttggaggggccggtgttcccggagtgcctggcgccatccccggaattgggggtatcgctggcgtgggcacacccgcagcggccgcagccgccgcagccgcagcaaaggccgccaagtacggcgctgccgctggtctcgtcccggggggcccgggcttcggaccaggggtggtaggcgtgcctggagccggagtgcccggcgttggggtgcccggcgccgggatcccagtggtacctggcgccggaattccaggcgctgccgtgccgggcgttgtgtcgccggaggccgccgccaaggcagctgctaaggcagcaaagtacggcgcgagacccggggttggcgtgggaggtatccccacatacggagtgggcgccggcggttttccagggtttggtgttggggtgggtggcatcccgggggttgcaggcgtgcccggggtagggggcgtgcccggagtgggcggagtgccgggcgttggaatcagtcctgaggcccaggcagctgcggctgcaaaggccgcgaaatatggcgtcggcacccccgccgctgccgctgctaaagccgctgccaaggccgctcagttcggactggtgccgggtgtcggggtcgcccccggggtcggggtggcccccggcgtgggcgtggcgccaggagtgggactggctccaggggttggcgtcgctccaggagtcggggtggctcctggtgtgggcgtagcccccggaattggccctgggggtgtggctgctgcggccaaatccgccgcaaaggtagcagccaaggcacaactgcgtgctgccgcaggtttgggagccgggatccccggactgggagtcggcgtgggcgtccccgggctgggggttggagcgggcgtacccggacttggagtaggtgctggggtgcccggtttcggtgcagtgccaggtgccctggctgcagctaaagccgctaaatatggtgcggcagtccctggagtgctggggggactgggcgctctaggaggagtgggcattccaggcggggtggtgggcgcaggaccagcggccgcagcagcggcagctaaagctgccgccaaggcggctcagtttggattagtgggggccgctggtctgggaggtctcggggttggagggctcggagtgccgggcgtcgggggtttgggcgggatacctcctgccgccgccgcaaaggcagctaagtatggcgtggccgcccgtcctggttttgggctaagccctatttttcccggcggcgcctgcctcggaaaagcctgtgggcgtaagaggaagtag

SEQ ID NO: 99374 - DNA, 2145 bp, Artificial Sequence
  derived and/or modified sequence
atggcgggactcacagccgcggcccccagacccggcgtcttactgctgctgctgagcattctccaccctagccgtccgggcggagtgccaggcgccataccggggggcgtgcccggtggggtgttttatcctgccctgggtcctggcggaaaacccctgaagccagtgccaggtggcctggccggcgctgggctcggcgccgggctgggagccttccccgctgtcaccttccccggggcattggtacccggaggtgttgccgacgccgccgccgcttacaaggcagccaaggcaggggctgggttgggcggcgtgccaggagtggggggccttggcgttagcgccggcgctgtcgtcccccagcccggggctggagtcaaacccgggaaggtgccaggcgtggggctgcctggggtatatcctggtggcgttttgcctggggcccgctttcctggcgtcggagttcttcctggggtcccaaccggtgcgggggtgaaaccaaaggcccccggagttggaggcgcattcgccgggataccgggcgtcggaccttttggaggcccacaacctggggtgcctctgggttatcctatcaaagccccgaaactgccgggaggttatggattaccttacaccacaggtaagcttccttacggctacggccccggcggcgtggctggcgccgcaggcaaggccgggtacccgacaggaactggagtgggaccccaggctgctgcagcagctgccgcgaaagcagccgcaaagtttggagccggcgccgccggtgtcctccctggcgtgggtggtgctggagtgcccggggtccccggggcgatcccaggaattggaggtattgcaggcgtcggaacaccagccgccgctgccgcagcggccgccgctgctaaagctgccaagtacggggccgccgccggcctggttcccggagggcccggatttgggcccggtgttgtaggtgtcccaggagcgggtgtcccaggggttggggtcccgggagccggaatccctgtggtgcctggtgccggaattcccggagcggccgtgccaggtgtggtcagtcccgaagcagcggccaaagctgccgctaaagccgcaaagtacggcgctagacctggagtgggcgtcggaggcattccaacatacggggtcggcgccggcggttttcctggattcggcgtgggggtgggaggtatccctggagtggcaggagtgccaggagtcgggggcgtgcccggcgtcggcggagtgccaggcgtgggtatcagtcccgaagcgcaggccgccgctgctgccaaagccgctaaatacggggtcggaacccctgccgccgcggctgccaaagccgcagctaaggcagctcagttcggcctcgtccccggcgttggggtagcaccaggagtcggggtcgctcccggcgttggagttgcccccggcgtgggactcgcgcccggtgttggtgtggctcccggcgtgggcgtagccccaggcgttggggtcgcccccggcattggacccggaggggtcgcagccgcagcgaaatccgccgcaaaagtggccgctaaagcccagcttagggctgccgcagggctaggagccgggattccagggctcggcgtgggggtgggggtgcctggactgggtgtgggggccggagtgcctggcctgggagtgggcgccggggtgccggggttcggcgcagtgcccggagccctggcagctgccaaagccgctaagtatggcgctgccgtgcctggagtattgggcgggcttggcgccctcggtggggtgggcattcctggaggtgttgtcggcgctggccctgcagccgctgccgccgccgcgaaagccgcagcgaaggcggcccaatttggcctggtgggagccgctggcttaggtggactcggggtggggggactaggtgttcccggcgtgggcgggcttggcgggatcccacccgcagcagccgctaaagccgctaaatacggggccgccggtttaggtggcgtattggggggagctgggcagtttcctctcgggggagttgccgcacgtcctggcttcggactgtcaccgatatttccagggggtgcctgtctgggaaaagcctgcgggcggaagcgaaagtag

SEQ ID NO: 99375 - DNA, 2136 bp, Artificial Sequence
  derived and/or modified sequence
atggccggcctgacagctgctgcccccaggcctggggtgctgctgctgctgctgagcatcctgcaccccagcaggcctgggggcgtgcctggggccatccctgggggcgtgcctgggggcgtcttctacccaggggccggcctgggcgccctgggcggcggggccctgggccctgggggcaagcccctgaagcctgtgcctgggggcctggccggggccggcctgggcgccggcctgggcgccttccctgctgtgaccttccctggggccctggtgcctggaggagtggctgatgctgctgctgcctacaaggccgccaaggccggggccggcctgggcggcgtgcctggggtgggcggcctgggcgtgtctgctgcccccagcgtgcctggagctgtggtgccccagcctggagctggggtgaagccaggcaaggtgcctggggtgggcctgcccggggtgtacccaggcggcgtgctgcccggggcccgcttccctggggtgggcgtgctgcccggggtgcccaccggggccggcgtgaagcccaaggcccctggggtgggcggggcctttgctggcatccctggggtgggcccctttggaggcccccagcccggggtgcccctgggctaccccatcaaggcccccaagctgcccggcggctacggcctgccctacaccaccgggaagctgccctacggctacggccctggaggagtggccggggccgccggcaaggccggctaccccactggaactggagtgggcccccaggccgctgctgctgctgctgccaaggccgccgccaagtttggagctggagctgctggggtgctgcccggggtgggcggggccggcgtgcctggggtgcctggggccatccctggcattggaggcattgctggggtgggcaccccagctgctgctgctgctgctgctgctgctgccaaggccgccaagtatggagctgctgctggcctggtgcctgggggccctggcttcggccctggggtggtgggcgtgcctggggccggcgtgcctggggtgggcgtgcctggggccggcatccctgtggtgcctggggccggcatccctggagctgctgtgcctggggtggtgtccccagaggccgccgccaaggccgccgccaaggccgccaagtacggggcccggcctggggtgggcgtgggcggcatccccacctacggcgtgggcgctgggggcttccctggcttcggcgtgggcgtgggcggcatccctggggtggccggcgtgcctggggtgggcggcgtgcctggggtgggcggcgtgcctggggtgggcatcagccctgaggcccaggccgctgctgctgccaaggccgccaagtatggagtgggcaccccagctgctgctgctgccaaggccgccgccaaggccgcccagtttggcctggtgcctggggtgggcgtggcccctggggtgggcgtggcccctggggtgggcgtggcccctggggtgggcctggcccctggggtgggcgtggcccctggggtgggcgtggcccctggggtgggcgtggcccctggcatcggccctgggggcgtggccgccgccgccaagtctgctgccaaggtggccgccaaggcccagctgcgggctgctgctggcctgggcgccggcatccctggcctgggcgtgggcgtgggcgtgcccggcctgggcgtgggcgccggcgtgcccggcctgggcgtgggcgctggggtgcccggctttggagctgtgcctggggccctggccgccgccaaggccgccaagtacggggctgctgtgcctggggtgctgggcggcctgggcgccctgggcggcgtgggcatccctgggggcgtggtgggcgccggccctgctgctgctgctgctgctgccaaggccgccgccaaggccgcccagtttggcctggtgggcgccgccggcctgggcggcctgggcgtgggcggcctgggcgtgcctggggtgggcggcctgggcggcatccccccagctgctgctgccaaggccgccaagtatggagtggccgcccggcccggcttcggcctgagccccatcttccctggaggagcctgcctgggcaaggcctgtggcaggaagaggaagtag

SEQ ID NO: 99376 - DNA, 645 bp, Artificial Sequence
  derived and/or modified sequence
atggccggcctgacagctgctgcccccaggcctggggtgctgctgctgctgctgagcatcctgcaccccagcaggcctgggggcgtgcctggggccatccctgggggcgtgcctgggggcgtcttctacccaggggccggcctgggcgccctgggcggcggggccctgggccctgggggcaagcccctgaagcctgtgcctgggggcctggccggggccggcctgggcgccggcctgggcgccttccctgctgtgaccttccctggggccctggtgcctggaggagtggctgatgctgctgctgcctacaaggccgccaaggccggggccggcctgggcggcgtgcctggggtgggcggcctgggcgtgtctgctggagctgtggtgccccagcccggggccggcgtgaagccaggcaaggtgcctggggtgggcctgcccggggtgtacccaggaggagtgctgcccggggtgggcccctttggaggcccccagcccggggtgcccctgggctaccccatcaaggcccccaagctgcccggcggctacggcctgccctacaccaccgggaagctgccctacggctacggccctgggggcgtggccggggctgctgggaaggccggctaccccaccggcacctag

SEQ ID NO: 99377 - DNA, 504 bp, Artificial Sequence
  derived and/or modified sequence
atggccggcctgacagctgctgcccccaggcctggggtgctgctgctgctgctgagcatcctgcaccccagcaggcctgggggcgtgcctggggccatccctgggggcgtgcctgggggcgtcttctacccaggggccggcctgggcgccctgggcggcggggccctgggccctgggggcaagcccctgaagcctgtgcctgggggcctggccggggccggcctgggcgccggcctgggcgccttccctgctgtgaccttccctggggccctggtgcctggaggagtggctgatgctgctgctgcctacaaggccgccaaggccggcgtgggcccctttggaggcccccagcccggggtgcccctgggctaccccatcaaggcccccaagctgcccggcggctacggcctgccctacaccaccgggaagctgccctacggctacggccctgggggcgtggccggggctgctgggaaggccggctaccccaccggcaccggctag

SEQ ID NO: 99378 - DNA, 2079 bp, Artificial Sequence
  derived and/or modified sequence
atggccggcctgacagctgctgcccccaggcctggggtgctgctgctgctgctgagcatcctgcaccccagcaggcctgggggcgtgcctggggccatccctgggggcgtgcctgggggcgtcttctacccaggggccggcctgggcgccctgggcggcggggccctgggccctgggggcaagcccctgaagcctgtgcctgggggcctggccggggccggcctgggcgccggcctgggcgccttccctgctgtgaccttccctggggccctggtgcctggaggagtggctgatgctgctgctgcctacaaggccgccaaggccggggccggcctgggcggcgtgcctggggtgggcggcctgggcgtgtctgctgcccccagcgtgcctggagctgtggtgccccagcctggagctggggtgaagccaggcaaggtgcctggggtgggcctgcccggggtgtacccaggcggcgtgctgcccggggcccgcttccctggggtgggcgtgctgcccggggtgcccaccggggccggcgtgaagcccaaggcccctggggtgggcggggcctttgctggcatccctggggtgggcccctttggaggcccccagcccggggtgcccctgggctaccccatcaaggcccccaagctgcccggcggctacggcctgccctacaccaccgggaagctgccctacggctacggccctggaggagtggccggggccgccggcaaggccggctaccccactggaactggagtgggcccccaggccgctgctgctgctgctgccaaggccgccgccaagtttggagctggagctgctggggtgctgcccggggtgggcggggccggcgtgcctggggtgcctggggccatccctggcattggaggcattgctggggtgggcaccccagctgctgctgctgctgctgctgctgctgccaaggccgccaagtatggagctgctgctggcctggtgcctgggggccctggcttcggccctggggtggtgggcgtgcctggggccggcgtgcctggggtgggcgtgcctggggccggcatccctgtggtgcctggggccggcatccctggagctgctgtgcctggggtggtgtccccagaggccgccgccaaggccgccgccaaggccgccaagtacggggcccggcctggggtgggcgtgggcggcatccccacctacggcgtgggcgctgggggcttccctggcttcggcgtgggcgtgggcggcatccctggggtggccggcgtgcctggggtgggcggcgtgcctggggtgggcggcgtgcctggggtgggcatcagccctgaggcccaggccgctgctgctgccaaggccgccaagtatggcctggtgcctggggtgggcgtggcccctggggtgggcgtggcccctggggtgggcgtggcccctggggtgggcctggcccctggggtgggcgtggcccctggggtgggcgtggcccctggggtgggcgtggcccctggcatcggccctggaggagtggccgctgctgccaagtctgctgccaaggtggccgccaaggcccagctgcgggctgctgctggcctgggcgccggcatccctggcctgggcgtgggcgtgggcgtgcccggcctgggcgtgggcgctggggtgcccggcctgggcgtgggcgccggcgtgcccggctttggagctgtgcctggggccctggccgccgccaaggccgccaagtatggagctgctgtgcctggggtgctgggcggcctgggcgccctgggcggcgtgggcatccctggaggagtggtgggcgccggccctgctgctgctgctgctgctgccaaggctgctgccaaggccgcccagtttggcctggtgggcgctgctggcctgggcggcctgggcgtgggcggcctgggcgtgcctggggtgggcggcctgggcggcatccccccagctgctgctgccaaggccgccaagtatggagtggccgcccggcccggcttcggcctgagccccatcttccctgggggcgcctgcctgggcaaggcctgtggcaggaagaggaagtag

SEQ ID NO: 99379 - DNA, 507 bp, Artificial Sequence
  derived and/or modified sequence
atggccggcctgacagctgctgcccccaggcctggggtgctgctgctgctgctgagcatcctgcaccccagcaggcctgggggcgtgcctggggccatccctgggggcgtgcctgggggcgtcttctacccaggggccggcctgggcgccctgggcggcggggccctgggccctgggggcaagcccctgaagccaggagtgggcccctttggaggcccccagcccggggtgcccctgggctaccccatcaaggcccccaagctgcccggctacggccctggaggagtggccggggccgccggcaaggccggctaccccactggaactggagtgggcccccaggccgctgctgctgctgctgccaaggccgccgccaagtttggagctggagctgctggggtgctgcccggggtgggcggggccggcgtgcctggggtgcctggggccatccctggcattggaggcattgctggggtgggcaccccagctgctgctgctgctgcctag

SEQ ID NO: 99380 - DNA, 531 bp, Artificial Sequence
  derived and/or modified sequence
atggccggcctgacagctgctgcccccaggcctggggtgctgctgctgctgctgagcatcctgcaccccagcaggcctgggggcgtgcctggggccatccctgggggcgtgcctgggggcgtcttctacccaggggccggcctgggcgccctgggcggcggggccctgggccctgggggcaagcccctgaagcctgtgcctgggggcctggccggggccggcctgggcgccggcctgggcgccttccctgctgtgaccttccctggggccctggtgcctggaggagtggctgatgctgctgctgcctacaaggccgccaaggccggggccggcctgggcggcgtgcctggggtgggcggcctgggcgtgtctgctggagctgtggtgccccagcccggggccggcgtgaagccaggcaaggtgcctggggtgggcggggcctttgctggcatccctggggtgggcccctttggaggcccccagcccggggtgcccctgggctaccccatcaaggcccccaagctgccctag

SEQ ID NO: 99381 - DNA, 1992 bp, Artificial Sequence
  derived and/or modified sequence
atggccggcctgacagctgctgcccccaggcctggggtgctgctgctgctgctgagcatcctgcaccccagcaggcctgggggcgtgcctggggccatccctgggggcgtgcctgggggcgtcttctacccaggggccggcctgggcgccctgggcggcggggccctgggccctgggggcaagcccctgaagcctgtgcctgggggcctggccggggccggcctgggcgctggggccggcctgggcggcgtgcctggggtgggcggcctgggcgtgtctgctggagctgtggtgccccagcctggagctggggtgaagccaggcaaggtgcctggggtgggcctgcccggggtgtacccaggcggcgtgctgcccggggcccgcttccctggggtgggcgtgctgcccggggtgcccaccggggccggcgtgaagcccaaggcccctggggtgggcggggcctttgctggcatccctggggtgggcccctttggaggcccccagcccggggtgcccctgggctaccccatcaaggcccccaagctgcccggcggctacggcctgccctacaccaccgggaagctgccctacggctacggccctggaggagtggccggggccgccggcaaggccggctaccccactggaactggagtgggcccccaggccgctgctgctgctgctgccaaggccgccgccaagtttggagctggagctgctggggtgctgcccggggtgggcggggccggcgtgcctggggtgcctggggccatccctggcattggaggcattgctggggtgggcaccccagctgctgctgctgctgctgctgctgctgccaaggccgccaagtatggagctgctgctggcctggtgcctgggggccctggcttcggccctggggtggtgggcgtgcctggggccggcgtgcctggggtgggcgtgcctggggccggcatccctgtggtgcctggggccggcatccctggagctgctgtgcctggggtggtgtccccagaggccgccgccaaggccgccgccaaggccgccaagtacggggcccggcctggggtgggcgtgggcggcatccccacctacggcgtgggcgctgggggcttccctggcttcggcgtgggcgtgggcggcatccctggggtggccggcgtgcctggggtgggcggcgtgcctggggtgggcggcgtgcctggggtgggcatcagccctgaggcccaggccgctgctgctgccaaggccgccaagtatggagtgggcaccccagctgctgctgctgccaaggccgccgccaaggccgcccagtttggcctggtgcctggggtgggcgtggcccctggggtgggcgtggcccctggcatcggccctgggggcgtggccgccgccgccaagtctgctgccaaggtggccgccaaggcccagctgcgggctgctgctggcctgggcgccggcatccctggcctgggcgtgggcgtgggcgtgcccggcctgggcgtgggcgccggcgtgcccggcctgggcgtgggcgctggggtgcccggctttggagctgtgcctggggccctggccgccgccaaggccgccaagtacggggctgctgtgcctggggtgctgggcggcctgggcgccctgggcggcgtgggcatccctgggggcgtggtgggcgccggccctgctgctgctgctgctgctgccaaggccgccgccaaggccgcccagtttggcctggtgggcgccgccggcctgggcggcctgggcgtgggcggcctgggcgtgcctggggtgggcggcctgggcggcatccccccagctgctgctgccaaggccgccaagtacggggctgctggcctgggcggcgtgctgggcggggccggccagttccccctgggcggcgtggccgcccggcccggcttcggcctgagccccatcttccctggaggagcctgcctgggcaaggcctgtggcaggaagaggaagtag

SEQ ID NO: 99382 - DNA, 2175 bp, Artificial Sequence
  derived and/or modified sequence
atggccggcctgaccgccgccgccccccggcccggcgtgctgctgctgctgttatccattctgcacccctccagacccgggggggtccccggagctatccctggcggagtgccaggcggcgtcttttaccccggggcaggccttggagcccttggcggaggggctctgggaccaggggggaagccactcaagcccgtacccggcgggctggcaggtgccgggctaggggcaggcctgggagcattccccgctgtgacctttcctggtgcccttgttccaggcggggtggctgacgctgctgcggcctacaaagccgcaaaggccggtgccggactagggggtgtgcccggcgtgggcggtctgggagtgagcgctggcgcagtagtccctcagccaggggccggagtaaagccgggcaaggtccctggcgtgggcctccccggagtgtatcccggcggcgtgctgccaggagctcggttccccggtgtcggagtactgcctggcgtgcccacaggagccggggtcaaacctaaagcccctggggttggcggtgcctttgctggcatcccgggagtcggaccttttggaggaccccagccaggcgttcctctcggctaccccatcaaggcacctaagctgcccggcgggtatggcctgccttatacaactggtaagctcccctatgggtatggccctggcggtgtggccggcgcagcgggcaaggccgggtatccaacaggtacaggcgtcggcccgcaggcagcggcagccgccgcagcgaaggcggcagcgaaattcggagccggagccgctggcgtgctccctggagtgggaggcgcaggcgtacctggggtacccggagctatcccaggcatcggcgggatcgcaggcgtaggaacgcccgccgccgccgctgctgcagcagccgccgccaaagctgctaaatatggagccgccgccggcctcgtccctggcggtccagggttcggccccggagtggttggggttccaggcgccggtgtgcccggagtgggggtcccgggggccggaattcctgtggtgcctggggccggcatccctggtgctgcagtgccaggagtcgtttctcccgaagctgcggccaaagcggcggcgaaggctgctaagtatggcgctcgtcccggcgtcggtgtgggcggaatccccacttatggggtgggcgcaggagggtttcccggctttggggttggagtgggaggcattccaggagtggcaggtgttcctggtgtcggcggagtgccaggggtcggcggcgtccccggggtcggaatttctccagaagctcaggcagccgcagccgccaaggctgctaaatacggagttggtacacccgctgctgctgccgccaaggccgcagccaaagcagcccagtttgggctggtgcccggggtgggagtcgcccctggcgtcggcgtcgcccccggggttggtgtggcacccggcgtcggactcgcgccaggggtcggcgtggcccccggggttggcgtggctcctggggtcggtgtggccccagggatcggtcccggtggggttgccgccgccgcaaagtcggctgctaaagtggccgccaaggctcagctgcgagctgcagcaggtctgggggctggcattcccggcctgggggtgggcgtaggcgtacccggcctaggggtaggggctggtgtgcccggattgggtgttggtgcgggggtccccggattcggagcggtccccggagctctggccgccgctaaggcggcgaaatacggcgcagctgtccctggcgtcttggggggtttaggggctctggggggggtaggtattcccgggggcgtcgttggggccggtcctgctgctgcggctgccgccgccaaggctgctgccaaggcagcccagttcggcttggtgggcgctgctggcctgggggggctgggagtcggcggcctgggggttcctggggtcggtggcctggggggcataccccctgccgcagcagcaaaggccgcaaaatatggcgccgctgggctgggcggcgtgctgggcggcgcaggccagttccctctcgggggcgttgccgcccggccggggtttgggctgtccccaatctttccgggaggcgcctgtttaggaaaagcctgtggacgcaagcgaaagtag

SEQ ID NO: 99383 - DNA, 2274 bp, Artificial Sequence
  derived and/or modified sequence
atggccggcctgaccgccgccgccccccggcccggcgtgctgctgcttctcctctcaattttgcacccatctcgtccagggggagttcctggggctattccaggaggcgttcccggaggggttttctatccgggcgccggtcttggggccctgggcggcggcgcactgggacccggaggaaagcctctcaaacctgtgcccggtggacttgcaggtgcaggtcttggcgctggactcggcgctttcccagcggtaaccttccccggcgcactagttcccggaggcgtggcagatgccgctgccgcctataaggcagccaaagccggagcggggcttggtggcgttccaggagtgggtggtttgggggtatcggctggagctgtcgtgcctcagccaggtgcaggtgttaagccagggaaggttccaggtgtcggtctccctggtgtgtatcccggaggtgtgctgcctggcgccaggtttcctggagtcggcgtgctccctggggtgccgaccggtgcaggagtgaaacctaaggcacctggagtaggaggggcttttgcggggatccccggggtaggaccattcggtgggccacagccaggtgtacctctggggtaccctatcaaggctcctaagttacccgggggatatggcctcccatataccaccggtaaacttccgtacggctatggtccaggaggagtggccggggctgctggaaaggccggatatcccacaggaaccggtgtgggcccacaggccgcagcggcggcggcggcaaaggccgccgctaaatttggagccggtgctgctggagtattacctggcgtcggaggggcaggagtgcctggggtgcccggtgctattcctggcatcggcggcattgcgggtgtcggcacaccagcggcagccgccgcagccgctgcagctgcaaaggccgcgaagtatggcgctgccgcgggactggtgcctgggggccctggcttcgggcctggcgttgtgggtgttccaggagccggcgtccccggagtcggggttccaggcgctggcattcctgtcgtgcccggggcgggtattcccggagccgcggtgccgggggttgtgtctccagaagcagccgcaaaggctgccgcaaaagcagccaagtatggtgctcggcccggggttggggtgggggggattcccacttatggcgtaggcgcgggtgggtttcctggatttggggtcggcgtgggggggatccccggagtggccggggtgcctggtgtgggcggtgtcccaggcgtgggcggagtgcccggggtgggcatcagcccggaagctcaagctgcagctgccgcgaaagctgccaaatacggagttggaactccagcagcagcagcagccaaggccgcagcaaaggccgctcagtttggactggtaccgggagtcggagtggctcccggtgtgggagtggcacctggagtgggggtggccccaggggtgggacttgcccctggcgtgggggtggctccgggggttggggtggcaccgggcgtgggagtggcaccaggtattggcccaggcggggtggccgccgcagccaaaagcgcggctaaggtggcagctaaagcccagttgcgtgcggctgccggtcttggcgcaggaattcctggcctcggtgtcggggtgggggtgcccggcctgggggtaggggccggagtccccggcctgggtgttggggccggagtaccaggctttggggcaggggccgatgaaggcgtgagaaggagcctctcacccgagctgagagaaggtgatccctcgagtagccagcatctcccttccacaccatcatctcctcgcgttcctggtgccctggcagcggccaaggccgctaagtacggagccgccgtgcccggagttcttgggggtctgggagcattgggaggtgtcggaatccccggaggcgtggttggagcagggcccgctgccgctgccgccgccgccaaagctgctgcgaaagccgcccaattcggactggtcggcgcagccggtctcggaggcctgggcgtgggggggcttggcgtgcccggagtaggcggtctgggaggtattccgcctgctgcggccgccaaggctgccaagtacggcgcagccggattgggtggtgtgcttggtggcgccggacaattcccgctcggaggagtggcagcaaggcccggctttgggctgagccctatatttccgggaggcgcctgtctggggaaggcctgtggacgaaagcgcaagtag

SEQ ID NO: 99384 - DNA, 2136 bp, Artificial Sequence
  derived and/or modified sequence
atggccggcctgaccgccgccgccccccggcccggcgtgctgctgttgctgctctccattttgcatccttcccgaccaggcggcgtccccggcgccatccccggaggggtcccgggaggagtcttctaccctggtgccgggctgggagctctcggtggaggcgcgttgggacctggaggcaaaccattgaaaccggttccaggaggcctggcaggagccggacttggtgctgggctgggtgcctttcctgctgtcacctttccgggcgccttggtccctggaggggtcgctgatgccgctgccgcgtataaagccgccaaggccggtgcaggactgggcggtgtaccgggtgtaggcgggctcggggtgtccgcggccccaagcgttccgggggcagtcgtcccacagccgggagcaggggtgaaaccaggtaaagtgccgggggtgggactgccaggcgtataccctggaggcgtgctgcccggcgctaggtttccaggtgttggcgtgctgcccggagtgcccacaggtgccggcgttaagcccaaggcgccaggcgtaggcggtgcattcgccggcatacccggagtggggcccttcggcggaccacagcccggcgtccctctgggttatcccattaaggcaccaaagttacccggcggatatggactaccgtatactaccggcaagcttccctatggatacgggccaggaggtgttgctggagccgctggtaaggccggctaccccacagggacaggcgtcggcccacaggcagccgcagccgcggctgctaaggccgccgcaaagttcggtgcaggcgccgcgggtgtcctccccggagtcgggggagccggcgtccctggcgtgcctggggccatccccggaatcgggggcattgccggcgtggggactccagcagccgcagctgctgcagcagcagccgcaaaagcggcaaaatacggcgcagcggccggactggtgcccggtggccctgggtttggccccggcgtggtcggagtgcctggtgccggagttcccggcgtcggcgttcccggtgctgggatacctgtggtccccggggccggaattcccggggccgcggtcccgggcgtcgtgagtcctgaggccgccgctaaagccgcggccaaagcagccaaatacggggctcggccaggagtgggcgtcggtggtatccctacatacggcgttggagcagggggcttcccaggattcggcgtcggagtcggaggcattcccggagtcgccggagtgccaggtgtcggaggagttcccggggtaggcggcgtaccgggggtcggtatctcccctgaggcacaggcagccgccgccgccaaagctgccaaatacggggtggggacgcccgcagcagccgccgccaaggcagccgctaaggctgcacagttcggcttggttcccggcgtaggggtggctcccggcgtgggcgtcgccccaggtgttggtgttgctcccggcgtcgggcttgctcccggagtgggggtggcccctggcgtcggcgtagcgcccggggtgggggtggccccagggattggtcctgggggcgtggctgcagccgccaaaagcgctgctaaagtggctgcaaaagcccagctcagggcagcggccggactcggggctgggataccgggtctgggtgtgggggtgggggtgccgggcctgggggtgggtgccggcgtgcctggcctgggagtgggagccggcgtacctggttttggcgctgtcccaggggccctagccgccgctaaagcagctaagtacggggccgctgttccaggcgtacttggtggcctgggcgcgctgggcggagtcggcataccgggtggggtggtgggtgcgggaccggccgcagccgctgctgccgcaaaagctgctgcgaaggccgcacagttcgggctggttggagcggctggtctgggcggactcggcgtgggaggcctaggagtccccggagtgggtgggttaggaggcatcccgcccgccgccgctgcaaaggccgcaaagtacggcgtcgctgcccgcccgggcttcggcttgtctccaatcttcccagggggggcatgtttaggcaaggcatgcggccggaaacgaaaatag

SEQ ID NO: 99385 - DNA, 2379 bp, Artificial Sequence
  derived and/or modified sequence
atggccggcctgaccgccgccgccccccggcccggcgtgctgctgcttttgcttagcatcctccatccgtcacggccgggtggcgtgccaggtgccatccccggcggggtgcccggaggggtcttctatcctggcgcagggctaggggctctgggagggggagcactgggccctggtggaaaacctctgaaacctgtgcctggcggactggccggtgccggcttgggcgctgggttgggggcattccccgcagtgacgttcccaggcgccctcgtccccggcggcgtagccgacgctgcagccgcatacaaggcagcaaaggctggggctggattggggggagtccctggcgtcggaggcctgggtgtaagcgcgggggctgtcgtaccacagcccggggcgggcgtcaagccggggaaagtgcccggagtcggcctgccgggtgtgtaccccggtggcgttctgcctggggcaaggtttcctggtgtgggggtgctccctggcgtgcccaccggggccggagtgaaacccaaggcacctggcgtggggggagccttcgcaggtattcctggcgtgggcccatttgggggcccacaacccggtgtacctctaggatatcccatcaaagctccaaaattgccggggggatacggcttgccatataccacaggcaaattgccttatggctacggacctgggggagtcgccggagccgccggaaaggcaggctaccctaccgggacgggggtaggcccccaggccgcagccgctgctgcggctaaggccgccgccaaatttggcgcaggggccgcaggcgtgctgcccggagtaggtggtgcaggggtgccaggagtaccgggcgcaattcccgggattggcggcatcgccggcgtggggacgccggctgcggctgccgccgctgccgccgccgccaaagcagctaagtatggagcagcagcagggctcgtgccaggcggcccagggtttggcccaggggtggttggcgtgcccggggcaggagtccctggagtcggggtaccaggcgccgggatccctgtggtacctggagcaggaattcccggggccgccgttcctggcgtagtctctccagaggctgcagctaaggccgcagccaaggctgctaagtatggcgctcgacccggagtcggagtgggcgggattcccacctatggggtgggcgctgggggcttcccggggtttggggttggggtcggtgggataccaggcgttgctggagttccaggtgttggaggagtgccaggtgtcggaggcgtgccaggcgtcggcatctctcctgaagcacaggcagccgctgcagcaaaggcagctaagtacggcgcggccggcgccggggtactcgggggcctagtgcctggggcaccgggtgctgtacccggcgtcccagggaccggtggggtccccggtgtcgggactcccgcagctgcagccgccaaggccgcagccaaggcagcccagttcgcgttgctgaatctcgcaggcctcgtccccggtgtgggagtggcccctggggtaggggtcgcgccaggagtcggcgttgcccccggcgtaggactagcccctggcgtaggagtcgcacctggagtgggcgtggctcctggcgtaggtgttgcacccgggatcggcccgggcggtgtggccgccgccgctaaaagcgctgccaaggttgccgccaaggcccaactgagggcagccgcaggactaggcgccggcattccaggcctgggggtaggggtgggcgtgccaggcctgggggtgggggccggggtgccaggacttggtgtaggcgctggcgtcccaggctttggagccggagcagatgaaggcgtgcgcaggtccttgtcgccagaattaagggaaggagaccctagctcaagtcagcaccttccatctacaccttcctccccacgggtccctggagcgctcgctgccgctaaggctgcgaaatatggcgccgccgttccaggcgtattgggcggacttggggctttgggcggtgtggggattcctggcggggtagtcggggcaggtccagccgctgccgcagcagccgctaaagccgccgctaaagctgctcagttcggcctggtgggagctgccggtcttggggggctgggtgtgggaggactgggcgtgcctggggttggcggcctaggaggcatacccccggccgccgccgccaaggctgccaaatacggtgcggcaggtctcgggggggtgctagggggagccggccagtttcctttgggcggagttgcagcccgacctggattcggactatcccccattttccctgggggcgcgtgtctgggcaaagcatgcggcaggaaacgcaagtag

SEQ ID NO: 99386 - DNA, 2034 bp, Artificial Sequence
  derived and/or modified sequence
atggccggcctgaccgccgccgccccccggcccggcgtgctgctgctgcttctttctatcttgcacccaagccgacccgggggggtgcctggggcgatccccgggggagtgcccggaggcgtgttctacccggccctgggccccggcggcaaaccgcttaaaccagtcccagggggacttgccggggcaggactgggggccggcttgggagcgtttccagctgtaactttccctggcgccttagtacctggcggggtggccgacgccgccgctgcctacaaggcagccaaggcaggtgccggtttagggggtgtccccggggtcggcggactgggcgtctccgcgggcgcagtcgtgcctcaaccgggagcaggggtcaagcctggaaaagtgcccggggtgggtctgcccggcgtgtatccgggcggcgtgctacccggtgcgcgctttccgggcgttggagtgctgccaggggtgcccacaggcgccggagtgaaaccgaaggcacctggcgtcggtggtgcctttgcaggcattcctggggtgggccctttcggcggacctcagcccggggtcccccttggctatcccattaaggctccaaagctccccggcggatacggcctcccatatacaacgggcaaattaccttatggatatggcccagggggtgtggctggagctgcaggtaaggccgggtatccaaccggaaccggggtcggaccccaggcagctgcagccgccgccgccaaagcggccgctaagttcggcgcaggggcagctggtgtcctgccgggggtgggcggagccggtgttccgggtgtgccaggtgcaatcccaggaatcgggggaattgccggtgttggcacgcccgccgcagctgctgccgctgccgccgcggcaaaagcagccaagtacggggccgctgcagggctcgtccctgggggccccgggtttggcccaggagtcgtcggggttcccggagccggcgtcccaggggtcggggtccccggcgccggcatacccgtggtcccaggagctggcatcccaggagcggcggtgccgggggtggtctcgcccgaggccgcggctaaggcagccgccaaggctgcgaagtacggggctcgccctggcgtcggagtggggggcatacctacctatggtgtgggtgccggaggcttccctgggttcggtgttggcgttggtggcattcctggcgtcgccggagtgcccggagtgggcggagtgccgggagtggggggggtcccgggggtggggatttccccagaggcgcaggcggccgcagctgctaaagctgcgaagtatggactggttcccggagtcggcgtggctcctggcgtcggggtcgcccccggggtgggcgtagcaccaggcgtcggtctggcccctggtgtcggcgtcgcccctggcgtgggcgtggccccaggagtgggggtggctcctggcatcggtcccggcggagtggccgctgcggccaagagtgcagcaaaggtcgctgcgaaggcacagctcagggccgcggctggcctcggggcaggcatccctggcctgggcgtgggggtaggtgtgcctgggctgggagtcggtgcgggcgtcccaggtctgggggtgggcgccggagtacccggcttcggcgctgtgcccggtgcactggcagcggcgaaagccgctaagtacggtgcggcagtacccggtgtgctggggggactgggcgccctcggcggggtcggcatcccgggtggcgttgtcggggctggaccagccgcggccgccgcagccgctaaggccgctgcaaaagccgcccagtttgggttggtgggagctgccggtttgggcggcctcggagttggcgggctgggtgtgcctggcgttggcggcctggggggcatcccgcccgccgccgcggccaaagccgcgaaatatggcgtggccgctagacctggatttggactctcccccatattccctgggggggcttgcctcggaaaggcctgcggccggaagaggaaatag

SEQ ID NO: 99387 - DNA, 2118 bp, Artificial Sequence
  derived and/or modified sequence
atggccggcctgaccgccgccgccccccggcccggcgtgctgctgctgttactcagcatcctgcatccttcccgtccagggggagtgcctggagcaatacccggcggtgtacctgggggtgtgttttatcctggagccgggctgggggcactggggggtggagccctcggacccggcggcaagccgctcaagcctgtgccagggggcttggccggagctgggctgggcgcaggcttgggggctttccctgctgttacattcccaggcgccttggtgcccggaggcgtcgcggatgccgctgcagcatataaagcggccaaagctggggctgggctaggtggtgtgccaggagtggggggcctgggagtgagcgcgggggccgtggtcccccagcctggcgctggcgtcaaaccaggaaaggttccgggggtcgggctgcccggggtgtaccccggaggggtactccccggagcccgctttccaggagttggggtgctgcccggcgtaccaacgggcgccggtgtgaagcctaaggctcctggcgtaggaggggcatttgcaggcatccccggcgttggcccattcggaggcccacagcccggggtgcctctcgggtatcccattaaggcaccaaaactcccgggtggctacggcctgccttataccactggcaagttaccttatggttacgggcctggcggcgttgctggagccgcagggaaggccggctatcctaccggtaccggcgtaggccctcaggctgccgccgcagctgccgctaaagcagccgccaaattcggtgccggcgcggccggagtacttcccggcgtcggaggcgccggggtcccgggggtgcctggagctatccccggcattggaggtattgcaggcgtcgggaccccagcagccgcagccgccgccgccgcggctgcaaaggctgccaagtatggtgcagctgctggtcttgtaccagggggcccggggttcggccccggtgtggtaggcgtaccgggggccggcgtgcccggggttggagtgccaggtgcaggcatccccgtggtgcccggtgccggaatacctggcgcagccgtgccgggcgtagtttctccagaagccgctgctaaagcggctgcaaaggcagccaaatacggtgctcgtccaggggtgggcgtcggtgggattcccacctatggggtaggggctggcggcttcccgggcttcggggtgggcgttggtggcattccaggggtggcgggggttcctggggtgggcggcgtgccaggcgtgggcggagtgcctggagtcgggatctctcccgaagcccaggctgcggcagccgccaaggccgccaagtatgggctggtgcctggcgtcggtgtggcccctggagtgggggtagcacccggagtgggagtagctcccggcgttgggctggctcccggtgttggtgttgcccctggcgtgggtgtcgcccctggcgtgggcgttgccccaggaattggccctgggggggtggcggcagcagccaagtcagccgccaaagtagccgcaaaagcacagcttagagccgccgccggcctcggcgccggtattccggggcttggagtgggggtaggggtcccaggccttggagtgggtgccggtgtacccggtctcggtgtcggggccggagtgcctggttttggcgccgtccccggggcattagccgccgccaaagctgctaagtacggtgcagcagtgcccggcgttttaggagggctgggagctcttggaggcgtcgggatacctggcggtgtcgtcggcgcgggccccgctgccgcagccgcagccgcgaaagccgccgcgaaggccgctcagtttggtcttgtgggtgctgctggattgggtggcctgggggttggaggcctgggagtgcctggcgtgggaggtctgggcggaataccgcccgccgccgccgctaaggccgcaaagtatggagcagccgggctggggggtgtgcttggcggagctggtcagttccccctcggcggtgttgctgctagacctggcttcgggctcagtcccatcttccccggcggggcatgcttaggtaaggcctgcgggcgcaagaggaaatag

SEQ ID NO: 99388 - DNA, 645 bp, Artificial Sequence
  derived and/or modified sequence
atggccggcctgaccgccgccgccccccggcccggcgtgctgctgctgctgctgtccattctacaccctagtaggcctggcggcgtgccaggagctatccctggaggcgtcccaggtggagtgttttatcctggggctggtttaggcgctttgggcggtggagccctgggccctggggggaagcctctgaaaccagtgcctgggggtctcgccggggccggcctgggagccggactgggggccttccccgctgtaacctttcccggagctctggtgcccggaggagtagccgatgcagccgccgcctacaaagccgccaaggccggggctgggctgggcggcgtgccaggcgtgggcggattgggcgtgtctgccggcgctgtcgtacctcagcccggggctggagttaaacccgggaaggttcccggagttgggctgcctggcgtctaccccggcggagttttacccggggtgggcccatttgggggcccccagcctggcgtgcctttaggctatcctatcaaggctccaaagctgcccggtgggtacggactcccttacactacaggcaaactgccatatgggtacggccctggcggtgtggcaggggccgcaggaaaggccggatatccaacgggcacttag

SEQ ID NO: 99389 - DNA, 504 bp, Artificial Sequence
  derived and/or modified sequence
atggccggcctgaccgccgccgccccccggcccggcgtgctgctgctcctgctaagcattttacaccccagccgcccaggaggtgtgccaggtgccatccctggaggggtgcccggcggagtcttttaccccggcgctggactcggggctttaggggggggtgccctgggccccggggggaaaccgctgaagccggtccccggcggcttggctggagcgggccttggcgcagggctgggggcattccctgctgttacctttcccggcgctctggtccccggcggtgtggcggatgccgccgctgcgtacaaagctgccaaggctggtgtcgggccatttggcggacctcaacccggagttccacttgggtatcctattaaagcccccaaactgccaggtggttacggactgccatacacaacaggaaagttgccttatggttacgggcctggcggggtggccggcgccgccggcaaggcgggctatccaaccggcacaggatag

SEQ ID NO: 99390 - DNA, 2079 bp, Artificial Sequence
  derived and/or modified sequence
atggccggcctgaccgccgccgccccccggcccggcgtgctgctgttgttgctgtccatcctgcatccgtcaaggcccggcggcgtgccaggtgccatacccggaggcgtgcccggaggtgtcttctatcctggggctggactcggtgccctcggcgggggggccctggggccaggtggcaaaccgctaaagccagtgccaggaggattggcaggagcaggtctgggcgccggtctgggtgcattccctgctgtcactttccctggggccctagtgcctgggggcgtggcagatgccgccgccgcttataaggccgctaaggctggagctggtctgggcggcgttccaggcgtcggtgggttgggtgtgtctgctgcacctagtgttccgggagcggtcgtgccgcagccaggggccggcgttaaacccggcaaggtgcctggcgttgggctgcccggcgtgtatccaggcggtgttctgccaggcgcgcgatttccaggcgtcggtgttctgcccggagtgccaactggagcgggggtgaagcccaaagcacccggcgtcggcggcgctttcgccggcatcccaggcgtcgggcctttcggcgggccccagccaggagtgcccctggggtaccctattaaagctcctaagctcccgggagggtacgggctcccgtacactacaggcaagctgccatacggctatggtcccggtggggtcgccggggccgcgggaaaagccggttatcccacagggactggcgtaggaccgcaggctgctgcggccgcggctgccaaggcagctgccaagttcggagccggagcagcgggagtcctgccaggtgtgggcggagccggtgtgcccggagtacccggcgcaatacccgggatcggtggtattgcaggagtcggtacccccgcagcagctgctgccgcggccgctgcagctaaggcggccaaatatggcgcggctgctgggctcgtgcccggagggccaggctttggtccgggcgtagttggcgtccctggagctggcgttcccggagtgggagtgccaggagcgggcatccccgtcgtgccaggcgcggggatacccggggccgcagtgccgggtgtggtctctcctgaagccgcggccaaggccgccgctaaggcagctaagtacggagccagaccaggtgtaggcgtcggcgggatcccgacttatggcgtgggcgctggaggcttccctggcttcggcgtgggggtaggtggaatccccggggtggccggcgttcctggagtaggcggagtgccaggcgttggtggggtccctggggtggggatcagtcccgaagcccaggccgctgcagccgcaaaagccgcgaaatacggcctcgtccccggcgtgggggtggctcctggggtgggagtagcgcccggggtgggtgttgcaccaggagtgggtctggcaccaggagtaggcgttgctcctggcgtgggcgtcgcacccggagtgggcgtggctcccggtatcgggccaggtggtgtggccgccgccgctaagagtgctgcaaaggtcgccgctaaggcccagctgcgggcagcggccggactaggtgccggaattcctggattaggcgtcggagttggcgtgcccggactcggcgtgggagcaggcgtcccaggactcggcgtcggtgctggagtgcccggcttcggagccgtgcccggcgcgttggcggcggcaaaagccgcaaagtatggcgcagcggtgccaggggtcttgggagggctcggggccctgggaggggtggggatccctgggggtgtcgtgggcgccggaccagcagcggccgcagctgccgcgaaggcggcagctaaagccgctcagttcggtttagtcggcgcagccggccttgggggactgggcgtaggaggtctgggagtacccggcgttggtggcctgggcgggatccctcccgctgcggccgcaaaagccgcgaagtacggtgtggccgcgagaccaggattcggcctgtcaccaatttttcctggcggcgcctgtctcgggaaggcatgcggtcgaaagcgcaaatag

SEQ ID NO: 99391 - DNA, 507 bp, Artificial Sequence
  derived and/or modified sequence
atggccggcctgaccgccgccgccccccggcccggcgtgctgctgctgcttctgtcaattctccacccctcccgacctggcggcgtaccaggcgccatccccgggggcgtgccaggcggtgtcttctatcctggggcaggcctcggagctctaggaggcggcgctctgggtccaggcgggaagccactgaaaccaggcgtgggtcctttcgggggccctcagccaggagtgccccttggataccccatcaaggctccaaaattgcctgggtatgggcctgggggcgtggctggagcagctggaaaggcgggttatcctacaggcaccggagtagggccacaggccgcggctgctgccgccgctaaagctgccgccaaatttggagccggggccgctggcgtgctgccaggcgtaggaggagccggcgtgcctggtgtgcctggtgcaatacctgggatcggtggcattgccggtgtgggtacacccgccgcagcggccgccgcttag

SEQ ID NO: 99392 - DNA, 885 bp, Artificial Sequence
  derived and/or modified sequence
atggccggcctgaccgccgccgccccccggcccggcgtgctgctgctcctgctgagcatccttcaccctagccgtccaggaggcgttcccggggccatcccagggggcgttcccggaggcgtgttttatcctggagccggcctgggagccctggggggcggagccctcgggcccggcgggaagcctctgaaacctggtctgggcgctttccctgctgtcacgttccctggggcactggtgcctgggggggttgcggacgctgctgcggcatataaagccgccaaagccggagctgggctgggcggcgtacctggtgttggcggtctcggcgtttctgccggggccgtagtacctcagccaggggccggggtcaaacctggtaaggttccgggggttggtctccctggagtgtaccccggtggagtgctccccggagcgcgattccccggagttggagttctaccgggagtacccaccggggccggggtgaaacctaaggcaccaggtgttgggcccttcggtggtccccagccaggagttcccctggggtaccccatcaaagcccccaaactgccaggcggttacggcctaccttacacaaccggtaaattgccctatggatacggtcctggcggcgtggccggtgctgccgggaaggctggctatccaacagggacgggagtgggcccacaggccgcagccgccgccgccgctaaagctgctgcaaagttcggcgctggggctgctggagtgctcccaggcgtcgggggggccggggtccctggggtgcctggggccatccctggtattggaggaatcgccggggtgggcaccccggccgccgctgccgcagcagcagctgctgccaaagccgctaagtattag

SEQ ID NO: 99393 - DNA, 531 bp, Artificial Sequence
  derived and/or modified sequence
atggccggcctgaccgccgccgccccccggcccggcgtgctgctgctgttgttatcaatcctgcacccctcaaggcccggcggtgtgccaggcgcaatccctgggggggtgccgggcggagtgttttatccgggcgcagggctcggggccctgggtgggggggcgcttggcccaggcggaaagccactcaagcctgtgcctggcggtctcgcaggggcaggcctgggggctgggttgggggcattcccagccgtgacgtttccaggggccctggtgccaggcggtgtggcagacgccgccgccgcctataaagccgccaaagcaggggccggactggggggggttccaggagtgggggggctcggcgtgagcgccggggctgtagtgccccagccaggtgccggtgtgaaacccggcaaggtgcctggggtcggtggagcttttgccggtattcctggtgtgggtcccttcggtggcccgcagcctggggtacctttgggctatcccattaaagcccccaaacttccatag

SEQ ID NO: 99394 - DNA, 1992 bp, Artificial Sequence
  derived and/or modified sequence
atggccggcctgaccgccgccgccccccggcccggcgtgctgctgctgctgcttagtatcttgcacccctcgagacctggaggtgtgccaggagctatccctggtggtgtaccgggaggagtgttctatcctggggcggggttgggggcattgggtgggggtgcccttggacctggcgggaaaccacttaagcctgtgcccggtggcctcgccggggccgggttaggtgcaggtgccggcctgggtggagtccctggagtgggcggactgggagtgtcagcgggcgccgttgtgccacaacccggcgccggcgtgaagccggggaaggtgcccggagtaggccttccaggcgtgtaccctggcggagtgcttccaggggctcggttccctggagtcggcgtgctgccaggcgtacctacaggagccggtgtcaaacccaaagcacctggggtggggggcgccttcgcaggcattcccggggtcggccccttcggagggcctcaaccaggtgtgccgctaggctacccaataaaagctcccaagctgcccggggggtacggattaccatataccaccggcaaactgccatatgggtatggcccaggtggcgtggccggggccgcgggcaaagcggggtaccccaccggcaccggagtgggacctcaagccgcagcagccgcggccgctaaagccgctgccaaattcggcgccggcgctgcaggagtgctaccaggagtggggggagctggtgtcccgggcgtaccaggggctattcccggaataggcggaatagccggagtcggcaccccagccgccgccgcggcagctgccgcagccgccaaggctgccaagtacggcgctgctgctgggctggtgcccgggggaccaggctttgggcccggcgttgtgggcgtgcctggtgctggtgttcctggcgtaggggtcccgggggcagggataccagtcgtgccaggcgctgggatccctggtgcggctgttccgggcgtggtaagtcccgaggcagccgctaaagcagcggccaaggccgcaaagtatggagcccgccctggtgttggcgtcggcggcattcctacgtacggagtgggcgccggggggtttcctggcttcggcgttggcgttggaggaatcccaggagtggcgggagtcccgggagtggggggtgttcctggagttggaggcgtgccaggagttgggatatctcccgaggctcaagcagccgcagccgctaaggcagcaaagtacggcgtcggtacgccagctgccgcagctgcgaaagcggcagcgaaagcagcgcaatttggactggtgcccggcgttggggttgctcctggagtcggcgtggcacccggcataggtccaggtggcgtggctgctgcagcaaagtccgccgccaaagtcgccgcaaaagcccagttacgtgccgccgctggcctgggcgcagggatccctggcttaggggttggagtgggagtacccggactgggcgtgggagccggggttcctggtctgggcgtgggcgctggcgttcccggctttggggcagttcctggtgccctggccgccgctaaggcagccaagtatggcgcagcagtcccaggcgtcctgggtgggctcggtgccttgggtggcgtgggcattcccggaggagtggtgggggcggggcccgcggcggcagcagcggccgcaaaagctgccgccaaggccgcgcagtttggcctggtgggagccgctggactcgggggattaggtgttggaggccttggcgttccgggcgttgggggactgggagggattccacccgctgcagcagcaaaagccgccaagtatggggctgctggtttaggcggtgtcttggggggcgcagggcagtttccgctaggcggtgtggctgcacgacccggattcggattgtcccccattttcccaggcggagcctgcctgggtaaggcatgcggtcgcaaacgaaagtag

SEQ ID NO: 99395 - DNA, 2121 bp, Artificial Sequence
  derived and/or modified sequence
atggccggcctgaccgccgccgccccccggcccggcgtgctgctgttactgctctccattcttcacccaagtaggcctggtggggtccctggagccatccctggcggcgttccagggggggtcttctatccaggcgcaggactcggtgcacttgggggtggggccctcggacccggcggcaagccacttaaacccgttcccggagggctagctggagctgggcttggtgccggcctgggagcgttccccgccgtgacatttcccggtgcccttgtgcctgggggagtggcagatgccgccgctgcatacaaagcggccaaagctggggcgggcctagggggggtgcctggcgtgggcggactcggcgtgtcagcgggcgcagtcgtcccacaacccggggcaggtgtgaagccaggcaaggttcctggcgtgggtttaccaggagtatacccagggggcgttctgcccggggcacggttccccggggtgggagtactgccaggcgttccgactggtgcgggagtgaaaccgaaggcgcccggtgtgggtggggccttcgctgggattccgggcgtcggcccattcggaggcccccagccaggggtgccactcggctatccaataaaggcccccaagctgcccgggggttacgggcttccctataccacaggcaagctcccgtatggctatggacccggaggtgtggcgggagctgccggcaaagcagggtaccctactggcaccggcgtgggaccgcaggccgccgctgccgctgccgccaaagccgccgcgaaatttggcgctggagccgctggtgttctgcctggagtgggtggagccggcgtccccggcgtaccaggggccatcccgggaatcggaggcatcgcgggcgttggaactcctgctgcagcggccgcagcagcggcagctgcgaaagccgccaaatatggggctgctgcaggcctggtaccgggcggacctggcttcggccctggggtagttggagttccaggagctggtgtgcctggggtgggagtgccaggcgccggcatccctgtagttcctggggccggcatcccgggggccgccgtgccaggtgtggtcagcccagaggccgccgccaaagcagccgcaaaagccgcaaaatacggcgctaggccaggcgtcggagtggggggtatcccaacatatggagtgggcgctggaggcttccccggcttcggggttggcgtggggggtattccaggcgttgctggggtaccaggcgtgggaggtgtgcctggcgtggggggcgtcccaggagtgggtatatctccagaggcacaggccgccgccgctgctaaggccgctaagtacggcgtgggtacacctgctgctgccgccgccaaggctgcagcaaaagccgcccagtttgggttagtcccaggggtaggcgtggctccaggggttggggtggctcctggggtcggtgtcgcacctggtgtcggtctggctcctggcgtcggtgttgccccaggagtcggtgtggctcccggggtaggcgtggcccctggcattgggcccgggggagtggccgctgccgccaagtccgccgcaaaagtagcagctaaggcacagctgcgggccgcagcaggtctaggggccggaatccccggactaggtgtcggcgtgggcgttcccggactgggagtgggcgccggcgtgcctggattgggtgtgggggctggggtgccaggctttggagccgtccctggggcactggccgctgccaaggccgcaaaatacggtgctgctgtgccaggcgtacttggcggattaggggccttgggtggggtggggatccccggaggtgtagtgggcgcggggccagctgccgccgctgccgcggcaaaggctgctgccaaggccgcacagtttgggttagtgggcgccgcgggtttgggcggcctcggcgtgggaggcctgggcgtcccaggcgtgggaggtttagggggaatcccgcccgctgcggcggccaaggccgccaagtatggcgtagcagcccgacccgggttcggactaagtcctatcttccccggcggcgcgtgtctgggcaaggcgtgtggtcggaaacgaaagtag

SEQ ID NO: 99396 - DNA, 2145 bp, Artificial Sequence
  derived and/or modified sequence
atggccggcctgaccgccgccgccccccggcccggcgtgctgctgttactgttgtctatcctgcatccaagtaggcctgggggtgtacccggagccatcccaggtggggttccagggggggtcttttacccagccctcggtcccggaggcaagccactgaagccagtccccggcggactggccggcgccggcttgggggctggcctgggtgcctttccagctgtgacctttcctggtgctctggtcccaggaggcgtggccgacgcagctgccgcgtataaggccgctaaggcaggggcgggcctgggaggagttccaggggtggggggcctgggcgtcagcgctggggccgtggtgccccaacccggagctggagtgaagcccggaaaggttcctggggtcggccttccgggcgtctatcctggcggcgttctccccggagcacgctttcctggcgtgggggtgttgccaggtgtccctaccggcgctggggttaaacctaaggcacctggagtcggcggggcttttgccggcatcccgggagtcggcccctttggcggcccgcaaccaggcgtgcccctgggctacccaatcaaagcaccaaagctcccaggtggatacggcttaccgtataccactggcaagctgccatatggttacggccctgggggcgtggctggcgccgctggtaaagccggctatccaacaggaactggcgttggaccccaagccgccgctgctgcagctgcaaaagccgccgcgaaattcggagccggggccgccggggttctccctggtgtggggggtgcaggagttcccggtgttccgggggccataccaggcatcggaggaatcgctggcgtgggaaccccggcagcagctgccgccgctgcagcagctgctaaggctgccaaatacggggcggccgctggattggttcccggaggcccaggctttggccctggggtcgtgggtgtcccgggcgccggcgtcccaggggtcggagttcccggggccggaatacctgtggtgccgggcgctggcatcccgggggccgcagtacccggggtggtcagccccgaagccgccgccaaggcagccgcaaaagcagcaaagtacggcgcgagaccaggagtcggggtgggagggatcccaacctatggcgtgggggcaggcggcttcccggggtttggcgtgggcgttggtggaattccgggcgtggccggcgttcccggtgtcggaggggttccaggcgtgggtggcgttcccggggtggggatctctcctgaggcacaggccgccgccgccgcgaaggccgctaagtatggggttggtactcctgccgctgctgccgctaaggcagccgctaaagccgcgcagtttggcctggtcccaggcgtgggcgtcgcccccggagtcggggtggcgccgggagtgggagtggctccaggagtgggcctggcccccggcgtgggggtagcacctggagtcggagttgcccctggcgtgggagtcgctccgggaatcggacccggaggggtcgccgccgctgctaagagcgcagcaaaggtggctgcaaaagctcagctccgggcagccgctgggcttggggcaggcatccctggcctcggagttggggtgggggtgccaggccttggcgtgggggcaggggtgccaggattgggcgtaggcgcaggtgtgcctgggtttggcgccgttcctggagccttagctgcagcgaaggccgcaaagtatggtgctgccgtgcccggggttctgggcgggctgggcgcactagggggtgttggcatcccggggggcgtcgtgggggccgggccggctgcagcggctgcagccgctaaggcggctgcaaaagccgctcagttcgggctggttggcgcagctggtttaggcggattgggggtgggaggactcggagtccccggagtaggggggctggggggtatcccccccgctgctgctgccaaggcagctaaatacggagccgccggactgggtggggtcctgggtggcgccggccagtttcccctaggcggcgtcgcggccaggccgggcttcggactgtcacccatctttcctgggggtgcctgtctggggaaggcatgcggccggaagcgcaagtag

SEQ ID NO: 99397 - DNA, 2175 bp, Artificial Sequence
  derived and/or modified sequence
atggccggtctgaccgccgctgcaccacgtccgggtgtgctgctcctcctgctgagcattctccatccatcaagacccggaggcgtgcccggagctattccaggcggagtccccggtggtgttttctaccctggggcaggcctgggcgctctcggtggcggagccctggggccaggaggtaagcctttgaaacctgtgccaggtggtctcgcgggagcaggcctcggcgcaggactgggtgcatttccagcggtgacctttcctggtgcactggtgccagggggagtcgctgatgccgctgccgcttacaaagctgccaaggctggagcgggacttggtggcgtgcctggggtgggaggacttggggtatcggccggagctgtcgtgcctcagcctggagccggtgttaagcccggtaaggtccccggagtaggcctccctggtgtgtaccctggaggtgtgttaccaggagccaggtttcctggggtgggcgtgctaccgggagtgccaacaggggctggcgtcaaacccaaggcccctggagtcggtggcgcttttgccggtatcccaggggtcggacccttcggagggcctcagccgggagtgcccctaggatatccaataaaagctccgaagctgcccggtggttatggtcttccctacactactggaaagctaccatacgggtacgggccaggcggagtcgctggcgctgccggtaaggcagggtacccaactggaaccggagtgggaccccaggcagcagccgcagccgcagccaaagctgctgccaagtttggtgccggagcagcgggagttctccccggtgtcgggggagccggagtgcccggagtgccgggtgcaatccctggcatcgggggtatcgcaggcgtgggcacacccgcagcagcagcggctgcagccgctgcggcaaaggccgctaagtacggcgcagccgctgggctggtgccaggaggacccggatttggtccgggagtagtgggggtgcccggtgccggtgtgccgggagtgggagtaccaggcgctggtattcccgtggtccccggagctggaatccctggggctgctgttccaggtgtggtgtccccagaggccgctgccaaggccgctgctaaagcagccaaatacggtgccaggcccggtgtgggagtaggcggaattccaacttacggggtgggagccggtggctttcctgggttcggggtaggtgtgggtggtattcctggcgtcgcaggagtgccaggggtaggcggtgttcccggagtcggcggagttcccggtgttggcatatcccctgaagcgcaggctgccgctgcggctaaggcggctaagtatggggtgggcacccctgcagctgccgctgccaaagccgctgctaaggcagcccagtttgggctcgttcctggggtgggggtcgcacctggagttggagttgccccaggtgtgggtgtggctcccggtgtgggccttgcaccaggggtgggtgtggcaccaggtgtgggtgtggcgccaggcgtcggagtagcgcctggaatcggcccagggggagtcgcggcagccgcaaaatctgcagccaaagtggctgccaaggcccaattgcgcgcagccgcagggctaggagcaggcatcccagggctgggagtgggggtaggagtccctggcttaggcgtaggcgcaggggtccctggtctcggggttggtgctggcgtcccaggttttggagccgttcctggggctctggcagctgctaaggcagccaagtacggtgctgctgtacccggtgtgctggggggtttaggggcactgggcggtgtgggaattcctggaggagtggtcggagccggacccgcagctgcagccgctgcagccaaagcagcagcaaaggcagctcagttcggactcgtcggggcagccggtctaggagggctgggagtgggcggattaggcgtgcctggtgtcgggggactcgggggaattccacccgcagccgctgcaaaggccgcaaagtatggggcagccggactgggaggggttctggggggagccggacagttccctctgggaggggtggccgctagacctggttttggcctgagtccaatattcccgggaggggcttgtctcggaaaagcttgtggcaggaagcgcaaatag

SEQ ID NO: 99398 - DNA, 2274 bp, Artificial Sequence
  derived and/or modified sequence
atggctggtctgaccgccgctgctcctaggcctggagtcctgttgcttcttttgtcaattctgcatccttcacgcccaggaggcgtccctggcgctatccccggaggcgtgcctggtggcgtcttctacccgggagccggactgggtgcactcggaggtggagcccttggacccggtgggaagcctctaaagccagtgccgggaggtctcgctggcgcaggtctcggggctggccttggtgcattcccagctgttaccttccccggtgccctggtgccaggcggagtggccgacgctgccgcagcttacaaagctgctaaagcaggagctgggctgggaggggtgccaggggtgggcggattaggcgtgtctgctggagccgtagtgccgcagcctggggctggggttaaacccggaaaggtcccaggggtggggttacccggagtgtacccaggtggagtgctccccggagcacgttttcctggcgtgggtgtgttgcccggagtgcctaccggcgctggagtgaagcctaaggcccctggggtaggtggtgctttcgccggaataccaggagttggtccctttggcggtccacaacccggagtaccattgggatatccgatcaaggccccaaagttgcctggcggttatggcttgccatatactaccgggaaactcccatatggctacggtcccggtggtgtggccggtgcggctggaaaagctggctacccaaccggtaccggcgtgggccctcaggcggctgccgctgccgcagccaaggcagctgccaaatttggggctggagccgcaggggtattacctggcgtcggaggcgctggcgtacccggagtgccaggagctatccccggtatcgggggaatcgcaggagtggggactccagccgcagccgcagctgctgccgctgctgctaaagcagctaaatacggggctgccgcagggttggtgcctggcggtccaggctttggaccgggagttgttggggtccccggagctggagtgcctggcgtgggcgtgcccggagccggtatacccgtggtaccaggggctggtatccctggtgcagccgtgccaggggtggtgagcccggaagccgctgccaaagcggcagccaaggcagccaagtacggggcacggccaggggtcggcgtgggaggcatccctacctacggagtcggagcgggtggattccctgggttcggggtgggggtgggtggcattccgggagtcgccggagtgcctggtgttggaggtgtcccgggagtcggtggtgtgccaggggtcggtatctctccggaagcccaggctgccgcagcggctaaagcggcaaaatatggagtaggcacacccgcagctgccgcagcaaaagctgcagctaaggccgctcaatttggactcgtgccaggtgttggcgttgcccctggtgtgggcgtcgcccctggcgtgggagttgcaccaggcgtcggacttgcgccaggcgtaggagtggccccaggcgtcggcgtggcccctggggtcggcgtggctccaggtatcggacccggtggtgtcgccgctgcggctaaaagcgcagcaaaagtggcagcgaaggctcagctccgcgctgctgccggactgggcgcaggcattccaggtttgggcgtcggggtcggcgtgcccggactgggagtcggcgcaggagtaccagggcttggagtgggagccggagtgcccggattcggggcaggagctgacgagggggtcaggaggtccctgagcccagagctccgggaaggtgaccccagctcctctcaacatcttccctctacaccctcaagcccccgagttcccggtgccctagccgctgccaaggccgcaaaatacggcgcagctgtgccgggagtactggggggactgggtgccctcggtggggtgggcattccagggggagtggtgggggctggacctgctgcagccgctgcagccgcaaaagcagcagcgaaggccgcacaatttggactggtgggtgctgctggtctgggtgggttgggtgtgggagggctcggcgtgccaggtgtcgggggactggggggtattccacctgccgcagccgcaaaggcagctaagtatggcgctgcaggcctgggcggagtgctgggtggcgcaggtcaattccccctggggggagtggctgccaggccagggtttggcctcagcccaatctttcccggaggagcctgcctggggaaggcatgcggcaggaagcgaaagtag

SEQ ID NO: 99399 - DNA, 2136 bp, Artificial Sequence
  derived and/or modified sequence
atggccggactcactgcggctgcgcctcgaccaggggtcttgttactcttgttatctatcctccacccctctagaccaggtggagtccccggtgctatacccggaggtgtcccgggtggtgttttttatccaggcgctgggctgggtgctttggggggtggggcactaggaccgggtggcaaaccactgaagcccgtccccggagggcttgccggtgccggtttgggcgcaggtctgggcgcattccctgccgtcacgttcccaggtgccctcgtaccagggggagtggccgacgcagcagctgcttacaaggctgctaaagccggagcaggcctgggaggcgtcccaggcgtcggcggactgggcgtttccgccgcaccttctgtccctggcgctgtcgtgccccaacctggtgccggagtgaaacccggtaaggttccgggtgtgggtctccccggtgtatatccaggaggcgttttgcccggtgcaagattccccggagtgggtgttcttcctggagttcccaccggtgcaggtgtgaagcctaaggctcctggtgtgggtggagcgttcgccggtatcccgggagtgggcccttttgggggaccgcagccaggcgtcccgctcggttaccccatcaaggcacctaagctgcctggcggatacggcctcccatacaccactggaaagctgccgtacggatacggtcctggaggcgtcgcgggagccgctggcaaggctgggtaccccaccgggacaggggtgggccctcaggctgccgcagcggcagccgctaaggcagcagccaagttcggcgctggcgctgcaggggtactgccgggtgtgggcggagcgggagtgccaggagtccctggggcaatccccggtattgggggaattgctggcgtcggaacacccgcagccgcagcagctgccgcagctgccgcaaaggctgctaaatatggcgcagccgcaggactggtcccaggcggacctggttttgggcctggcgtggtgggggttcctggggctggtgtgcccggagttggggtgcctggggctggcatcccagtcgtccctggggcaggcataccaggcgctgcagtccctggcgttgtttcccccgaagctgccgcaaaagccgcagccaaggccgctaaatatggtgccagacccggagttggggttggagggatccctacatatggggtaggggcaggaggttttcctgggttcggtgtcggtgttggtgggattccaggtgtggctggcgtgcctggggtgggaggggtgcctggtgtgggcggagttccaggcgtgggcatttcgccagaggcacaagctgccgcagctgccaaggcagctaaatatggcgtcggtacaccagccgcagctgcagccaaagctgcggctaaagctgcccagttcgggctggtgcccggagtgggggtcgcaccaggcgtcggtgtagcgcctggggtaggtgtagcccctggggtggggcttgcccctggcgtcggagtggcccctggagtgggggtggcccctggcgttggggtggcgccaggcatcggaccaggcggagttgccgctgccgctaagagcgccgcaaaagtggctgcaaaggcacagctgcgcgctgctgccggtcttggcgctggtatcccaggcctcggcgtgggtgtcggtgtgcccggacttggcgtgggggcaggggtcccaggcttaggagtcggcgctggcgtcccgggattcggtgctgtgcccggtgccctggcggctgcaaaagccgctaaatatggcgctgccgttccaggagtcctgggaggcttaggtgccctgggcggagtgggcattccaggtggggtcgtaggggcaggtcccgcagctgcggcagctgctgcaaaggcagccgcaaaagctgcccagttcggcttggttggcgcagccggtctgggagggttgggggtcggcggtttgggggtcccgggagtgggagggctgggaggcattcccccagcagccgctgctaaggccgctaagtatggcgtcgccgcacggccagggtttggtctctctccgatcttcccaggcggtgcgtgtctgggaaaggcatgtgggcgaaagaggaaatag

SEQ ID NO: 99400 - DNA, 2379 bp, Artificial Sequence
  derived and/or modified sequence
atggccggactgacggctgcggctccgcgtcctggcgtgttactgctcctgttgtctatcctccatccctccaggccaggcggagtgccaggcgcaatcccagggggtgtgccagggggagtattctatcctggcgctggtctgggggcactgggaggcggagcgctggggcctgggggaaaacctttaaagcctgtgcctgggggtctggcgggagcgggactcggcgctggactgggcgcattccctgctgtgacatttccaggggctctcgtgcccggtggagtggccgatgctgccgcagcttacaaggctgcaaaggccggagcgggactgggaggtgtccctggagtgggtggcctgggggtatctgcgggagctgtggtgccacagccaggtgctggcgttaagccaggaaaagtccccggtgtggggctcccaggagtgtacccgggaggggtcttgcccggagccagattccctggagtgggagtgctgcctggcgtgccaacaggggctggtgtgaagcctaaagcacctggggtgggcggagcattcgccggaatccctggcgtggggccatttggtggtccgcagcctggggtccctctgggctatccaattaaggccccaaaactgccgggaggttacggcctgccatacacaaccggtaagctgccttacggctacggtcctggaggagtcgccggagccgcaggcaaagcgggatacccaaccggaaccggtgttggccctcaggctgccgctgctgcggctgcgaaggcagctgccaagtttggagccggtgccgctggagtgctcccgggagtgggaggcgctggagtccctggagtgcccggagcgatcccaggcatcggaggaatcgcaggcgtgggcacccctgctgcagccgctgctgcggcagctgccgcaaaagctgccaagtacggcgcagcagctgggctggtgccgggtgggcctgggttcggcccaggcgtcgtgggggtgccaggtgctggtgtgccaggagtcggagtgcccggtgctggtattcctgtggtcccgggagctggtatccccggagccgctgtgcccggtgtggtctccccggaggccgcagccaaggccgctgcaaaggccgctaaatacggcgctcggcctggagtgggagtaggcggaattcccacctatggagtcggtgccggtggtttccccggtttcggagttggcgttggaggaattcctggcgtcgccggtgtccctggggtggggggagtgccaggcgtggggggtgtgcccggagtggggatcagccccgaggctcaggcagccgctgccgcaaaagccgcaaagtatggagctgccggagcaggcgtgctggggggactagtaccaggtgctcccggtgcagtgcctggcgttcctggtaccggaggagtccctggcgttggaacacctgctgccgctgccgcaaaggccgctgccaaagcagcgcagttcgcactcttaaacttggccggactcgtgcccggagtgggagtagccccaggggtgggagtcgctcccggtgtaggggttgcccctggggtggggctcgctccaggcgtaggcgtggcccctggcgtgggagtggcacccggagtgggggtcgcccctggcataggtccaggcggagttgcagccgctgctaagtccgcagcgaaagtggcagccaaagcccaattgagagctgctgccggtctgggcgcaggtatcccgggtctgggagtcggggtcggagtgcccggactgggcgtcggtgcaggggtgccaggtctgggagtcggagcaggagttccaggattcggagcaggggctgacgagggcgttaggcgttccctatctcccgaactgcgcgaaggagacccgtcaagcagccagcacctgccctccactccatcatcccccagggtgccaggcgctttggctgccgcaaaggccgctaagtacggtgctgcagttcccggtgtgttgggcggactgggcgctctgggaggtgtgggcataccaggcggagtcgtaggcgcagggccagctgctgccgcagccgctgctaaagccgctgccaaggcagcacaattcggtttagtcggcgcagccggactcggcggtctaggcgtgggagggttgggagtgcccggagtggggggactggggggaatccccccagctgccgctgccaaggccgcaaagtacggcgctgcaggattaggcggagtgctgggcggagcgggtcagttccccctcggaggggtggccgcacgaccaggattcggactctcacccatcttcccaggcggtgcttgcctggggaaggcatgcggcagaaagagaaagtag

SEQ ID NO: 99401 - DNA, 2034 bp, Artificial Sequence
  derived and/or modified sequence
atggctggcctcacagccgctgcgccaaggcccggagtcctcctgctgttgctttcgatacttcatccctctcgcccagggggtgtgccaggcgcaatccctggcggtgtccccggaggagtcttttaccctgccctgggcccaggaggaaaacctttgaaacctgtgcccggaggcctggctggggcaggactgggagctggcctcggagcgttcccagctgtgacctttcccggtgccctggtgcccggaggggtcgctgatgctgccgctgcctataaggccgcaaaagcaggcgcaggcttgggtggagtccctggagtaggtggactgggcgtttcagccggtgctgtcgttccccaacctggcgctggcgtgaagccaggcaaagtgccaggggtcggcctgccaggcgtctaccccggaggggtcttgcccggagcacgctttccaggcgtaggtgtgctgcccggtgttccgactggggcaggggttaaaccaaaagcccctggtgttggaggcgcatttgctgggatccccggagtggggccatttgggggacctcagcctggcgtacctctggggtaccccattaaagcaccaaagttgcctggcggatacgggttgccatacacgaccggtaaactaccttatggatatggacccggaggcgtcgctggagccgctggaaaagccggatatccgacaggcacaggggtgggtccccaggccgctgcggcagctgctgctaaggctgccgctaaattcggcgcaggagctgccggtgtgctgcctggcgtgggaggagccggtgtgccaggcgtccccggtgcaatcccaggaattggcggtatagcaggagtggggacgcctgctgccgctgcagctgcagctgcagccgcaaaagccgcaaagtatggagctgcagccggtttggtgccgggaggcccaggcttcggcccaggtgtagtaggcgtgcccggtgctggcgtgccaggcgtgggcgtgccgggagcaggcatccccgttgtgcctggagcgggaattccgggagccgcagttcctggggtcgtgagcccagaagcagcagccaaggccgcagcgaaagcggcaaaatacggggctagacctggcgttggagtgggcggaatacccacctacggagtgggggcaggcggtttcccaggctttggggtcggggtgggagggattccgggagtggccggagttcccggagtaggtggtgtgcccggagtcgggggtgtgcccggagtggggatttcgccagaagcccaagctgcagctgcagcaaaggctgcaaaatacgggctcgttcccggtgtcggcgttgcgcctggggttggcgtggcgcctggggtgggggtcgcaccaggggtcgggctagcccctggcgtgggtgtggcacctggggtcggtgttgctccaggggtcggtgttgcccctgggatcggcccaggcggtgtggcggcagccgcaaaaagtgctgcaaaggttgctgccaaggcccagctccgtgctgctgcaggtttgggagcaggtataccaggactcggagtgggcgtgggtgtgccgggactcggcgtgggcgctggcgtacctggcctgggcgtcggagctggggtgccaggatttggggctgtgcccggtgccttggcagccgcaaaggccgcaaagtatggcgcagccgttcccggagttcttgggggtctaggggcactgggtggggtcggaattccaggcggtgtagtcggcgcaggccctgcagcagcagctgctgccgcaaaggcagccgcaaaggccgctcagtttggcctggtgggtgctgccggactggggggtctaggagtcgggggtctcggagtgccgggtgtgggtgggttgggcggaattcctcctgcagcggctgcgaaagccgcaaagtacggcgtcgcggctaggcccggttttggcctgtcccccatcttcccaggcggtgcttgcctaggcaaggcttgcggtaggaaacgaaaatag

SEQ ID NO: 99402 - DNA, 2118 bp, Artificial Sequence
  derived and/or modified sequence
atggccggactgacggccgctgcacccagacccggagttctcctactccttcttagtatcctgcatcccagcaggccgggaggggttcctggcgcaatccccggaggcgtccctgggggagtcttctacccgggtgccggtctcggtgcccttggcggaggagcccttggtccaggtggtaagcctttgaaacccgttcctggcggtctggccggagccggactgggtgctgggcttggggcattccctgctgtcaccttcccaggcgctctggtgccagggggagtggccgatgcagctgccgcttataaggcagcaaaggccggagcgggactcgggggagtgcctggagtcggaggtttgggtgtctccgccggagctgttgtgccccaacccggagcgggagtaaaaccagggaaggtgcccggagtggggctccctggcgtataccctggaggcgtgctgcctggagctcgcttcccgggagtgggcgttttgccaggagtccctaccggggcaggtgtgaaacctaaggcaccaggcgtgggcggagccttcgccggtattcccggagtgggcccattcggcggaccccagcctggagtgcccctcggttaccccatcaaggccccaaagttaccaggaggctatggcctcccctataccactgggaagttgccttacgggtacgggcctggaggagtcgccggagcagctggaaaagccggttacccgacagggaccggcgtgggccctcaggccgctgcagcggcagccgctaaggctgctgcaaaattcggggctggggcagccggagtgcttccaggcgttgggggtgcaggcgtcccgggagttcccggtgctatcccaggcattggcggaatcgctggcgtgggcactcccgctgctgccgctgctgctgcggctgcagccaaggccgctaaatatggggcagctgctggtttggtacctggcggaccaggctttgggcctggagtggtgggcgtgcctggcgctggagtgccaggagtcggtgtgcccggagcaggcatacccgtcgtgcccggtgccggtatcccaggggcagctgtgccgggagtggttagtcctgaagccgctgctaaggcggctgccaaagccgcaaaatacggggctcgccctggggttggagtaggtggcattcccacttatggcgtgggtgcaggcggattcccaggattcggagtaggtgttggaggaatacctggtgttgctggcgtcccgggagtggggggtgtcccaggtgtcggcggtgtgcctggcgtaggaatcagccccgaagcacaggcggctgctgccgctaaggccgctaaatatgggctggtaccaggtgtgggggttgctccaggggttggggtcgcccctggcgtgggggtcgcccctggcgtcggtctggcgcctggagtgggtgttgctcctggggtcggagtggcccctggagttggtgttgcacctggtatcgggcctggcggtgtagcagctgccgcaaagagcgccgctaaggtagccgctaaggcccagctgcgagccgctgcaggtttgggagcaggtataccgggactgggagtcggtgtgggggtgcccggattgggagtcggggcaggggtaccaggcctgggcgtgggagccggagtaccgggatttggagcagtacccggagctctcgctgctgcaaaggccgctaaatacggcgctgccgttcccggagttctgggaggtctcggcgctctgggcggtgtaggtatcccgggaggcgtggtgggggctgggcctgctgcggcagccgctgcagcaaaggcagcagccaaggcagcgcagttcgggttggtgggagccgcaggactgggagggcttggggtaggtggcttgggggtcccaggggttggaggcttaggtgggataccccctgccgctgcagcaaaagctgcgaagtatggagctgctggccttggaggtgtcctagggggagctggccaattccctctgggcggagtggcggcaaggcctggcttcggcctcagtcccattttccccggaggtgcctgcttgggtaaagcttgcggcaggaaacgaaaatag

SEQ ID NO: 99403 - DNA, 645 bp, Artificial Sequence
  derived and/or modified sequence
atggcgggattgacagccgctgctccaagaccaggagtacttctgctgctattaagcattcttcatccttcccgtcccggaggagtgcccggagctatacccggaggggtcccaggtggcgttttctaccccggtgcgggactgggggctcttggcggaggcgcactaggacctggcggaaaaccacttaagcctgtgcctggtggattggccggagcaggtttgggtgccggtcttggagccttccccgctgtcacgtttcccggagccctggtgccgggaggggtcgcggacgccgctgcggcttataaggccgctaaagctggtgccggactcggcggagtccccggtgtaggaggtttgggtgtctccgccggtgcagtcgtgccgcagccaggcgcaggggtgaagcctggcaaagtcccaggggttggcttgcctggtgtttatcctggcggtgtactccccggtgtgggacctttcggcggacctcaacccggtgtgcccctgggatatccgatcaaggcaccaaaactgcctgggggttacggattaccctacaccaccggaaaactaccgtacggttacgggcctggaggagtcgccggtgcagcgggaaaagctggctaccccactggcacatag

SEQ ID NO: 99404 - DNA, 504 bp, Artificial Sequence
  derived and/or modified sequence
atggcgggtctgacagccgctgccccacgacctggggtcctacttcttctgctgtcaatactgcatccatcacgtcctgggggtgtccctggcgcaatccctggaggtgtgcccggtggcgtattctatcccggagctggcttgggggcactgggcggaggagcccttggacctggcggaaagcccctgaaacctgtcccaggcggattggcgggagccggactgggggcaggacttggggcttttcccgctgtcacttttcccggagccttagtgccaggcggagttgcagacgccgcagccgcatataaggcagcaaaggccggagtgggacccttcggcggaccacagccgggtgtccccctgggttatcccattaaggcaccgaaactgccaggcggatacggcctgccatataccactggtaaactgccctacggctatggcccaggcggtgtagctggcgcagccggaaaagctggctaccccaccggcactggctag

SEQ ID NO: 99405 - DNA, 2079 bp, Artificial Sequence
  derived and/or modified sequence
atggctggcctcactgcggcagcccctaggcccggagttctcctgctcttattgagcatcttacacccctcccgccctgggggtgtgccaggagccattcccggaggggtccccggtggcgttttctatcctggcgcaggactcggagcactgggaggaggcgctcttggaccgggtggtaaaccactaaagccggtgcctggcggactcgctggcgctgggttgggcgcaggactgggcgctttcccagccgttacgttccctggagcacttgtgcccggtggcgtggccgatgcagctgcagcttataaggcagcaaaagcgggtgctggtcttggcggagtgcctggagtgggaggactaggagtttccgcagccccttcggtgccaggtgccgttgtgcctcagcccggagcaggagtaaaacctgggaaagtgcccggagtggggctgcctggagtgtatcctggaggagttttaccgggtgcaagatttcctggcgtgggagtcttgcctggagtgccaacaggtgcaggagtcaagcccaaagctcccggagtaggtggagcatttgcaggcattcctggagtgggtcccttcgggggacctcaacccggtgtccctctggggtatccaatcaaggctccaaagttgccaggaggctatggactgccttacacaactgggaaactgccctacgggtacggtcctggaggtgtggccggagccgctggcaaggcaggataccccacaggaacaggcgtcgggccacaggccgctgcagcagcagctgctaaagcagctgcaaaatttggagctggtgcagccggagtactcccaggcgttggcggagctggcgtgcctggtgtgcccggtgctattcccggtatagggggaatcgcaggtgtggggacccctgctgcggctgctgctgcagccgcagccgctaaagccgctaaatatggtgccgcagccggactcgtgcctggtgggcctggctttggaccgggagtggtgggggtacctggcgctggagtgcccggagtgggcgtacctggggctggcataccagtcgtgccaggtgctggaattccaggggcagccgtgccaggcgtcgtatctcccgaggccgctgctaaagcagccgctaaggccgcaaagtacggcgcacgacccggtgtcggcgtgggcggaatccctacctatggggttggcgcaggaggttttccagggttcggcgtaggggtgggaggtatccctggggtggcaggagtgcctggcgttggcggtgtgcctggggtgggtggcgtgccaggagtgggtatttccccagaagctcaagcagccgcagccgctaaagccgctaaatatggcttagtgcctggagtcggagtggcaccaggagtcggagtagctccaggggtgggagtcgcccctggcgtagggttagcacctggcgtgggagttgctcccggtgtcggcgttgctcccggagtcggagtcgcccctggtatcggccctggcggagtggctgccgcagcaaaatcagccgcaaaggtagcggctaaagcccagctaagagctgcagctggattaggcgcaggaatcccaggattgggcgtgggagtcggagttcctggcctcggtgtaggagccggagtgcccggtttgggggtcggagccggagtccccggattcggggctgtgcccggtgccctggccgctgctaaggccgctaagtatggggctgccgtacctggggttcttggtggcctcggggcactgggcggagtggggatccccggaggtgttgtcggcgcagggccagcagctgcagccgcagcagctaaagccgcagccaaagctgcccagtttgggctggttggcgctgcaggcctgggaggactcggcgtcggaggactcggagtgcccggagtcggcggtttagggggaatcccacccgctgctgccgcaaaggcagccaaatatggggtggccgcaagacccggtttcgggctgtctcccatcttccccggaggagcctgtctaggcaaggcttgcggcagaaagcgcaaatag

SEQ ID NO: 99406 - DNA, 507 bp, Artificial Sequence
  derived and/or modified sequence
atggccggtctcaccgctgccgcacctcggccaggcgtactgctcctactgctatccattctgcacccgtcacggcctggaggggtgcctggtgccatccctggcggtgtcccaggtggagtgttctaccccggtgccggactgggggctctcggcggaggcgctcttggtccaggagggaagcctctaaagccaggggtcggcccatttggcggtccccagccgggagtgcctctcggctatcctataaaagccccaaaactcccagggtatggacccggtggggtggctggagccgctgggaaggcaggttatccaaccggtacgggagtcggccctcaagctgccgctgcggctgccgcaaaggctgccgcaaagtttggggctggcgctgccggtgtgctgcccggagtgggaggggctggagttcctggggtgccgggagcaattcccggaatcgggggtattgctggcgtggggacaccagccgctgccgcagctgcctag

SEQ ID NO: 99407 - DNA, 885 bp, Artificial Sequence
  derived and/or modified sequence
atggctggcctgacagcagctgctccccgtcctggcgtgttattgctgctgctttccattctgcatccatcaagacccggaggagtgcctggtgccattcctgggggagttcctgggggagtcttctaccctggggctgggttgggagcgttgggtggcggagctctcgggcctggaggaaagccattgaagccaggtctcggggcattccccgcagtcaccttccccggagcactcgtgcccggtggggtagctgacgcagctgccgcttacaaggctgccaaggcaggcgctggtctggggggtgtgccaggtgtggggggtctcggtgtcagcgctggcgcagttgtccctcagcctggggcaggtgtcaagcctggcaaggtgccaggcgtcggcctgcccggagtgtatcccggaggcgtgctccctggcgctaggttccctggtgtgggggtgttgcccggagtgccaaccggtgccggagtcaaacccaaggcccctggtgtgggccctttcgggggaccacagcctggcgttcctctggggtatccaatcaaggcacccaaacttcctggcggatatggcctgccctataccactgggaagctcccatacggttacgggcctggcggtgtggccggagccgcaggcaaggccggataccctacgggcaccggcgtgggcccacaagcggctgcggcagctgccgctaaggcagccgctaaatttggggctggagcggcaggtgtactgcccggagtgggtggggctggggtgcctggcgtacctggcgctattcccggaatcgggggtatcgcgggtgtgggcactcctgcagccgctgccgctgctgcagcagccgcaaaggccgcaaagtattag

SEQ ID NO: 99408 - DNA, 531 bp, Artificial Sequence
  derived and/or modified sequence
atggctggtttgaccgctgcagctccaaggccaggtgtgctcctgttgctacttagcatcctccatcctagcaggccgggtggagttcccggagccattccaggaggggtgcctggcggtgtattttaccccggtgcagggctcggcgcactgggcggtggggcattgggcccaggagggaaacctttgaagcccgtccctggaggactcgccggagcgggtctgggtgctggattgggcgcatttcccgcagtgacctttcctggcgctcttgtacctggaggcgtggctgatgcggcagcggcatacaaagctgcgaaggcgggagccggtctggggggagttccaggggttggtggccttggggtaagcgccggtgccgtcgtgccccaaccgggtgctggcgtgaagcccggaaaagtgcctggagtcgggggagccttcgctggaataccaggtgtgggacctttcgggggaccacagcccggagtgcccctgggctaccctattaaggctcctaagcttccatag

SEQ ID NO: 99409 - DNA, 1992 bp, Artificial Sequence
  derived and/or modified sequence
atggccggactgaccgccgctgcaccgaggccaggtgtgttgctgctgctgcttagcattctgcatcctagcagacctggtggagtgcctggagccattcctggtggggtgcctggaggggttttctatccaggcgctggactcggagccctgggaggcggtgcgctcggaccaggaggcaagccattgaaacccgtgcccggagggctggccggtgccggactaggcgcaggcgctggtctcggcggagttcccggtgttgggggtctgggtgttagtgctggtgctgtggtccctcagccgggtgcaggcgtcaagcccggaaaagtgcccggagtgggacttcctggtgtgtacccgggaggagtgttacctggagccaggttccctggcgttggagtgcttcccggagtgcccaccggagcaggtgtaaagcctaaagcccctggcgtgggaggcgctttcgccggaatccctggcgttgggcctttcggcggtcctcagcccggagtgcccctgggatatcccataaaggctccaaaactgcccggaggttatggcctaccttacaccaccggaaaactcccatacggatacgggccaggaggcgtcgcgggagcagcgggtaaggctggctatccaactggcaccggcgtcggaccccaggccgcagctgccgcagcagccaaagctgctgccaaattcggggcaggtgctgctggcgtgctgcctggtgtaggcggtgcaggagtgccgggagtcccaggcgctatccccggaataggtggcatcgctggagtggggacacccgctgccgctgcagctgcagccgcagccgctaaagccgcaaaatacggcgctgccgctggtttagtgccaggcggaccaggttttggacctggtgtggtgggggtcccgggagcaggagtgcctggagtcggggttcctggtgctggaatccctgtggtcccgggagcaggaatccccggagctgcggtgcctggggtggttagcccggaagctgcggctaaagctgctgcaaaagccgcaaagtatggtgctagaccgggagtcggagtggggggtatacctacttatggggtgggtgccggaggattccccggttttggcgtcggagtggggggaattcccggtgttgcgggagtgccgggagtgggaggggttccgggtgtcgggggagttcccggtgtggggatctcccccgaggcgcaggccgcagcagctgcgaaggcggcaaagtacggtgtggggacccccgctgctgctgctgcgaaagcagctgccaaagcggctcagtttggcctagttccgggagtgggcgtagcgcctggggtaggagtggcccctgggattgggccaggaggcgtggctgctgcagctaagtccgcggcaaaagttgccgcaaaggcccagctcagagcagccgcaggtctcggcgcaggcattcctgggctcggtgtaggggtgggggtaccaggcctgggcgtaggcgcaggcgtgcccggactaggagtgggcgctggagtccccggtttcggtgccgtacccggtgccctcgccgctgcaaaggcagccaaatacggcgctgcagtacccggtgtcctggggggtctgggcgcactaggtggagtcggtatccccggtggcgttgtcggtgccggacccgctgctgcagctgcagcagccaaagctgccgctaaggctgctcagttcgggttggtgggagcagccggtctgggtgggctgggagtcggaggactgggcgtgcctggggtcggcggacttggtgggattccccctgcagccgcagccaaggctgccaagtacggagctgccggtctgggaggcgtcctgggcggtgctggtcaatttccactggggggagtagcagccaggccaggcttcggtctgtccccaatttttccaggaggagcttgcctgggtaaagcctgcggaagaaagaggaagtag

SEQ ID NO: 99410 - DNA, 2121 bp, Artificial Sequence
  derived and/or modified sequence
atggccggattaaccgcagcagccccaaggcctggtgtgctgctcctgttattgagcatccttcatccgtcacggccaggcggagtgcccggagctatacctggcggtgttcccggaggagtcttctaccctggggcaggcctgggggcactgggagggggagcgctaggcccaggaggcaagcccctgaagcccgtgcctggcggactagcaggcgcaggtctgggtgctggccttggggcttttcccgctgtaactttcccaggagctctggtgcctggaggcgttgctgacgccgctgcggcttataaagctgctaaggcaggagcagggctcggaggggtgcctggggtaggcggtcttggggtttcagccggagctgtggtgccgcagccaggcgctggggtaaagccgggaaaggtgcctggggttggcctgcccggagtataccctgggggtgtcttgccgggagctcggtttcccggtgtgggagtgttgcctggagtacctaccggggcaggggtaaaacctaaggccccaggtgttgggggtgcctttgccggaatcccaggagtggggccttttggcggaccacagcccggtgtgccactgggttatcccattaaagctcctaagctgccaggaggctacgggctgccctacacaactggaaagttaccatacggctacggtcccggaggtgtagctggcgcagctggaaaggcaggatacccgacaggcacaggagtggggccacaggccgcagccgcagccgcagccaaagccgctgctaagtttggtgccggtgccgctggggtactgcctggcgttggcggtgccggagtaccgggtgttcccggagccattcctgggatcgggggtattgccggagtgggtacccccgcagctgccgcagcggcagctgcagccgcaaaagccgctaagtacggagccgctgcaggcctggttccagggggaccaggttttggtcccggagtcgtgggcgttccgggagcaggcgtgcccggtgttggtgtgccaggcgcaggaataccagtggtgcccggtgcaggcatccctggcgctgctgtcccaggcgttgtgtcacctgaggccgctgcaaaagccgctgctaaggcagctaagtatggggctcgtcctggagtgggtgtagggggtataccaacatacggcgtaggcgcaggcggttttccaggatttggagtgggtgtggggggaatccctggtgttgcaggtgtgccaggcgtgggtggtgtgcccggagtcggaggagtccccggagtgggtatcagccccgaagctcaggccgctgccgctgccaaggcagccaagtacggggtagggaccccagctgcagccgctgcaaaggctgccgcaaaagcagctcagtttggtttagtaccaggagttggagtggctccaggagttggtgttgcgcctggggtgggtgtggcaccaggagtggggcttgctcccggagtcggagtggcccctggcgtgggtgttgcccctggagttggcgtcgctcccggaatagggcctgggggtgtcgctgcagctgctaagtctgctgccaaggttgccgctaaggctcaacttagagccgctgccggattgggggctggcatcccagggctcggcgtcggagtgggtgtaccgggtttaggtgtgggtgccggagtacctggcctgggtgttggcgctggcgtcccgggatttggagccgttcctggcgctctagcagctgcgaaggccgcaaagtatggcgctgcagttccgggagttctggggggactgggtgcgctgggaggcgtgggcattccagggggagttgtgggcgcaggcccagccgcagcagccgctgctgctaaagcggcagcgaaagccgctcaatttggcctcgttggggctgctgggctgggcggtttgggagtgggaggactgggggtgccaggcgtagggggactggggggaataccccctgcagccgcagccaaggcagccaagtatggcgtggccgctcgcccaggattcggactgagccctattttcccaggcggtgcctgtcttggaaaagcttgcggtagaaaaagaaagtag

SEQ ID NO: 99411 - DNA, 2145 bp, Artificial Sequence
  derived and/or modified sequence
atggcaggactgacagcagccgctcccaggccaggagttttgctgcttttactttctatcctgcaccccagtcgacctgggggagtgcctggcgctatacctggaggcgtacccggtggagtcttctatccagccctggggccaggcggtaaacccttgaaaccagtgccaggcggactggcaggggctgggctgggggcaggtctgggcgcatttcctgcggtgacgttcccgggagctttggttccgggtggcgtcgcagatgctgccgctgcatataaagccgcaaaggccggagccggactcggcggtgtgccaggcgtggggggactgggagtgtccgccggtgcagttgtccctcaacctggggcaggagtcaaaccaggaaaagtgccaggggtcggactccccggagtctaccctggtggcgtactccctggggctaggttccctggagtgggagttcttccgggagtgcctactggcgcaggggttaagccaaaagcacccggagtggggggtgcttttgctggaatcccaggtgtggggccattcggcggaccgcagccaggggtgccgttgggttatcctattaaagccccaaagttaccagggggttacggtctcccctacaccaccgggaaattgccatacggttatggaccgggaggggtggccggtgccgcagggaaggcaggctaccctaccgggactggggtcggaccacaggccgctgctgccgcagccgcaaaggcagctgccaagttcggggctggtgccgctggagttctccccggagtaggcggtgctggcgtgcctggagttcccggtgctattcctgggattgggggtatcgcgggagtcggaacgccggcagctgccgctgccgcagctgctgctgccaaagccgctaagtatggcgcagctgccggattggtccccggaggcccaggtttcggaccaggtgtcgtcggtgtgcctggcgctggcgtgcccggtgtgggtgtccctggcgctgggattccagttgttccaggggctggcattcctggggctgcagtcccaggtgtcgtgtctcccgaagccgctgcaaaggcagccgctaaagctgcgaaatacggtgctcgccctggcgtgggtgtaggtgggatacccacatatggtgtaggcgctggaggtttccccggatttggcgtcggagtcggagggatccccggagttgctggcgtccccggagtggggggagtcccaggcgtgggtggcgtccccggtgtggggatttctccagaagcacaggcggctgcagccgcaaaagccgctaagtatggcgtgggaaccccagctgctgccgcagctaaagctgcagcaaaggccgcacagtttggactcgtaccgggtgttggcgtggcacccggagtcggggtggcgccaggggtcggtgtggcccctggtgtgggcctcgctccaggtgtgggggttgctccaggagtaggagtcgcccctggtgtaggcgtggcccctggaattggccctggcggagtggccgcagctgccaagagcgcggctaaggtcgctgctaaggcccagcttcgcgctgccgctggactcggagcaggaattccgggtctcggtgtgggggttggagtacctggtctcggcgtgggggctggcgtacctggactgggcgtaggcgctggcgtacccggattcggcgctgtgcctggggcattggctgccgcaaaagccgctaagtatggtgccgcagtgccgggagtgctcggcggattaggagctctggggggagtgggcatccctggcggagtagtcggagctggcccagcggcagcagctgctgccgcaaaagctgccgctaaagccgctcagtttgggctcgtcggcgctgctgggctaggtggactgggggtcggtgggctgggggtcccaggggtgggcggtctggggggaatcccccctgccgcagcagccaaggcagccaagtacggtgctgcgggattgggaggcgtcctgggcggtgccggtcaatttcccctgggtggagtggctgctcgacccggtttcggtctatcaccaattttccctggaggggcatgtctaggcaaagcttgtgggaggaaacggaaatag

SEQ ID NO: 99412 - DNA, 3781 bp, Artificial Sequence
  derived and/or modified sequence
cctcccttctgcttcctctcccgagggctgtcctggcagaggcccccctcgctctttctggcgggaacagggccagcagcgaaagaacagtcgcagagggaaagcgggaaagagatgggggaaagtgtgtgtgtgtgagtgtgtgcttgtgtgcatgtgtgtgcgtgtgtgtgtcaaggaaaaaagctcgcagtccagcagcccgggcctgggaggcttgtgagccgggcctttcgtaattgtcccctccccgcggccccctcccccaggcctcccccctctcccgccctcccgcccgccctctctccctccctctttccctcacagccgacgaggcaacaattaggctttggggataaaacgaggtgcggagagcgggctggggcatttctccccgagatggcgggtctgacggcggcggccccgcggcccggagtcctcctgctcctgctgtccatcctccacccctctcggcctggaggggtccctggggccattcctggtggagttcctggaggagtcttttatccaggggctggtctcggagcccttggaggaggagcgctggggcctggaggcaaacctcttaagccagttcccggagggcttgcgggtgctggccttggggcagggctcggcgccttccccgcagttacctttccgggggctctggtgcctggtggagtggctgacgctgctgcagcctataaagctgctaaggctggcgctgggcttggtggtgtcccaggagttggtggcttaggagtgtctgcaggtgcggtggttcctcagcctggagccggagtgaagcctgggaaagtgccgggtgtggggctgccaggtgtatacccaggtggcgtgctcccaggagctcggttccccggtgtgggggtgctccctggagttcccactggagcaggagttaagcccaaggctccaggtgtaggtggagcttttgctggaatcccaggagttggaccctttgggggaccgcaacctggagtcccactggggtatcccatcaaggcccccaagctgcctggtggctatggactgccctacaccacagggaaactgccctatggctatgggcccggaggagtggctggtgcagcgggcaaggctggttacccaacagggacaggggttggcccccaggcagcagcagcagcggcagctaaagcagcagcaaagttcggtgctggagcagccggagtcctccctggtgttggaggggctggtgttcctggcgtgcctggggcaattcctggaattggaggcatcgcaggcgttgggactccagctgcagctgcagctgcagcagcagccgctaaggcagccaagtatggagctgctgcaggcttagtgcctggtgggccaggctttggcccgggagtagttggtgtcccaggagctggcgttccaggtgttggtgtcccaggagctgggattccagttgtcccaggtgctgggatcccaggtgctgcggttccaggggttgtgtcaccagaagcagctgctaaggcagctgcaaaggcagccaaatacggggccaggcccggagtcggagttggaggcattcctacttacggggttggagctgggggctttcccggctttggtgtcggagtcggaggtatccctggagtcgcaggtgtccctggtgtcggaggtgttcccggagtcggaggtgtcccgggagttggcatttcccccgaagctcaggcagcagctgccgccaaggctgccaagtacggagtggggaccccagcagctgcagctgctaaagcagccgccaaagccgcccagtttgggttagttcctggtgtcggcgtggctcctggagttggcgtggctcctggtgtcggtgtggctcctggagttggcttggctcctggagttggcgtggctcctggagttggtgtggctcctggcgttggcgtggctcccggcattggccctggtggagttgcagctgcagcaaaatccgctgccaaggtggctgccaaagcccagctccgagctgcagctgggcttggtgctggcatccctggacttggagttggtgtcggcgtccctggacttggagttggtgctggtgttcctggacttggagttggtgctggtgttcctggcttcggggcagtacctggagccctggctgccgctaaagcagccaaatatggagcagcagtgcctggggtccttggagggctcggggctctcggtggagtaggcatcccaggcggtgtggtgggagccggacccgccgccgccgctgccgcagccaaagctgctgccaaagccgcccagtttggcctagtgggagccgctgggctcggaggactcggagtcggagggcttggagttccaggtgttgggggccttggaggtatacctccagctgcagccgctaaagcagctaaatacggtgctgctggccttggaggtgtcctagggggtgccgggcagttcccacttggaggagtggcagcaagacctggcttcggattgtctcccattttcccaggtggggcctgcctggggaaagcttgtggccggaagagaaaatgagcttcctaggacccctgactcacgacctcatcaacgttggtgctactgcttggtggagaatgtaaaccctttgtaaccccatcccatgcccctccgactccccaccccaggagggaacgggcaggccgggcggccttgcagatccacagggcaaggaaacaagaggggagcggccaagtgccccgaccaggaggccccctacttcagaggcaagggccatgtggtcctggccccccaccccatcccttcccacctaggagctccccctccacacagcctccatctccaggggaacttggtgctacacgctggtgctcttatcttcctggggggagggaggagggaagggtggcccctcggggaaccccctacctggggctcctctaaagatggtgcagacacttcctgggcagtcccagctccccctgcccaccaggacccaccgttggctgccatccagttggtacccaagcacctgaagcctcaaagctggattcgctctagcatccctcctctcctgggtccacttggccgtctcctccccaccgatcgctgttccccacatctggggcgcttttgggttggaaaaccaccccacactgggaatagccaccttgcccttgtagaatccatccgcccatccgtccattcatccatcggtccgtccatccatgtccccagttgaccgcccggcaccactagctggctgggtgcacccaccatcaacctggttgacctgtcatggccgcctgtgccctgcctccacccccatcctacactcccccagggcgtgcggggctgtgcagactggggtgccaggcatctcctccccacccggggtgtccccacatgcagtactgtataccccccatccctccctcggtccactgaacttcagagcagttcccattcctgccccgcccatctttttgtgtctcgctgtgatagatcaataaatattttattttttgtcctggatatttggggattatttttgattgttgatattctcttttggttttattgttgtggttcattgaaaaaaaaagataatttttttttctgatccggggagctgtatccccagtagaaaaaacattttaatcactctaatataactctggatgaaacacacctttttttttaataagaaaagagaattaactgcttcagaaatgactaataaatgaaaaacctttaaaggaaa

SEQ ID NO: 99413 - DNA, 2274 bp, Artificial Sequence
  derived and/or modified sequence
atggcgggtctgacggcggcggccccgcggcccggagtcctcctgctcctgctgtccatcctccacccctctcggcctggaggggtccctggggccattcctggtggagttcctggaggagtcttttatccaggggctggtctcggagcccttggaggaggagcgctggggcctggaggcaaacctcttaagccagttcccggagggcttgcgggtgctggccttggggcagggctcggcgccttccccgcagttacctttccgggggctctggtgcctggtggagtggctgacgctgctgcagcctataaagctgctaaggctggcgctgggcttggtggtgtcccaggagttggtggcttaggagtgtctgcaggtgcggtggttcctcagcctggagccggagtgaagcctgggaaagtgccgggtgtggggctgccaggtgtatacccaggtggcgtgctcccaggagctcggttccccggtgtgggggtgctccctggagttcccactggagcaggagttaagcccaaggctccaggtgtaggtggagcttttgctggaatcccaggagttggaccctttgggggaccgcaacctggagtcccactggggtatcccatcaaggcccccaagctgcctggtggctatggactgccctacaccacagggaaactgccctatggctatgggcccggaggagtggctggtgcagcgggcaaggctggttacccaacagggacaggggttggcccccaggcagcagcagcagcggcagctaaagcagcagcaaagttcggtgctggagcagccggagtcctccctggtgttggaggggctggtgttcctggcgtgcctggggcaattcctggaattggaggcatcgcaggcgttgggactccagctgcagctgcagctgcagcagcagccgctaaggcagccaagtatggagctgctgcaggcttagtgcctggtgggccaggctttggcccgggagtagttggtgtcccaggagctggcgttccaggtgttggtgtcccaggagctgggattccagttgtcccaggtgctgggatcccaggtgctgcggttccaggggttgtgtcaccagaagcagctgctaaggcagctgcaaaggcagccaaatacggggccaggcccggagtcggagttggaggcattcctacttacggggttggagctgggggctttcccggctttggtgtcggagtcggaggtatccctggagtcgcaggtgtccctggtgtcggaggtgttcccggagtcggaggtgtcccgggagttggcatttcccccgaagctcaggcagcagctgccgccaaggctgccaagtacggagtggggaccccagcagctgcagctgctaaagcagccgccaaagccgcccagtttgggttagttcctggtgtcggcgtggctcctggagttggcgtggctcctggtgtcggtgtggctcctggagttggcttggctcctggagttggcgtggctcctggagttggtgtggctcctggcgttggcgtggctcccggcattggccctggtggagttgcagctgcagcaaaatccgctgccaaggtggctgccaaagcccagctccgagctgcagctgggcttggtgctggcatccctggacttggagttggtgtcggcgtccctggacttggagttggtgctggtgttcctggacttggagttggtgctggtgttcctggcttcggggcaggtgcagatgagggagttaggcggagcctgtcccctgagctcagggaaggagatccctcctcctctcagcacctccccagcaccccctcatcacccagggtacctggagccctggctgccgctaaagcagccaaatatggagcagcagtgcctggggtccttggagggctcggggctctcggtggagtaggcatcccaggcggtgtggtgggagccggacccgccgccgccgctgccgcagccaaagctgctgccaaagccgcccagtttggcctagtgggagccgctgggctcggaggactcggagtcggagggcttggagttccaggtgttgggggccttggaggtatacctccagctgcagccgctaaagcagctaaatacggtgctgctggccttggaggtgtcctagggggtgccgggcagttcccacttggaggagtggcagcaagacctggcttcggattgtctcccattttcccaggtggggcctgcctggggaaagcttgtggccggaagagaaaatga

SEQ ID NO: 99414 - DNA, 3361 bp, Artificial Sequence
  derived and/or modified sequence
ggggcatttctccccgagatggcgggtctgacggcggcggccccgcggcccggagtcctcctgctcctgctgtccatcctccacccctctcggcctggaggggtccctggggccattcctggtggagttcctggaggagtcttttatccaggggctggtctcggagcccttggaggaggagcgctggggcctggaggcaaacctcttaagccagttcccggagggcttgcgggtgctggccttggggcagggctcggcgccttccccgcagttacctttccgggggctctggtgcctggtggagtggctgacgctgctgcagcctataaagctgctaaggctggcgctgggcttggtggtgtcccaggagttggtggcttaggagtgtctgcagccccttctgtgccaggtgcggtggttcctcagcctggagccggagtgaagcctgggaaagtgccgggtgtggggctgccaggtgtatacccaggtggcgtgctcccaggagctcggttccccggtgtgggggtgctccctggagttcccactggagcaggagttaagcccaaggctccaggtgtaggtggagcttttgctggaatcccaggagttggaccctttgggggaccgcaacctggagtcccactggggtatcccatcaaggcccccaagctgcctggtggctatggactgccctacaccacagggaaactgccctatggctatgggcccggaggagtggctggtgcagcgggcaaggctggttacccaacagggacaggggttggcccccaggcagcagcagcagcggcagctaaagcagcagcaaagttcggtgctggagcagccggagtcctccctggtgttggaggggctggtgttcctggcgtgcctggggcaattcctggaattggaggcatcgcaggcgttgggactccagctgcagctgcagctgcagcagcagccgctaaggcagccaagtatggagctgctgcaggcttagtgcctggtgggccaggctttggcccgggagtagttggtgtcccaggagctggcgttccaggtgttggtgtcccaggagctgggattccagttgtcccaggtgctgggatcccaggtgctgcggttccaggggttgtgtcaccagaagcagctgctaaggcagctgcaaaggcagccaaatacggggccaggcccggagtcggagttggaggcattcctacttacggggttggagctgggggctttcccggctttggtgtcggagtcggaggtatccctggagtcgcaggtgtccctggtgtcggaggtgttcccggagtcggaggtgtcccgggagttggcatttcccccgaagctcaggcagcagctgccgccaaggctgccaagtacggagtggggaccccagcagctgcagctgctaaagcagccgccaaagccgcccagtttgggttagttcctggtgtcggcgtggctcctggagttggcgtggctcctggtgtcggtgtggctcctggagttggcttggctcctggagttggcgtggctcctggagttggtgtggctcctggcgttggcgtggctcccggcattggccctggtggagttgcagctgcagcaaaatccgctgccaaggtggctgccaaagcccagctccgagctgcagctgggcttggtgctggcatccctggacttggagttggtgtcggcgtccctggacttggagttggtgctggtgttcctggacttggagttggtgctggtgttcctggcttcggggcagtacctggagccctggctgccgctaaagcagccaaatatggagcagcagtgcctggggtccttggagggctcggggctctcggtggagtaggcatcccaggcggtgtggtgggagccggacccgccgccgccgctgccgcagccaaagctgctgccaaagccgcccagtttggcctagtgggagccgctgggctcggaggactcggagtcggagggcttggagttccaggtgttgggggccttggaggtatacctccagctgcagccgctaaagcagctaaatacggagtggcagcaagacctggcttcggattgtctcccattttcccaggtggggcctgcctggggaaagcttgtggccggaagagaaaatgagcttcctaggacccctgactcacgacctcatcaacgttggtgctactgcttggtggagaatgtaaaccctttgtaaccccatcccatgcccctccgactccccaccccaggagggaacgggcaggccgggcggccttgcagatccacagggcaaggaaacaagaggggagcggccaagtgccccgaccaggaggccccctacttcagaggcaagggccatgtggtcctggccccccaccccatcccttcccacctaggagctccccctccacacagcctccatctccaggggaacttggtgctacacgctggtgctcttatcttcctggggggagggaggagggaagggtggcccctcggggaaccccctacctggggctcctctaaagatggtgcagacacttcctgggcagtcccagctccccctgcccaccaggacccaccgttggctgccatccagttggtacccaagcacctgaagcctcaaagctggattcgctctagcatccctcctctcctgggtccacttggccgtctcctccccaccgatcgctgttccccacatctggggcgcttttgggttggaaaaccaccccacactgggaatagccaccttgcccttgtagaatccatccgcccatccgtccattcatccatcggtccgtccatccatgtccccagttgaccgcccggcaccactagctggctgggtgcacccaccatcaacctggttgacctgtcatggccgcctgtgccctgcctccacccccatcctacactcccccagggcgtgcggggctgtgcagactggggtgccaggcatctcctccccacccggggtgtccccacatgcagtactgtataccccccatccctccctcggtccactgaacttcagagcagttcccattcctgccccgcccatctttttgtgtctcgctgtgatagatcaataaatattttattttttgtcctggatatttggggattatttttgattgttgatattctcttttggttttattgttgtggttcattgaaaaaaaaagataatttttttttctgatccggggagctgtatccccagtagaaaaaacattttaatcactctaatataactctggatgaaacacacctttttttttaataagaaaagagaattaactgcttcagaaatgactaataaatgaaaaacctttaaaggaaa

SEQ ID NO: 99415 - DNA, 3674 bp, Artificial Sequence
  derived and/or modified sequence
ctccctctttccctcacagccgacgaggcaacaattaggctttggggataaaacgaggtgcggagagcgggctggggcatttctccccgagatggcgggtctgacggcggcggccccgcggcccggagtcctcctgctcctgctgtccatcctccacccctctcggcctggaggggtccctggggccattcctggtggagttcctggaggagtcttttatccaggggctggtctcggagcccttggaggaggagcgctggggcctggaggcaaacctcttaagccagttcccggagggcttgcgggtgctggccttggggcagggctcggcgccttccccgcagttacctttccgggggctctggtgcctggtggagtggctgacgctgctgcagcctataaagctgctaaggctggcgctgggcttggtggtgtcccaggagttggtggcttaggagtgtctgcaggtgcggtggttcctcagcctggagccggagtgaagcctgggaaagtgccgggtgtggggctgccaggtgtatacccaggtggcgtgctcccaggagctcggttccccggtgtgggggtgctccctggagttcccactggagcaggagttaagcccaaggctccaggtgtaggtggagcttttgctggaatcccaggagttggaccctttgggggaccgcaacctggagtcccactggggtatcccatcaaggcccccaagctgcctggtggctatggactgccctacaccacagggaaactgccctatggctatgggcccggaggagtggctggtgcagcgggcaaggctggttacccaacagggacaggggttggcccccaggcagcagcagcagcggcagctaaagcagcagcaaagttcggtgctggagcagccggagtcctccctggtgttggaggggctggtgttcctggcgtgcctggggcaattcctggaattggaggcatcgcaggcgttgggactccagctgcagctgcagctgcagcagcagccgctaaggcagccaagtatggagctgctgcaggcttagtgcctggtgggccaggctttggcccgggagtagttggtgtcccaggagctggcgttccaggtgttggtgtcccaggagctgggattccagttgtcccaggtgctgggatcccaggtgctgcggttccaggggttgtgtcaccagaagcagctgctaaggcagctgcaaaggcagccaaatacggggccaggcccggagtcggagttggaggcattcctacttacggggttggagctgggggctttcccggctttggtgtcggagtcggaggtatccctggagtcgcaggtgtccctggtgtcggaggtgttcccggagtcggaggtgtcccgggagttggcatttcccccgaagctcaggcagcagctgccgccaaggctgccaagtacggtgctgcaggagcaggagtgctgggtgggctagtgccaggtgccccaggcgcagtcccaggtgtgccgggcacgggaggagtgccaggagtggggaccccagcagctgcagctgctaaagcagccgccaaagccgcccagtttgctcttctcaatcttgcagggttagttcctggtgtcggcgtggctcctggagttggcgtggctcctggtgtcggtgtggctcctggagttggcttggctcctggagttggcgtggctcctggagttggtgtggctcctggcgttggcgtggctcccggcattggccctggtggagttgcagctgcagcaaaatccgctgccaaggtggctgccaaagcccagctccgagctgcagctgggcttggtgctggcatccctggacttggagttggtgtcggcgtccctggacttggagttggtgctggtgttcctggacttggagttggtgctggtgttcctggcttcggggcaggtgcagatgagggagttaggcggagcctgtcccctgagctcagggaaggagatccctcctcctctcagcacctccccagcaccccctcatcacccagggtacctggagccctggctgccgctaaagcagccaaatatggagcagcagtgcctggggtccttggagggctcggggctctcggtggagtaggcatcccaggcggtgtggtgggagccggacccgccgccgccgctgccgcagccaaagctgctgccaaagccgcccagtttggcctagtgggagccgctgggctcggaggactcggagtcggagggcttggagttccaggtgttgggggccttggaggtatacctccagctgcagccgctaaagcagctaaatacggtgctgctggccttggaggtgtcctagggggtgccgggcagttcccacttggaggagtggcagcaagacctggcttcggattgtctcccattttcccaggtggggcctgcctggggaaagcttgtggccggaagagaaaatgagcttcctaggacccctgactcacgacctcatcaacgttggtgctactgcttggtggagaatgtaaaccctttgtaaccccatcccatgcccctccgactccccaccccaggagggaacgggcaggccgggcggccttgcagatccacagggcaaggaaacaagaggggagcggccaagtgccccgaccaggaggccccctacttcagaggcaagggccatgtggtcctggccccccaccccatcccttcccacctaggagctccccctccacacagcctccatctccaggggaacttggtgctacacgctggtgctcttatcttcctggggggagggaggagggaagggtggcccctcggggaaccccctacctggggctcctctaaagatggtgcagacacttcctgggcagtcccagctccccctgcccaccaggacccaccgttggctgccatccagttggtacccaagcacctgaagcctcaaagctggattcgctctagcatccctcctctcctgggtccacttggccgtctcctccccaccgatcgctgttccccacatctggggcgcttttgggttggaaaaccaccccacactgggaatagccaccttgcccttgtagaatccatccgcccatccgtccattcatccatcggtccgtccatccatgtccccagttgaccgcccggcaccactagctggctgggtgcacccaccatcaacctggttgacctgtcatggccgcctgtgccctgcctccacccccatcctacactcccccagggcgtgcggggctgtgcagactggggtgccaggcatctcctccccacccggggtgtccccacatgcagtactgtataccccccatccctccctcggtccactgaacttcagagcagttcccattcctgccccgcccatctttttgtgtctcgctgtgatagatcaataaatattttattttttgtcctggatatttggggattatttttgattgttgatattctcttttggttttattgttgtggttcattgaaaaaaaaagataatttttttttctgatccggggagctgtatccccagtagaaaaaacattttaatcactctaatataactctggatgaaacacacctttttttttaataagaaaagagaattaactgcttcagaaatgactaataaatgaaaaacctttaaagg

SEQ ID NO: 99416 - DNA, 3043 bp, Artificial Sequence
  derived and/or modified sequence
cggagagcgggctggggcatttctccccgagatggcgggtctgacggcggcggccccgcggcccggagtcctcctgctcctgctgtccatcctccacccctctcggcctggaggggtccctggggccattcctggtggagttcctggaggagtcttttatccagcgctggggcctggaggcaaacctcttaagccagttcccggagggcttgcgggtgctggccttggggcagggctcggcgccttccccgcagttacctttccgggggctctggtgcctggtggagtggctgacgctgctgcagcctataaagctgctaaggctggcgctgggcttggtggtgtcccaggagttggtggcttaggagtgtctgcaggtgcggtggttcctcagcctggagccggagtgaagcctgggaaagtgccgggtgtggggctgccaggtgtatacccaggtggcgtgctcccaggagctcggttccccggtgtgggggtgctccctggagttcccactggagcaggagttaagcccaaggctccaggtgtaggtggagcttttgctggaatcccaggagttggaccctttgggggaccgcaacctggagtcccactggggtatcccatcaaggcccccaagctgcctggtggctatggactgccctacaccacagggaaactgccctatggctatgggcccggaggagtggctggtgcagcgggcaaggctggttacccaacagggacaggggttggcccccaggcagcagcagcagcggcagctaaagcagcagcaaagttcggtgctggagcagccggagtcctccctggtgttggaggggctggtgttcctggcgtgcctggggcaattcctggaattggaggcatcgcaggcgttgggactccagctgcagctgcagctgcagcagcagccgctaaggcagccaagtatggagctgctgcaggcttagtgcctggtgggccaggctttggcccgggagtagttggtgtcccaggagctggcgttccaggtgttggtgtcccaggagctgggattccagttgtcccaggtgctgggatcccaggtgctgcggttccaggggttgtgtcaccagaagcagctgctaaggcagctgcaaaggcagccaaatacggggccaggcccggagtcggagttggaggcattcctacttacggggttggagctgggggctttcccggctttggtgtcggagtcggaggtatccctggagtcgcaggtgtccctggtgtcggaggtgttcccggagtcggaggtgtcccgggagttggcatttcccccgaagctcaggcagcagctgccgccaaggctgccaagtacgggttagttcctggtgtcggcgtggctcctggagttggcgtggctcctggtgtcggtgtggctcctggagttggcttggctcctggagttggcgtggctcctggagttggtgtggctcctggcgttggcgtggctcccggcattggccctggtggagttgcagctgcagcaaaatccgctgccaaggtggctgccaaagcccagctccgagctgcagctgggcttggtgctggcatccctggacttggagttggtgtcggcgtccctggacttggagttggtgctggtgttcctggacttggagttggtgctggtgttcctggcttcggggcagtacctggagccctggctgccgctaaagcagccaaatatggagcagcagtgcctggggtccttggagggctcggggctctcggtggagtaggcatcccaggcggtgtggtgggagccggacccgccgccgccgctgccgcagccaaagctgctgccaaagccgcccagtttggcctagtgggagccgctgggctcggaggactcggagtcggagggcttggagttccaggtgttgggggccttggaggtatacctccagctgcagccgctaaagcagctaaatacggagtggcagcaagacctggcttcggattgtctcccattttcccaggtggggcctgcctggggaaagcttgtggccggaagagaaaatgagcttcctaggacccctgactcacgacctcatcaacgttggtgctactgcttggtggagaatgtaaaccctttgtaaccccatcccatgcccctccgactccccaccccaggagggaacgggcaggccgggcggccttgcagatccacagggcaaggaaacaagaggggagcggccaagtgccccgaccaggaggccccctacttcagaggcaagggccatgtggtcctggccccccaccccatcccttcccacctaggagctccccctccacacagcctccatctccaggggaacttggtgctacacgctggtgctcttatcttcctggggggagggaggagggaagggtggcccctcggggaaccccctacctggggctcctctaaagatggtgcagacacttcctgggcagtcccagctccccctgcccaccaggacccaccgttggctgccatccagttggtacccaagcacctgaagcctcaaagctggattcgctctagcatccctcctctcctgggtccacttggccgtctcctccccaccgatcgctgttccccacatctggggcgcttttgggttggaaaaccaccccacactgggaatagccaccttgcccttgtagaatccatccgcccatccgtccattcatccatcggtccgtccatccatgtccccagttgaccgcccggcaccactagctggctgggtgcacccaccatcaacctggttgacctgtcatggccgcctgtgccctgcctccacccccatcctacactcccccagggcgtgcggggctgtgcagactggggtgccaggcatctcctccccacccggggtgtccccacatgcagtactgtataccccccatccctccctcggtccactgaacttcagagcagttcccattcctgccccgcccatctttttgtgtctcgctgtgatagatcaataaatattttattttttgtcctgga

SEQ ID NO: 99417 - DNA, 3109 bp, Artificial Sequence
  derived and/or modified sequence
atttctccccgagatggcgggtctgacggcggcggccccgcggcccggagtcctcctgctcctgctgtccatcctccacccctctcggcctggaggggtccctggggccattcctggtggagttcctggaggagtcttttatccaggggctggtctcggagcccttggaggaggagcgctggggcctggaggcaaacctcttaagccagttcccggagggcttgcgggtgctggccttggggcagggctcggcgccttccccgcagttacctttccgggggctctggtgcctggtggagtggctgacgctgctgcagcctataaagctgctaaggctggcgctgggcttggtggtgtcccaggagttggtggcttaggagtgtctgcaggtgcggtggttcctcagcctggagccggagtgaagcctgggaaagtgccgggtgtggggctgccaggtgtatacccaggtggcgtgctcccaggagctcggttccccggtgtgggggtgctccctggagttcccactggagcaggagttaagcccaaggctccaggtgtaggtggagcttttgctggaatcccaggagttggaccctttgggggaccgcaacctggagtcccactggggtatcccatcaaggcccccaagctgcctggtggctatggactgccctacaccacagggaaactgccctatggctatgggcccggaggagtggctggtgcagcgggcaaggctggttacccaacagggacaggggttggcccccaggcagcagcagcagcggcagctaaagcagcagcaaagttcggtgctggagcagccggagtcctccctggtgttggaggggctggtgttcctggcgtgcctggggcaattcctggaattggaggcatcgcaggcgttgggactccagctgcagctgcagctgcagcagcagccgctaaggcagccaagtatggagctgctgcaggcttagtgcctggtgggccaggctttggcccgggagtagttggtgtcccaggagctggcgttccaggtgttggtgtcccaggagctgggattccagttgtcccaggtgctgggatcccaggtgctgcggttccaggggttgtgtcaccagaagcagctgctaaggcagctgcaaaggcagccaaatacggggccaggcccggagtcggagttggaggcattcctacttacggggttggagctgggggctttcccggctttggtgtcggagtcggaggtatccctggagtcgcaggtgtccctggtgtcggaggtgttcccggagtcggaggtgtcccgggagttggcatttcccccgaagctcaggcagcagctgccgccaaggctgccaagtacgggttagttcctggtgtcggcgtggctcctggagttggcgtggctcctggtgtcggtgtggctcctggagttggcttggctcctggagttggcgtggctcctggagttggtgtggctcctggcgttggcgtggctcccggcattggccctggtggagttgcagctgcagcaaaatccgctgccaaggtggctgccaaagcccagctccgagctgcagctgggcttggtgctggcatccctggacttggagttggtgtcggcgtccctggacttggagttggtgctggtgttcctggacttggagttggtgctggtgttcctggcttcggggcagtacctggagccctggctgccgctaaagcagccaaatatggagcagcagtgcctggggtccttggagggctcggggctctcggtggagtaggcatcccaggcggtgtggtgggagccggacccgccgccgccgctgccgcagccaaagctgctgccaaagccgcccagtttggcctagtgggagccgctgggctcggaggactcggagtcggagggcttggagttccaggtgttgggggccttggaggtatacctccagctgcagccgctaaagcagctaaatacggtgctgctggccttggaggtgtcctagggggtgccgggcagttcccacttggaggagtggcagcaagacctggcttcggattgtctcccattttcccaggtggggcctgcctggggaaagcttgtggccggaagagaaaatgagcttcctaggacccctgactcacgacctcatcaacgttggtgctactgcttggtggagaatgtaaaccctttgtaaccccatcccatgcccctccgactccccaccccaggagggaacgggcaggccgggcggccttgcagatccacagggcaaggaaacaagaggggagcggccaagtgccccgaccaggaggccccctacttcagaggcaagggccatgtggtcctggccccccaccccatcccttcccacctaggagctccccctccacacagcctccatctccaggggaacttggtgctacacgctggtgctcttatcttcctggggggagggaggagggaagggtggcccctcggggaaccccctacctggggctcctctaaagatggtgcagacacttcctgggcagtcccagctccccctgcccaccaggacccaccgttggctgccatccagttggtacccaagcacctgaagcctcaaagctggattcgctctagcatccctcctctcctgggtccacttggccgtctcctccccaccgatcgctgttccccacatctggggcgcttttgggttggaaaaccaccccacactgggaatagccaccttgcccttgtagaatccatccgcccatccgtccattcatccatcggtccgtccatccatgtccccagttgaccgcccggcaccactagctggctgggtgcacccaccatcaacctggttgacctgtcatggccgcctgtgccctgcctccacccccatcctacactcccccagggcgtgcggggctgtgcagactggggtgccaggcatctcctccccacccggggtgtccccacatgcagtactgtataccccccatccctccctcggtccactgaacttcagagcagttcccattcctgccccgcccatctttttgtgtctcgctgtgatagatcaataaatattttattttttgtcctgga

SEQ ID NO: 99418 - DNA, 658 bp, Artificial Sequence
  derived and/or modified sequence
gcatttctccccgagatggcgggtctgacggcggcggccccgcggcccggagtcctcctgctcctgctgtccatcctccacccctctcggcctggaggggtccctggggccattcctggtggagttcctggaggagtcttttatccaggggctggtctcggagcccttggaggaggagcgctggggcctggaggcaaacctcttaagccagttcccggagggcttgcgggtgctggccttggggcagggctcggcgccttccccgcagttacctttccgggggctctggtgcctggtggagtggctgacgctgctgcagcctataaagctgctaaggctggcgctgggcttggtggtgtcccaggagttggtggcttaggagtgtctgcaggtgcggtggttcctcagcctggagccggagtgaagcctgggaaagtgccgggtgtggggctgccaggtgtatacccaggtggcgtgctcccaggagttggaccctttgggggaccgcaacctggagtcccactggggtatcccatcaaggcccccaagctgcctggtggctatggactgccctacaccacagggaaactgccctatggctatgggcccggaggagtggctggtgcagcgggcaaggctggttacccaacagggacag

SEQ ID NO: 99419 - DNA, 512 bp, Artificial Sequence
  derived and/or modified sequence
tttctccccgagatggcgggtctgacggcggcggccccgcggcccggagtcctcctgctcctgctgtccatcctccacccctctcggcctggaggggtccctggggccattcctggtggagttcctggaggagtcttttatccaggggctggtctcggagcccttggaggaggagcgctggggcctggaggcaaacctcttaagccagttcccggagggcttgcgggtgctggccttggggcagggctcggcgccttccccgcagttacctttccgggggctctggtgcctggtggagtggctgacgctgctgcagcctataaagctgctaaggctggagttggaccctttgggggaccgcaacctggagtcccactggggtatcccatcaaggcccccaagctgcctggtggctatggactgccctacaccacagggaaactgccctatggctatgggcccggaggagtggctggtgcagcgggcaaggctggttacccaacagggacagg

SEQ ID NO: 99420 - DNA, 3298 bp, Artificial Sequence
  derived and/or modified sequence
gcatttctccccgagatggcgggtctgacggcggcggccccgcggcccggagtcctcctgctcctgctgtccatcctccacccctctcggcctggaggggtccctggggccattcctggtggagttcctggaggagtcttttatccaggggctggtctcggagcccttggaggaggagcgctggggcctggaggcaaacctcttaagccagttcccggagggcttgcgggtgctggccttggggcagggctcggcgccttccccgcagttacctttccgggggctctggtgcctggtggagtggctgacgctgctgcagcctataaagctgctaaggctggcgctgggcttggtggtgtcccaggagttggtggcttaggagtgtctgcagccccttctgtgccaggtgcggtggttcctcagcctggagccggagtgaagcctgggaaagtgccgggtgtggggctgccaggtgtatacccaggtggcgtgctcccaggagctcggttccccggtgtgggggtgctccctggagttcccactggagcaggagttaagcccaaggctccaggtgtaggtggagcttttgctggaatcccaggagttggaccctttgggggaccgcaacctggagtcccactggggtatcccatcaaggcccccaagctgcctggtggctatggactgccctacaccacagggaaactgccctatggctatgggcccggaggagtggctggtgcagcgggcaaggctggttacccaacagggacaggggttggcccccaggcagcagcagcagcggcagctaaagcagcagcaaagttcggtgctggagcagccggagtcctccctggtgttggaggggctggtgttcctggcgtgcctggggcaattcctggaattggaggcatcgcaggcgttgggactccagctgcagctgcagctgcagcagcagccgctaaggcagccaagtatggagctgctgcaggcttagtgcctggtgggccaggctttggcccgggagtagttggtgtcccaggagctggcgttccaggtgttggtgtcccaggagctgggattccagttgtcccaggtgctgggatcccaggtgctgcggttccaggggttgtgtcaccagaagcagctgctaaggcagctgcaaaggcagccaaatacggggccaggcccggagtcggagttggaggcattcctacttacggggttggagctgggggctttcccggctttggtgtcggagtcggaggtatccctggagtcgcaggtgtccctggtgtcggaggtgttcccggagtcggaggtgtcccgggagttggcatttcccccgaagctcaggcagcagctgccgccaaggctgccaagtacgggttagttcctggtgtcggcgtggctcctggagttggcgtggctcctggtgtcggtgtggctcctggagttggcttggctcctggagttggcgtggctcctggagttggtgtggctcctggcgttggcgtggctcccggcattggccctggtggagttgcagctgcagcaaaatccgctgccaaggtggctgccaaagcccagctccgagctgcagctgggcttggtgctggcatccctggacttggagttggtgtcggcgtccctggacttggagttggtgctggtgttcctggacttggagttggtgctggtgttcctggcttcggggcagtacctggagccctggctgccgctaaagcagccaaatatggagcagcagtgcctggggtccttggagggctcggggctctcggtggagtaggcatcccaggcggtgtggtgggagccggacccgccgccgccgctgccgcagccaaagctgctgccaaagccgcccagtttggcctagtgggagccgctgggctcggaggactcggagtcggagggcttggagttccaggtgttgggggccttggaggtatacctccagctgcagccgctaaagcagctaaatacggagtggcagcaagacctggcttcggattgtctcccattttcccaggtggggcctgcctggggaaagcttgtggccggaagagaaaatgagcttcctaggacccctgactcacgacctcatcaacgttggtgctactgcttggtggagaatgtaaaccctttgtaaccccatcccatgcccctccgactccccaccccaggagggaacgggcaggccgggcggccttgcagatccacagggcaaggaaacaagaggggagcggccaagtgccccgaccaggaggccccctacttcagaggcaagggccatgtggtcctggccccccaccccatcccttcccacctaggagctccccctccacacagcctccatctccaggggaacttggtgctacacgctggtgctcttatcttcctggggggagggaggagggaagggtggcccctcggggaaccccctacctggggctcctctaaagatggtgcagacacttcctgggcagtcccagctccccctgcccaccaggacccaccgttggctgccatccagttggtacccaagcacctgaagcctcaaagctggattcgctctagcatccctcctctcctgggtccacttggccgtctcctccccaccgatcgctgttccccacatctggggcgcttttgggttggaaaaccaccccacactgggaatagccaccttgcccttgtagaatccatccgcccatccgtccattcatccatcggtccgtccatccatgtccccagttgaccgcccggcaccactagctggctgggtgcacccaccatcaacctggttgacctgtcatggccgcctgtgccctgcctccacccccatcctacactcccccagggcgtgcggggctgtgcagactggggtgccaggcatctcctccccacccggggtgtccccacatgcagtactgtataccccccatccctccctcggtccactgaacttcagagcagttcccattcctgccccgcccatctttttgtgtctcgctgtgatagatcaataaatattttattttttgtcctggatatttggggattatttttgattgttgatattctcttttggttttattgttgtggttcattgaaaaaaaaagataatttttttttctgatccggggagctgtatccccagtagaaaaaacattttaatcactctaatataactctggatgaaacacacctttttttttaataagaaaagagaattaactgcttcagaaatgactaataaatgaaaaacctttaaagg

SEQ ID NO: 99421 - DNA, 563 bp, Artificial Sequence
  derived and/or modified sequence
aattaggctttggggataaaacgaggtgcggagagcgggctggggcatttctccccgagatggcgggtctgacggcggcggccccgcggcccggagtcctcctgctcctgctgtccatcctccacccctctcggcctggaggggtccctggggccattcctggtggagttcctggaggagtcttttatccaggggctggtctcggagcccttggaggaggagcgctggggcctggaggcaaacctcttaagccaggagttggaccctttgggggaccgcaacctggagtcccactggggtatcccatcaaggcccccaagctgcctggctatgggcccggaggagtggctggtgcagcgggcaaggctggttacccaacagggacaggggttggcccccaggcagcagcagcagcggcagctaaagcagcagcaaagttcggtgctggagcagccggagtcctccctggtgttggaggggctggtgttcctggcgtgcctggggcaattcctggaattggaggcatcgcaggcgttgggactccagctgcagctgcagctgca

SEQ ID NO: 99422 - DNA, 962 bp, Artificial Sequence
  derived and/or modified sequence
ctcacagccgacgaggcaacaattaggctttggggataaaacgaggtgcggagagcgggctggggcatttctccccgagatggcgggtctgacggcggcggccccgcggcccggagtcctcctgctcctgctgtccatcctccacccctctcggcctggaggggtccctggggccattcctggtggagttcctggaggagtcttttatccaggggctggtctcggagcccttggaggaggagcgctggggcctggaggcaaacctcttaagccagggctcggcgccttccccgcagttacctttccgggggctctggtgcctggtggagtggctgacgctgctgcagcctataaagctgctaaggctggcgctgggcttggtggtgtcccaggagttggtggcttaggagtgtctgcaggtgcggtggttcctcagcctggagccggagtgaagcctgggaaagtgccgggtgtggggctgccaggtgtatacccaggtggcgtgctcccaggagctcggttccccggtgtgggggtgctccctggagttcccactggagcaggagttaagcccaaggctccaggagttggaccctttgggggaccgcaacctggagtcccactggggtatcccatcaaggcccccaagctgcctggtggctatggactgccctacaccacagggaaactgccctatggctatgggcccggaggagtggctggtgcagcgggcaaggctggttacccaacagggacaggggttggcccccaggcagcagcagcagcggcagctaaagcagcagcaaagttcggtgctggagcagccggagtcctccctggtgttggaggggctggtgttcctggcgtgcctggggcaattcctggaattggaggcatcgcaggcgttgggactccagctgcagctgcagctgcagcagcagccgctaaggcagccaagtatg

SEQ ID NO: 99423 - DNA, 2175 bp, Artificial Sequence
  derived and/or modified sequence
atggccgggctaactgctgcagccccaaggccaggggtcctgttgctgttattgagtatcctgcaccctagtagacccggtggagtacctggggcgattcccggaggggtccccggtggcgttttttaccccggtgcggggctgggcgccctgggggggggtgctcttgggccaggtgggaagccattgaagcccgtgccaggtggcctcgccggcgccggtttgggcgcaggattaggggccttcccagcagtcacattccccggggctcttgtgcctggcggtgttgcagacgctgccgccgcttataaggccgctaaggcgggcgccgggctagggggagtccctggagtcggaggtcttggagtgtccgctggtgcagtagttccgcagcccggtgccggtgtaaaacctgggaaggtgcccggtgtgggcctgcccggggtataccccgggggagtgttgcccggagcgcggttccctggtgtaggagtgttgcctggcgttccaactggggctggcgttaaacccaaggcccccggcgtgggaggggcctttgccggcattcctggggtcggcccattcggaggaccgcagcccggcgtgcctctaggctaccccattaaggcccctaaactgcctggagggtacggcctgccttatactacgggaaaactcccctatggctacggtccaggtggtgtagcaggcgccgccgggaaggctggctatccgaccggcactggcgttggcccgcaggccgccgccgccgcagcagccaaggcagctgcgaagttcggcgccggggcagctggggtgttgcctggggtgggcggagccggcgtaccgggcgtccctggcgccattcctgggatagggggaatcgctggggtaggcactcccgcggctgccgccgccgcagccgctgccgctaaagccgctaaatatggagccgctgctggacttgtgccaggcggtcccggttttgggccaggggtggtcggagtgccaggagcgggggtacctggagttggggtccccggagcaggaatccctgttgtgccaggagccgggattccaggagcagctgtgcctggggtcgttagtcccgaggcagccgcgaaggccgccgccaaagccgccaagtatggcgctcggcccggggtcggagttggcggcattcctacttacggggtaggcgcaggcggtttccctggatttggcgtaggagttggaggtattccgggcgtagccggcgtcccgggggtgggcggcgtccctggagtcgggggagtccctggagtaggtatctcgccggaggcgcaggcagcggccgccgccaaagccgctaagtacggagtaggaacccctgccgcagctgccgcaaaggcagcggcaaaggcagcacagttcggattagttcctggggtcggggtggcgccaggcgtcggggttgccccaggggtgggagtcgctcctggagttggactggccccaggagtcggagtggcaccaggagtaggagtcgcccctggggtcggagtggccccaggaataggtcctgggggcgtggcagctgctgctaaaagcgcagctaaagtagccgcgaaagctcaactcagggcagcagccgggctgggtgctggaataccggggctcggcgttggggttggcgtgcccgggctgggagtcggagccggggtgcctggattaggagtgggagcaggggtgcccggctttggcgctgtgccgggagcgttggccgctgccaaggcggcaaagtatggagccgcggtgccaggcgtgttgggagggttgggagcactgggcggagtgggcatccctgggggggtcgttggcgccgggccagccgctgcagctgcggccgctaaagccgccgccaaagcagcccagtttgggttagttggggccgctggactcggtggattaggagtcggaggactaggagtgcctggagtaggtggtctcggcggaatcccacctgccgcggcggccaaggctgccaaatacggagccgccggcctcggcggcgtgctcgggggggcgggccagttcccgctgggcggcgtggccgcgcgccccgggtttggactgagccctatttttccagggggagcctgcctgggtaaggcatgtggacggaaacgcaaatag

SEQ ID NO: 99424 - DNA, 2274 bp, Artificial Sequence
  derived and/or modified sequence
atggcaggactaaccgccgccgctcccaggccaggagtcctgctgctcttactgtcgattttgcacccatcacgacccggtggggttccaggcgccatccccggtggggttcctgggggcgtcttctacccaggcgccgggcttggagcccttgggggaggagcactgggtcccggcgggaagccgctaaaacctgtcccaggtggcctggcaggtgcgggcctgggcgccggattgggagcttttcccgcggttacgttccctggagctctcgtcccgggcggtgttgcagacgcagccgcggcgtacaaagctgctaaagcgggcgccgggctcggaggtgttccaggcgtgggtggcctgggtgtcagtgccggggcagttgtgccacagccaggggccggggttaagcccggaaaggtacccggggtcgggctgcctggagtctatccaggaggagttcttcccggcgctcgcttccccggagtgggagtactgcctggggtgccgactggagcaggcgtcaaaccgaaagctcctggcgttgggggagcattcgctggcattcctggcgtgggaccctttgggggaccacaaccaggtgtgcccctggggtaccccatcaaggccccaaagctgcccggcggctacggactcccatacaccacagggaagcttccatatgggtacggccctgggggcgtggccggcgctgccgggaaagcgggttatccgacagggactggtgtgggccctcaggctgccgccgccgccgcagctaaggcagctgctaaatttggtgctggggcggcaggagtgctgccaggggtggggggcgctggcgtcccaggggtgcctggggccatccctggaatcgggggtattgccggagtgggtactccggccgccgccgccgccgccgccgctgcagcaaaggcggccaaatacggcgccgcagcaggtctagtgccgggcgggcccggcttcggcccaggagtggtgggagtgccgggagctggggtgcccggtgtcggagtccctggagccggaattcccgtggtgcccggggccggcatccctggggcagctgtaccaggcgtcgtatcaccggaggccgcagctaaagccgcagccaaagctgctaaatatggagcaaggcccggggtgggagttggaggtataccgacctatggagtgggggcgggcggtttcccagggttcggcgtgggcgtaggcggtattcctggcgtggccggcgtaccaggagtcggcggagtcccgggcgtgggaggcgttccgggcgtgggcatctcaccagaagcgcaggccgccgctgcagctaaagccgctaagtacggggtcggaactccagcggccgccgccgctaaggccgccgcaaaagccgctcagttcggactggttcctggcgttggagtggcaccaggagtaggcgttgcaccaggagtgggcgttgcacctggggtgggcctggcccccggcgttggagtggcaccgggagtgggagttgccccgggggtgggtgtagcacccgggatagggcccgggggggtggcagccgccgccaagtcagcagccaaggttgcggccaaggcacagctgagggcagcagctggcttaggagccggcattcccggcctgggcgttggagtcggcgtgccgggtttgggagtgggcgctggcgttcccgggctgggagttggtgccggtgtgccagggtttggtgccggagcagacgagggagtcagaagatccctctccccggagctgagagagggcgatcccagcagctctcagcacttaccctccacgcctagcagtccacgagtgcccggagctctggcagccgcaaaggcggcaaagtacggcgctgctgtgcctggggtccttggaggcctgggtgctctgggcggtgtgggaataccaggtggagtggttggggctggtcccgccgcagccgctgctgctgctaaggccgcagcaaaagcagcccagtttgggttggttggtgccgcagggttggggggactgggagtgggaggcctgggcgtacccggtgtgggtggtctcggcgggatacctccagccgccgcggctaaggcggctaagtacggtgccgcaggacttggtggcgttctgggtggagccggtcagttcccactcggtggcgtggctgcacgaccagggtttggcctgtcccccatttttcctggcggtgcctgcttgggtaaagcgtgtggacgaaagcgcaagtag

SEQ ID NO: 99425 - DNA, 2379 bp, Artificial Sequence
  derived and/or modified sequence
atggccgggcttaccgctgctgctcctcggcctggagtgcttttgcttttgctgagcattctgcatccttcgcgacccggaggtgtcccaggagctataccaggcggggtgccgggaggcgtattctaccccggagccggcctaggagcgttaggcggcggtgctctcggccccggtggcaagcctctcaagccagtacccgggggactcgctggtgccgggttgggagccggactcggcgcgttcccagccgtaacctttccaggcgctctagtgccgggaggcgtggccgatgccgccgctgcatataaagcagctaaggccggtgcaggacttggaggagtaccgggcgtgggaggtctgggcgtgtcagccggagctgtagtgccccaaccaggcgccggggtcaagccaggcaaggtgccaggagtgggcctgccaggggtgtatccgggtggcgtactcccaggagcccgctttccaggcgtgggagtgctgccgggggtgcctactggagctggagttaagcccaaagcccccggggtgggtggtgcattcgcagggataccaggcgtgggtcccttcggggggcctcaaccaggggtgcctctcgggtacccaattaaggccccaaaattgcctggaggctacggtctcccatacacaactggaaaactgccatacgggtacggcccaggaggagtggcaggtgctgccgggaaggcagggtatcccaccggtactggtgttggaccgcaagctgctgcagctgccgcagccaaagctgcagccaagttcggcgccggcgctgcaggggtgctgcccggagttggtggtgctggagtaccgggggtcccgggggcaatccccggtataggtgggatcgccggcgttggcacgcccgccgccgccgccgccgccgccgccgctgcaaaagcagctaaatatggcgccgctgccggactggtccctgggggtccaggcttcggccctggggtggttggcgtccccggcgccggcgtcccaggagtgggcgtgcctggagcaggcattcctgttgtcccaggcgccggtattcccggggccgctgtgcctggagttgtttcccccgaggccgcggctaaagccgcagctaaagcagcgaagtacggtgccaggccaggagtcggagtcggaggaattccaacctatggagtaggggcagggggatttccaggattcggggtgggcgtcggaggaatcccaggggttgccggagtgcctggggtgggcggcgttcctggcgtcggaggagtgcctggagtcggtatcagcccagaggcccaggccgccgctgctgccaaagcagccaaatacggcgcagctggcgccggtgtacttggcggcctagtgccaggagccccgggagccgtccccggtgtgccggggactggaggagttcccggagtgggaacccctgcagccgctgccgccaaagcagccgcaaaagcagctcaatttgccctgctaaatctggcggggctcgtgccaggtgtgggagttgcccccggagtgggcgtggcacctggagtgggagtggccccaggagtgggcctggcgcctggcgtcggagtagcccctggcgttggcgtcgcaccaggagttggcgtcgcacccggaataggccctggcggagtagccgccgcggccaaaagcgctgccaaagtcgccgcaaaagcccaattacgcgcagccgcagggcttggggctggcattcccggtctgggagtgggggttggggttccagggctaggtgtgggcgctggggttccaggccttggtgtgggtgctggtgttcccgggtttggagcaggagctgacgagggtgtgagaaggagtctctcacctgaacttagagagggcgatccaagctcctcccaacatttgccatctaccccttcttcgccccgcgtcccaggcgctttagctgccgcaaaagcagcgaagtatggcgctgccgtccccggcgtccttggtggcctaggggcgctcgggggcgtagggatcccggggggggtggtcggtgctggccccgcggcggctgccgcggccgctaaagccgccgcaaaggctgcgcaattcggactagttggagcagcagggctgggcgggctcggtgtgggagggctgggcgtacccggtgtcgggggtttgggtggcattcctcctgctgctgcggcgaaggccgcaaagtatggggcagccggccttggcggcgtgctcggcggagcaggacagttcccccttggcggagtggccgccagacccggattcgggcttagccccatctttcccggcggtgcttgtcttgggaaagcctgcggtcggaaaaggaagtag

SEQ ID NO: 99426 - DNA, 2984 bp, Artificial Sequence
  derived and/or modified sequence
gcatttctccccgagatggcgggtctgacggcggcggccccgcggcccggagtcctcctgctcctgctgtccatcctccacccctctcggcctggaggggtccctggggccattcctggtggagttcctggaggagtcttttatccaggggctggtctcggagcccttggaggaggagcgctggggcctggaggcaaacctcttaagccagttcccggagggcttgcgggtgctggccttggggcaggcgctgggcttggtggtgtcccaggagttggtggcttaggagtgtctgcaggtgcggtggttcctcagcctggagccggagtgaagcctgggaaagtgccgggtgtggggctgccaggtgtatacccaggtggcgtgctcccaggagctcggttccccggtgtgggggtgctccctggagttcccactggagcaggagttaagcccaaggctccaggtgtaggtggagcttttgctggaatcccaggagttggaccctttgggggaccgcaacctggagtcccactggggtatcccatcaaggcccccaagctgcctggtggctatggactgccctacaccacagggaaactgccctatggctatgggcccggaggagtggctggtgcagcgggcaaggctggttacccaacagggacaggggttggcccccaggcagcagcagcagcggcagctaaagcagcagcaaagttcggtgctggagcagccggagtcctccctggtgttggaggggctggtgttcctggcgtgcctggggcaattcctggaattggaggcatcgcaggcgttgggactccagctgcagctgcagctgcagcagcagccgctaaggcagccaagtatggagctgctgcaggcttagtgcctggtgggccaggctttggcccgggagtagttggtgtcccaggagctggcgttccaggtgttggtgtcccaggagctgggattccagttgtcccaggtgctgggatcccaggtgctgcggttccaggggttgtgtcaccagaagcagctgctaaggcagctgcaaaggcagccaaatacggggccaggcccggagtcggagttggaggcattcctacttacggggttggagctgggggctttcccggctttggtgtcggagtcggaggtatccctggagtcgcaggtgtccctggtgtcggaggtgttcccggagtcggaggtgtcccgggagttggcatttcccccgaagctcaggcagcagctgccgccaaggctgccaagtacggagtggggaccccagcagctgcagctgctaaagcagccgccaaagccgcccagtttgggttagttcctggtgttggtgtggctcctggcgttggcgtggctcccggcattggccctggtggagttgcagctgcagcaaaatccgctgccaaggtggctgccaaagcccagctccgagctgcagctgggcttggtgctggcatccctggacttggagttggtgtcggcgtccctggacttggagttggtgctggtgttcctggacttggagttggtgctggtgttcctggcttcggggcagtacctggagccctggctgccgctaaagcagccaaatatggagcagcagtgcctggggtccttggagggctcggggctctcggtggagtaggcatcccaggcggtgtggtgggagccggacccgccgccgccgctgccgcagccaaagctgctgccaaagccgcccagtttggcctagtgggagccgctgggctcggaggactcggagtcggagggcttggagttccaggtgttgggggccttggaggtatacctccagctgcagccgctaaagcagctaaatacggtgctgctggccttggaggtgtcctagggggtgccgggcagttcccacttggaggagtggcagcaagacctggcttcggattgtctcccattttcccaggtggggcctgcctggggaaagcttgtggccggaagagaaaatgagcttcctaggacccctgactcacgacctcatcaacgttggtgctactgcttggtggagaatgtaaaccctttgtaaccccatcccatgcccctccgactccccaccccaggagggaacgggcaggccgggcggccttgcagatccacagggcaaggaaacaagaggggagcggccaagtgccccgaccaggaggccccctacttcagaggcaagggccatgtggtcctggccccccaccccatcccttcccacctaggagctccccctccacacagcctccatctccaggggaacttggtgctacacgctggtgctcttatcttcctggggggagggaggagggaagggtggcccctcggggaaccccctacctggggctcctctaaagatggtgcagacacttcctgggcagtcccagctccccctgcccaccaggacccaccgttggctgccatccagttggtacccaagcacctgaagcctcaaagctggattcgctctagcatccctcctctcctgggtccacttggccgtctcctccccaccgatcgctgttccccacatctggggcgcttttgggttggaaaaccaccccacactgggaatagccaccttgcccttgtagaatccatccgcccatccgtccattcatccatcggtccgtccatccatgtccccagttgaccgcccggcaccactagctggctgggtgcacccaccatcaacctggttgacctgtcatggccgcctgtgccctgcctccacccccatcctacactcccccagggcgtgcggggctgtgcagactggggtgccaggcatctcctccccacccggggtgtccccacatgcagtactgtataccccccatccctccctcggtccactgaacttcagagcagttcccattcctgccccgcccatctttttgtgtctcgctgtgatagatcaataaatattttattttttgtcctgg

SEQ ID NO: 99427 - DNA, 2034 bp, Artificial Sequence
  derived and/or modified sequence
atggcagggttaacagccgccgcacctcggcctggggttcttcttctcttgctgagcatcctgcatcccagtcggcccggtggggtccccggggccattcctggtggggtcccagggggggtattctacccggctttgggcccaggtggtaagcccctgaaacccgtaccgggcggcctggcgggcgcgggcctgggagccgggctgggagcctttccagccgtgacttttccaggagccctcgtccccggaggcgtagctgacgcagcagcagcttacaaagccgcaaaagccggcgcggggctgggcggcgtacctggtgtgggcggattaggcgtatccgcaggcgccgtggtcccgcagccaggtgccggcgtaaagcccggaaaagttcccggcgttgggttacctggcgtctatccagggggcgtacttcccggcgctcggttccctggggtgggagtgctaccaggcgtgccaactggagcaggcgtcaaacctaaagccccaggagttgggggcgcctttgccggcattcccggtgtgggcccctttgggggcccccagccaggcgtacccctgggatatccaattaaagcgcctaagttgcccggcggttacggtctgccttatactacagggaaactaccctacgggtatgggcccgggggagtggcaggagcagccggcaaagccggatatcctaccgggaccggggtaggaccgcaagccgcagctgctgccgcagcaaaggctgcagccaagtttggcgctggcgccgctggcgttctaccgggagtggggggtgccggagtgccgggcgttccgggggcaattccaggcataggcggtattgctggggtaggcacacctgcggcagccgcagctgctgcagcagcagccaaagccgcaaagtatggagcagctgctggactggtgcctgggggacccggcttcggtccaggtgtcgtgggcgtgcccggagcgggcgttccaggtgttggtgtaccaggtgcaggaattcccgtggttcctggggccgggattcccggtgcagctgtcccgggtgtcgtttcacctgaagctgcagcaaaggctgccgccaaagctgccaaatacggagcaaggccaggcgtgggcgtaggcggtatccctacttacggcgttggtgcaggggggttcccaggttttggcgttggagtgggtgggatacccggagtggcaggggtgccaggcgtcggcggggtgcccggcgtgggtggtgtgcctggcgtcggtatctcaccagaagctcaagcagccgctgccgccaaagctgccaaatatgggctggtgcctggagttggagtagcccccggtgttggcgtagcccctggagtcggagtggcaccaggcgtgggcctagctccaggtgtgggcgtggcccccggcgtgggcgtggcacccggggtgggtgtagcccctggtataggccccggcggtgtggctgccgcagccaaatctgcagcaaaggtcgccgctaaagcccagttgcgcgccgccgccggactcggggccggaattcccggcttgggtgtcggcgttggagtgccaggtctgggtgtcggcgctggtgtcccggggcttggggtcggcgccggcgtcccgggcttcggcgccgtgcctggtgcactggcagccgcaaaggcggctaaatacggtgctgccgtcccgggggtgctcggtggtctcggtgcgctcgggggagtaggtatccccgggggagtagttggcgcaggtcccgcagcggccgcagctgccgctaaggctgctgctaaggcggcccagtttggattagtgggggcagcaggtcttggaggtttgggtgtcggaggtctaggagtccccggtgtgggcggattaggggggataccacccgccgccgcagccaaagcggccaagtacggtgttgcagctcgtccgggattcggtttgtccccgattttccctggaggagcttgcctgggtaaagcttgcggtagaaagcgcaagtag

SEQ ID NO: 99428 - DNA, 2118 bp, Artificial Sequence
  derived and/or modified sequence
atggccggacttacagccgccgccccacggcctggggttcttttgttgctgctcagcattcttcacccttcacgccctggcggggttccaggcgcgataccaggtggagtgcctgggggagtcttttacccaggagcgggactgggggccctgggtggaggggcgttggggcctggaggcaaaccactaaagccagtgcctggagggcttgctggggcaggactgggggctggtcttggggcttttcctgctgtgacattcccaggagcacttgtgcccggtggcgtagctgatgcagccgccgcctacaaggctgcgaaagccggagcaggcctcggaggggttcccggagtggggggtctgggagtgtctgctggtgctgtggtaccccagccgggagcaggcgttaagcccggcaaggtgccaggcgtgggcttgccaggtgtttatcctgggggtgtgctgcccggagctcgcttcccaggagtcggcgttctcccaggggtccccaccggggctggcgtgaagcctaaagccccaggggtaggtggagcatttgcaggtatacctggcgtcggtccctttggcggcccacagcctggggtcccgctcggctatcccataaaggcacccaaactaccaggcggatacggactcccctataccacagggaaacttccttacggatacgggccaggaggagtcgccggcgctgcgggtaaagctggttaccccacagggactggggtcggaccgcaggcagccgcggcagcagctgctaaggcagcggcgaagtttggcgctggcgccgccggagtcctccccggggtaggcggcgccggtgtgcctggagtcccgggggcaatccccggaattggtggaatcgcaggagtggggacacccgctgccgccgcggccgccgcagcagccgcgaaggccgctaaatatggagctgccgccggtctagtgccgggaggacctggttttggccctggagtcgtgggcgtccccggcgccggggtgccaggcgtgggcgtccccggcgcaggcatccccgtcgtaccaggggccggcattccaggagcggctgtgcctggcgtggtctcccccgaggccgccgcaaaggctgcagccaaggccgcgaagtatggagcaagacccggggttggcgtgggcggtattccgacatacggggtaggcgcaggcggctttccaggtttcggtgtcggcgtgggcggcattccaggggtcgcaggggtacctggcgtgggcggcgttcccggggtcgggggcgtgcccggagtgggaattagccctgaagcacaagccgcagcagcagcgaaagccgcaaagtacgggctggttcccggagtcggagtggcccccggggtgggggttgcccccggcgttggcgtggctcctggggtgggactcgcccccggagtaggggttgcccctggggttggggtggcacccggtgtgggtgttgcgcctggcatcggcccaggaggcgtagccgccgccgcaaagtctgcagccaaagttgctgcaaaagcccaactgcgggctgctgccggactgggagctggcatccctggacttggcgtcggtgtcggggtccctggcctgggtgtaggagctggcgtgcccggactcggagtcggagccggcgtcccgggcttcggggctgtgcctggggcactcgccgccgccaaagcagcaaaatacggggcagctgttcccggggtgctgggtggcctcggcgctttggggggcgtcgggattcctggcggggttgtaggggcaggcccggctgctgccgctgccgccgctaaggccgcggccaaggccgctcagttcgggttggtgggggccgccggactgggcgggctgggcgtcgggggcttgggcgtgcctggggtgggaggtttaggaggaatccctcccgctgccgcagccaaggccgccaaatatggggccgcgggattgggtggtgtattaggtggggccggacagtttcccctcggtggggtcgcagcaagaccaggatttggcctctcgcctattttccccggaggcgcctgtctcggaaaagcttgcggaagaaaaagaaagtag

SEQ ID NO: 99429 - DNA, 645 bp, Artificial Sequence
  derived and/or modified sequence
atggccgggctgacagcagcagctccgcgccccggcgtattgctattgttactgtcaattctccaccctagccggcctggcggcgtgcctggcgccattcctggaggagtgcctggtggcgtattctacccgggggctggactcggcgctctaggtgggggggccttaggaccaggcggaaaacctctcaaaccagtgccaggaggcttggcaggagccggactgggggccggtctcggcgcttttccagctgtcacattccccggagccctcgtacccggcggcgtggccgacgctgcagccgcttacaaagctgcgaaagctggcgcaggactcgggggtgtgccaggcgttggcggacttggcgtcagcgccggtgccgtggtgccccagccgggtgctggtgtgaaacccggaaaggtgcccggggtaggactgcccggagtttacccaggcggggtactgcctggagtggggccttttggcggtcctcagcctggcgtgccgctgggatacccaattaaagctcccaagctccctggcggttacggcctgccttatacaactggaaaactgccttacggatacggacctggtggggtcgcaggcgccgcgggcaaagcaggctatccgacaggcacctag

SEQ ID NO: 99430 - DNA, 504 bp, Artificial Sequence
  derived and/or modified sequence
atggccgggctaactgccgcggcgcccagaccaggtgtgctgttactcctcctttcgatcctacaccctagcagacctggcggagtcccaggagctattcccggtggcgtgccgggcggtgttttttatcctggtgcaggtctgggcgccctgggggggggtgctctgggccctgggggcaagccgctcaaacctgtgcctggggggttggcgggtgcaggactgggtgccggactaggagcctttccggccgtgaccttccccggagcactggttcctggaggcgtggccgatgctgctgccgcctacaaagcagccaaggcaggcgtcggccctttcggggggccccagcctggcgtccctctcggttacccgattaaagcaccaaagttgcccggaggatatggactaccttatactacaggaaagcttccatatgggtacggccctggcggcgttgcaggagctgccgggaaggcgggataccccactggcacaggttag

SEQ ID NO: 99431 - DNA, 2079 bp, Artificial Sequence
  derived and/or modified sequence
atggcaggccttactgccgcagcgccaaggccgggggttttattgttgctcctttccattctccatcctagccgtcctggcggggtgcccggcgctataccaggcggcgtacccggaggtgttttttatcctggagcgggattaggggctctgggagggggcgctttggggccaggtggaaagcctctgaaacctgtgcctggtggtttggccggagccggcctgggggcggggttgggcgccttcccggctgtcaccttccctggtgccctggttcccggaggagtcgcagacgctgccgccgcctataaggctgcgaaagctggagctggcctcggtggggtcccaggtgtagggggtctcggggtgagtgccgctccatccgttcccggcgccgtcgtaccccagcctggagccggagtcaagcctggcaaggtgcctggtgttggcttgccaggcgtctaccctggtggggtactgccaggcgctcgcttccccggtgtgggagtgctgcctggtgtgcccactggggcaggagtcaagcccaaggcaccaggagtaggcggggcttttgctggaattcccggcgtgggccccttcggcggtccccagcccggcgtcccacttgggtatccaattaaggctccaaaattgccgggcggctacgggctcccatacacaacgggaaagttgccctacggatatggccctggcggcgtcgcaggggccgcaggcaaggctggctatcccacaggcacaggagttgggcctcaagctgcagcggccgctgccgccaaagccgcagctaagtttggagctggagcagctggcgtgttgccaggagtgggcggcgccggagtgcccggagtacctggagccatccccgggattggtgggattgccggcgtggggacaccagctgccgctgcagcggccgctgctgccgctaaagcagctaagtacggcgctgcggctggactcgttccgggaggccctgggtttgggcctggcgtcgtgggagtgcccggagccggcgtgcccggagtgggagtcccgggcgccggcatccctgttgtgcccggtgcaggaatccccggggccgccgtcccaggggtggtcagccctgaggccgccgcaaaagctgccgcgaaggccgcaaagtacggggctcggccgggagtaggtgtagggggcattccaacttatggcgttggtgccgggggattccctgggtttggcgtcggggtagggggaatacccggcgtggcgggcgtgcccggagtgggtggggtaccgggtgttggcggagtacccggcgtaggaatcagtccagaagcccaagctgcggccgccgccaaggccgctaagtacggcctggttcctggcgtgggcgtggcaccaggcgtcggagtggctccaggtgtaggtgtcgctccgggagtgggtctggcaccgggcgtgggagtggccccaggtgtgggggttgccccaggagtaggagtcgcaccaggtataggccctggcggcgtggccgccgctgccaagagtgctgctaaagtggctgccaaggcccagctgagggccgccgctgggttgggggcagggattccagggttgggtgtcggggtgggtgtccctggactaggagtgggggcaggcgtgcctggcctgggagtgggcgccggggtcccaggattcggtgccgtgccaggggctctcgccgctgccaaagctgccaagtatggcgccgctgtgcctggagtccttggaggactgggagccctgggcggggtcgggattcccggaggcgtcgtgggcgccgggcccgccgcagcggcggctgccgcaaaagcagctgcaaaggccgcgcagttcggtctggtcggtgctgcaggtttaggcggcctgggagtcggcggtctgggggtaccaggggttgggggtctcggaggcatcccacccgctgctgctgccaaggccgccaaatacggtgtcgcggcccgcccaggcttcggactgtctccgattttcccaggtggcgcttgccttgggaaggcgtgcggaagaaagagaaaatag

SEQ ID NO: 99432 - DNA, 507 bp, Artificial Sequence
  derived and/or modified sequence
atggctggcctgacggccgccgcccctaggcctggcgtactgctcttacttctgtccattctccacccttcacgcccaggaggtgtccccggggctatccctggcggtgtacccggaggagtcttctatcctggagccggtttgggagcactgggaggcggagccctcggacctggtggaaaaccgctaaagcccggggtggggccattcggcggccctcagccaggagtgcctctgggatatcccataaaggcaccaaagcttcctgggtacggccctgggggcgtggccggagccgctggaaaagcaggctacccaaccggaactggggttgggcctcaggcagccgcagccgcagctgcaaaggccgccgcaaaattcggggctggggctgccggggttttacccggtgtgggaggagccggagtccctggcgtcccaggagctattcctggaattggcggaatcgccggagtaggcacccccgctgccgctgctgccgcatag

SEQ ID NO: 99433 - DNA, 885 bp, Artificial Sequence
  derived and/or modified sequence
atggctggactcacagcagccgcgccaagacccggtgttcttctcctgctcttgagcatactccaccctagtcggcctgggggcgtgcctggcgccataccagggggggttccgggaggagtattctacccgggggcgggcctaggtgcattgggtggaggagccctcggtcctggagggaaaccgctcaaacctggattgggggccttcccagccgtaaccttccccggcgcactcgttcccggaggagtcgctgatgctgctgccgcatataaagctgctaaggccggcgccggtttaggaggcgtgcctggggttggcggccttggagtgagtgccggggccgtggtcccacagccaggagccggcgtgaagcctggaaaggttccgggggtcggactccccggtgtttatcctggcggggtactcccaggcgctagattccctggcgtcggcgttctgcctggcgtccccaccggcgcaggcgtaaagcctaaagccccaggtgtaggcccatttggaggacctcagcccggtgtccccctgggctatccaataaaggctcccaaactgcccggtgggtatggactgccatacacaaccggaaagctgccatatggttacggacctgggggtgtcgccggcgcagcaggaaaggccgggtacccgaccggtaccggcgtggggcctcaggccgcagcggctgccgccgccaaagctgccgccaagtttggcgcgggggcagctggggtgttacccggcgtgggtggcgctggggtccccggcgtgcccggagcaattcccggaatcggaggcattgcaggggttgggacccccgccgccgcggccgccgcagcagcagctgccaaagcggctaaatactag

SEQ ID NO: 99434 - DNA, 531 bp, Artificial Sequence
  derived and/or modified sequence
atggccggactgacagcagctgcccctagacccggagtactcctcctcttactgtcaatcttgcacccatccagaccgggtggggttccaggggcgatccctggcggtgtccccggcggtgtcttctacccaggagcaggactgggcgcattagggggaggtgcactgggccctggtggaaaaccactcaagccagttcccggtgggctggcaggggccggcctcggggccggcctaggagccttcccagccgttaccttccctggcgctttagtgcccggaggagtcgcagacgctgctgcagcatataaagcagccaaggccggcgccggactgggtggcgtgcctggcgtggggggcctgggagtttcagcgggagcagtggttccccagcccggagcgggggtgaaacctgggaaggtaccgggggttggcggagcattcgcaggaattcctggcgttggccccttcggaggtccgcagccaggcgtacctttgggctatccaattaaagctcccaagctaccgtag

SEQ ID NO: 99435 - DNA, 1992 bp, Artificial Sequence
  derived and/or modified sequence
atggccgggctgacagccgcagccccccgtcctggcgtgctgctgttactgcttagcattctgcacccgtctcggccaggcggggttccgggtgccatccccggcggggtgccagggggcgttttctacccaggagcaggcttgggcgccctcggaggcggggctcttggtcccggaggcaagccactcaaacctgtgccgggtggactggcaggcgccggactcggcgcaggcgccggccttgggggcgtgcctggcgtgggtgggctcggcgtctctgcaggagctgtcgtgccgcagcccggagccggtgtaaagcctggaaaagtgcccggagtaggcttacccggcgtgtatcccggaggcgtactgcctggagctagattccctggtgtgggcgtactacccggagttcctaccggcgcgggcgtgaagcctaaagcaccgggagtggggggagcgttcgcaggcatccctggagttggacctttcggtggtccccagccaggcgtgccccttgggtatccaataaaggcccctaagttgcctggagggtacggactcccgtacacaacgggtaaattgccttacgggtacggacccgggggggtcgccggagccgcgggcaaagcaggttaccccacgggcactggagttgggccacaggctgccgcggctgctgccgctaaggcagccgccaagttcggggcaggcgccgctggtgtgctgcctggggtcggcggtgccggggtaccaggtgtcccaggggccattccagggattggtggtatcgccggggtgggaacaccagccgcagcagccgctgccgccgcagccgccaaagccgctaaatacggagccgcagctggcctcgtgcccgggggtcctggttttggtccaggcgtggtgggggttcccggggccggcgtgccaggtgtaggggtgccaggagccgggattcctgtcgtgcctggggcaggcattcctggtgccgctgtgcccggcgtggtgtcccccgaggcagctgctaaggcagctgcgaaagccgccaaatacggtgcacggcccggggtgggcgtcggtgggattcctacatacggagtaggcgccgggggttttcccggctttggagtgggtgtgggtggcatcccaggcgttgccggtgtcccaggagtgggaggcgttcccggagtgggaggagtaccaggtgttggtatttcccctgaagcccaggcagccgcagccgctaaagccgcaaaatatggtgtcgggacacccgctgcagccgccgccaaggccgctgctaaggccgcccagttcggacttgttcctggcgtgggtgttgctccaggggtgggagttgccccaggcattgggcccggtggtgtcgccgccgctgccaaaagtgcagccaaggtggcagctaaagcgcagcttcgggctgctgctggactcggggcgggtattcctggtctgggtgtaggggtgggagtaccgggattgggggttggcgctggtgtgcctggactgggggtgggtgccggggtccccggatttggggccgttcccggggctttggcagctgccaaagctgctaaatatggggctgcagtgccgggagttctcggagggttaggcgctttaggcggcgtgggcattcccggaggagttgtgggagcgggacctgcagccgctgccgctgcggctaaggccgcagcaaaggccgcccagtttgggctggttggcgctgccgggcttggcgggttgggggtgggcgggctgggagtgccaggggttggcggactcggaggcatccctccggcagcagcagcgaaagccgccaagtatggtgccgccggactagggggggtcttaggcggtgcgggtcagtttcccctgggaggggtggctgcaagacccggatttggcctctcaccgattttccccggaggtgcttgtctgggcaaggcatgcgggcgcaagaggaaatag

SEQ ID NO: 99436 - DNA, 2121 bp, Artificial Sequence
  derived and/or modified sequence
atggcagggttgacagccgccgcaccccggccaggtgtgttgttgctgctgctgagcattctgcacccttccaggccaggaggagtgcctggagcaattcccggaggtgtccccggcggcgtgttttaccctggagccgggctgggggcccttggaggaggggccttaggtccgggtggaaagcccctgaaacctgttcctggtggccttgccggggccgggctgggtgctggtttaggcgctttccccgcggtcacctttccaggcgcactcgtcccagggggagtcgcagatgccgcagccgcttacaaggctgctaaagccggagcaggactgggaggtgtcccaggagttggaggcttgggggtttccgccggcgccgtcgtgccccagccaggcgcaggagtcaagcccggcaaagtgccgggcgtgggtctgcctggcgtctaccccggcggtgttctaccaggtgcgaggttcccaggagtgggagtattgccgggggtccctaccggggcaggggttaaaccgaaagctccaggggtgggtggagctttcgccggtatccctggggtggggcccttcggcggcccacagcctggagtcccattgggctatccaattaaggccccgaagctgcctggcggttacggattgccatacactacaggtaagctgccatacggctacggtccagggggcgtggctggcgccgcaggaaaggcaggttaccccacagggactggagtaggtccacaggccgcggctgctgcagccgccaaagcggctgccaagttcggcgcaggcgccgccggtgtactgcctggagtgggaggggctggcgtgcccggcgtgccaggagcaattcctggcatcggtggcattgccggagtgggaacaccggctgcagccgccgcagccgcagccgcagccaaggcagctaaatatggcgcggccgccggtttggtacccggtgggcccggctttgggccaggagttgtaggcgtgcccggtgctggggtacctggtgtcggcgtgcctggggccggaattcctgtggtgccgggggccggcattcccggagcagcagtacccggtgtggtcagtcctgaagccgcggccaaggccgctgccaaagccgccaagtacggcgcgaggcccggggtgggagtcggagggattcccacatacggcgttggggccggagggttccccggatttggtgtgggcgtcggcggtatacctggtgttgcgggcgtccccggcgtagggggcgtgccaggggtggggggggtccctggagtaggaataagcccagaagctcaagccgcagccgctgctaaagctgccaaatatggagtaggcacaccagccgccgcagctgccaaggcagcggccaaagccgcccaattcggactggtacctggcgttggcgtcgcccctggggtgggagtcgcacctggggttggagtggctccaggtgtcggcctcgcccctggggtgggggtggccccaggcgtgggggtggctcccggcgtgggcgttgctccaggaataggacctggaggggtggcagctgcagctaagtcggccgcaaaggtagcagcaaaagcccagttacgggctgccgccgggctgggtgccggaattccggggctgggagtgggtgtgggagtcccgggactcggcgttggagcaggcgtgcctgggcttggagtcggtgctggagttcctggcttcggagccgtgcctggagcactcgccgccgctaaagcggcaaagtatggtgcagccgtgcctggggtgctgggcggtctaggcgccctaggtggagtgggcattccaggcggcgtggtcggggcaggccctgcagcagctgccgctgccgcaaaagccgctgccaaagctgcacagtttggtctcgtgggagcagccgggttgggaggcttgggagtcggaggactcggggtgcctggcgtgggtggccttggcggcatccccccagccgcagccgccaaggcagccaaatatggagttgctgcccggccaggctttggcttatcacctatattccctggcggagcttgtctggggaaagcctgcggaagaaagaggaaatag

SEQ ID NO: 99437 - DNA, 2583 bp, Artificial Sequence
  derived and/or modified sequence
cctcccttctgcttcctctcccgagggctgtcctggcagaggcccccctcgctctttctggcgggaacagggccagcagcgaaagaacagtcgcagagggaaagcgggaaagagatgggggaaagtgtgtgtgtgtgagtgtgtgcttgtgtgcatgtgtgtgcgtgtgtgtgtcaaggaaaaaagctcgcagtccagcagcccgggcctgggaggcttgtgagccgggcctttcgtaattgtcccctccccgcggccccctcccccaggcctcccccctctcccgccctcccgcccgccctctctccctccctctttccctcacagccgacgaggcaacaattaggctttggggataaaacgaggtgcggagagcgggctggggcatttctccccgagatggcgggtctgacggcggcggccccgcggcccggagtcctcctgctcctgctgtccatcctccacccctctcggcctggaggggtccctggggccattcctggtggagttcctggaggagtcttttatccaggggctggtctcggagcccttggaggaggagcgctggggcctggaggcaaacctcttaagccagttcccggagggcttgcgggtgctggccttggggcagggctcggcgccttccccgcagttacctttccgggggctctggtgcctggtggagtggctgacgctgctgcagcctataaagctgctaaggctggcgctgggcttggtggtgtcccaggagttggtggcttaggagtgtctgcaggtgcggtggttcctcagcctggagccggagtgaagcctgggaaagtgccgggtgtggggctgccaggtgtatacccaggtggcgtgctcccaggagctcggttccccggtgtgggggtgctccctggagttcccactggagcaggagttaagcccaaggctccaggtgtaggtggagcttttgctggaatcccaggagttggaccctttgggggaccgcaacctggagtcccactggggtatcccatcaaggcccccaagctgcctggtggctatggactgccctacaccacagggaaactgccctatggctatgggcccggaggagtggctggtgcagcgggcaaggctggttacccaacagggacaggggttggcccccaggcagcagcagcagcggcagctaaagcagcagcaaagttcggtgctggagcagccggagtcctccctggtgttggaggggctggtgttcctggcgtgcctggggcaattcctggaattggaggcatcgcaggcgttgggactccagctgcagctgcagctgcagcagcagccgctaaggcagccaagtatggagctgctgcaggcttagtgcctggtgggccaggctttggcccgggagtagttggtgtcccaggagctggcgttccaggtgttggtgtcccaggagctgggattccagttgtcccaggtgctgggatcccaggtgctgcggttccaggggttgtgtcaccagaagcagctgctaaggcagctgcaaaggcagccaaatacggggccaggcccggagtcggagttggaggcattcctacttacggggttggagctgggggctttcccggctttggtgtcggagtcggaggtatccctggagtcgcaggtgtccctggtgtcggaggtgttcccggagtcggaggtgtcccgggagttggcatttcccccgaagctcaggcagcagctgccgccaaggctgccaagtacggagtggggaccccagcagctgcagctgctaaagcagccgccaaagccgcccagtttgggttagttcctggtgtcggcgtggctcctggagttggcgtggctcctggtgtcggtgtggctcctggagttggcttggctcctggagttggcgtggctcctggagttggtgtggctcctggcgttggcgtggctcccggcattggccctggtggagttgcagctgcagcaaaatccgctgccaaggtggctgccaaagcccagctccgagctgcagctgggcttggtgctggcatccctggacttggagttggtgtcggcgtccctggacttggagttggtgctggtgttcctggacttggagttggtgctggtgttcctggcttcggggcagtacctggagccctggctgccgctaaagcagccaaatatggagcagcagtgcctggggtccttggagggctcggggctctcggtggagtaggcatcccaggcggtgtggtgggagccggacccgccgccgccgctgccgcagccaaagctgctgccaaagccgcccagtttggcctagtgggagccgctgggctcggaggactcggagtcggagggcttggagttccaggtgttgggggccttggaggtatacctccagctgcagccgctaaagcagctaaatacggagtggcagcaagacctggcttcggattgtctcccattttcccaggtggggcctgcctggggaaagcttgtggccggaagagaaaatgagcttcctaggacccctgactcacgacctcatcaacgttggtgctactgcttggtggagaatgt

SEQ ID NO: 99438 - DNA, 2145 bp, Artificial Sequence
  derived and/or modified sequence
atggccgggctgactgctgccgcaccccgccccggggtactattgcttttattaagtatcttacacccttcacgccccgggggcgtacctggtgccattccaggcggagttccaggtggtgtgttctatccagcccttggtcctggaggcaaacccctgaagcctgtgcccggcggattagcaggcgctggcctgggcgcagggctgggagcttttccagctgtaactttcccgggagcgcttgtccccgggggtgttgccgatgctgcagcagcttacaaggccgcaaaagcaggggcaggcctaggcggagtgccgggcgtggggggactcggcgtttcagctggggcagtggttcctcagcccggcgctggtgttaaacccggtaaggtccccggcgtgggcctgccaggtgtctaccctgggggcgtgctgccgggtgcacggttccccggagttggagtgctgcccggcgtccccacaggggcaggggtgaagcctaaagctcctggtgtcggaggcgccttcgccggcatcccaggagtcggcccatttgggggtcctcagcccggagtacctctggggtatcctattaaagccccaaagctaccagggggatatggattaccatacacaacaggcaagttgccatacggctacggcccgggcggagtggccggagccgctggcaaagcgggataccccactgggacgggggttggaccccaagccgcagccgctgccgccgccaaggccgcagcaaaattcggggccggtgcagccggggtgttacctggcgttggaggggccggcgtacccggcgtacctggggctatccccggcataggcggaatagccggcgtaggcacgcctgcggccgccgctgcagctgccgctgcagccaaagcagcaaagtacggtgccgccgctggattggtgcccggcggaccagggttcggaccgggagtcgtgggcgttcctggagctggagtccccggagttggggtgccaggagccggcatcccagtcgtccctggagccggtatcccaggggcagcagtccccggggtggtaagccctgaggccgctgccaaggccgccgccaaggcggcaaaatatggagcaagacccggggtcggcgtaggtggaataccaacatatggtgtgggcgctgggggtttccccggctttggcgtcggcgtcggaggaatccccggagtagccggtgtcccaggtgtgggcggtgtcccgggagtggggggcgtgccaggcgtcggcatctcccccgaggctcaggccgctgccgctgccaaggccgctaaatacggtgtgggcacaccagccgcagccgccgctaaggccgctgccaaggccgctcaatttgggctggtgccaggagttggcgttgcgcccggtgtaggcgttgcccccggcgttggagtcgcacctggcgtgggattggctcccggggttggtgttgcccccggagtgggcgttgcaccaggagtgggagtcgccccggggatcggccctgggggcgtggcagccgcagcaaagtcagccgccaaagtcgccgccaaggcacagctcagggccgctgccggtttgggagcaggaatcccaggattaggggttggcgtcggggtcccgggcctgggcgtaggcgcaggagtacccggtctaggggttggcgctggtgtgccaggttttggagctgtgcctggagcgcttgccgctgccaaagccgctaagtacggggccgcagttcctggtgtgctcggaggactaggagctttaggaggagtgggtatacccggcggagtggtgggggcaggtcccgccgctgctgcggctgctgctaaagctgcagcaaaagccgcccagtttggcctcgtgggcgctgcgggtttgggcgggctgggtgtcggaggcctaggggtcccaggagtcggtggccttggcggcatcccccccgcggccgccgcaaaggctgccaaatatggagcagctgggctcggcggcgttctgggtggagccggacaattcccacttgggggcgtagcagcccgccccggattcgggcttagcccaatcttcccagggggagcctgccttggcaaggcatgcgggcgtaagcggaaatag

SEQ ID NO: 99439 - DNA, 3147 bp, Artificial Sequence
  derived and/or modified sequence
gcgggctggggcatttctccccgagatggcgggtctgacggcggcggccccgcggcccggagtcctcctgctcctgctgtccatcctccacccctctcggcctggaggggtccctggggccattcctggtggagttcctggaggagtcttttatccagcgctggggcctggaggcaaacctcttaagccagttcccggagggcttgcgggtgctggccttggggcagggctcggcgccttccccgcagttacctttccgggggctctggtgcctggtggagtggctgacgctgctgcagcctataaagctgctaaggctggcgctgggcttggtggtgtcccaggagttggtggcttaggagtgtctgcaggtgcggtggttcctcagcctggagccggagtgaagcctgggaaagtgccgggtgtggggctgccaggtgtatacccaggtggcgtgctcccaggagctcggttccccggtgtgggggtgctccctggagttcccactggagcaggagttaagcccaaggctccaggtgtaggtggagcttttgctggaatcccaggagttggaccctttgggggaccgcaacctggagtcccactggggtatcccatcaaggcccccaagctgcctggtggctatggactgccctacaccacagggaaactgccctatggctatgggcccggaggagtggctggtgcagcgggcaaggctggttacccaacagggacaggggttggcccccaggcagcagcagcagcggcagctaaagcagcagcaaagttcggtgctggagcagccggagtcctccctggtgttggaggggctggtgttcctggcgtgcctggggcaattcctggaattggaggcatcgcaggcgttgggactccagctgcagctgcagctgcagcagcagccgctaaggcagccaagtatggagctgctgcaggcttagtgcctggtgggccaggctttggcccgggagtagttggtgtcccaggagctggcgttccaggtgttggtgtcccaggagctgggattccagttgtcccaggtgctgggatcccaggtgctgcggttccaggggttgtgtcaccagaagcagctgctaaggcagctgcaaaggcagccaaatacggggccaggcccggagtcggagttggaggcattcctacttacggggttggagctgggggctttcccggctttggtgtcggagtcggaggtatccctggagtcgcaggtgtccctggtgtcggaggtgttcccggagtcggaggtgtcccgggagttggcatttcccccgaagctcaggcagcagctgccgccaaggctgccaagtacggagtggggaccccagcagctgcagctgctaaagcagccgccaaagccgcccagtttgggttagttcctggtgtcggcgtggctcctggagttggcgtggctcctggtgtcggtgtggctcctggagttggcttggctcctggagttggcgtggctcctggagttggtgtggctcctggcgttggcgtggctcccggcattggccctggtggagttgcagctgcagcaaaatccgctgccaaggtggctgccaaagcccagctccgagctgcagctgggcttggtgctggcatccctggacttggagttggtgtcggcgtccctggacttggagttggtgctggtgttcctggacttggagttggtgctggtgttcctggcttcggggcagtacctggagccctggctgccgctaaagcagccaaatatggagcagcagtgcctggggtccttggagggctcggggctctcggtggagtaggcatcccaggcggtgtggtgggagccggacccgccgccgccgctgccgcagccaaagctgctgccaaagccgcccagtttggcctagtgggagccgctgggctcggaggactcggagtcggagggcttggagttccaggtgttgggggccttggaggtatacctccagctgcagccgctaaagcagctaaatacggtgctgctggccttggaggtgtcctagggggtgccgggcagttcccacttggaggagtggcagcaagacctggcttcggattgtctcccattttcccaggtggggcctgcctggggaaagcttgtggccggaagagaaaatgagcttcctaggacccctgactcacgacctcatcaacgttggtgctactgcttggtggagaatgtaaaccctttgtaaccccatcccatgcccctccgactccccaccccaggagggaacgggcaggccgggcggccttgcagatccacagggcaaggaaacaagaggggagcggccaagtgccccgaccaggaggccccctacttcagaggcaagggccatgtggtcctggccccccaccccatcccttcccacctaggagctccccctccacacagcctccatctccaggggaacttggtgctacacgctggtgctcttatcttcctggggggagggaggagggaagggtggcccctcggggaaccccctacctggggctcctctaaagatggtgcagacacttcctgggcagtcccagctccccctgcccaccaggacccaccgttggctgccatccagttggtacccaagcacctgaagcctcaaagctggattcgctctagcatccctcctctcctgggtccacttggccgtctcctccccaccgatcgctgttccccacatctggggcgcttttgggttggaaaaccaccccacactgggaatagccaccttgcccttgtagaatccatccgcccatccgtccattcatccatcggtccgtccatccatgtccccagttgaccgcccggcaccactagctggctgggtgcacccaccatcaacctggttgacctgtcatggccgcctgtgccctgcctccacccccatcctacactcccccagggcgtgcggggctgtgcagactggggtgccaggcatctcctccccacccggggtgtccccacatgcagtactgtataccccccatccctccctcggtccactgaacttcagagcagttcccattcctgccccgcccatctttttgtgtctcgctgtgatagatcaataaatattttattttttgtcctgg

SEQ ID NO: 99440 - DNA, 2175 bp, Artificial Sequence
  derived and/or modified sequence
atggcagggctgaccgccgcggcaccccgaccaggcgtcttattactgctgttatcaatcctgcacccctctcgaccaggcggagtgcccggcgcgattcccggcggagtcccaggcggcgttttctacccaggggctggattgggagctctgggaggtggggctttgggtccgggtgggaagccattaaaaccggtgccaggtggacttgccggcgctggcctgggagccggccttggcgcctttccagccgtaacattccccggtgcgttagtgccaggaggagtcgctgacgcagccgcagcgtacaaagctgccaaagccggcgccgggctgggtggggtgcctggcgtggggggtctcggagtgtcagcaggcgcggtagtgcctcagccaggagcaggagtgaagcccggaaaagtgcccggcgtggggttgcctggggtttacccagggggtgtgctaccgggggctagatttccaggagttggagttcttcctggagtgcctacaggtgcgggtgtgaaacctaaggcaccaggagtggggggagctttcgcagggattcctggggtgggccctttcggggggccccagcccggtgtcccgctcggctaccctatcaaggctcctaaactcccaggcggttacggattaccatatactaccggcaagcttccctatggatacggcccagggggagtagcaggcgccgcaggcaaggctggttacccaacaggaacaggcgtcggtccacaggcagcggcagccgctgctgcaaaggccgccgcgaaatttggcgcaggagctgctggggtccttccaggcgtgggtggggcgggagtccctggtgtccccggagcaatccctggaatcggtggcattgccggtgtgggcactccggccgccgccgccgcagccgccgcagccgccaaagcagcaaagtacggagcagctgccggccttgtgcctgggggtcctgggttcgggcccggcgttgtaggtgtcccaggggcgggcgtgcccggcgtaggtgtgccgggggccggtattcccgtcgtccctggtgcaggcataccaggagccgctgtgcctggcgtggttagccctgaggctgctgccaaggccgcagccaaggctgccaagtatggagctagacccggcgttggcgttggcggaatcccaacatacggggtgggtgcaggtggatttccagggtttggggtcggggtgggcggaatccctggtgtcgcaggggtcccaggggttgggggagtgcctggggtaggaggagtgccgggcgtgggaatctcacccgaagcacaggcagccgcagccgccaaagcagccaagtacggagtggggacaccagccgccgctgcagcaaaggccgcggctaaagccgcacagttcggactggtgcctggcgtgggcgtcgcacccggcgtgggggttgctccaggagtcggcgtggcacccggggtgggtctggcacctggggtcggcgtggcacctggcgttggcgtggcccccggcgtgggagtggcgcccggtattggtccgggtggtgtggccgcggccgcaaagtctgccgcgaaagttgcagctaaggctcaactccgtgctgccgccggccttggtgcagggatccctggactcggtgtgggggtgggagttcctggattgggagtcggagctggtgtgcctggcctgggagttggcgccggtgttccaggatttggcgcagtgcctggagctctcgccgcagccaaggctgcaaaatatggcgccgccgtacctggtgttcttgggggactgggggccttgggcggcgtgggtatacctgggggggtcgtgggagcagggcccgctgccgcggctgctgccgcaaaagcagccgctaaagccgcacaatttggactggtgggtgctgccggactgggaggtttaggagtcggcggcctcggggtgccaggggtaggaggattaggaggaattcccccagccgcagcagcgaaggctgcaaagtatggagcagccgggctgggaggtgtgctcgggggggctggacaatttccgctaggcggggtggcagcaaggccaggatttggcctgtccccgatcttccccggtggtgcatgtctgggtaaagcatgcggacgcaaacgaaaatag

SEQ ID NO: 99441 - DNA, 2274 bp, Artificial Sequence
  derived and/or modified sequence
atggctggcttaaccgctgccgctcccaggccaggcgtgttgctgctcctcttaagcatcctgcatccctccagaccaggtggcgttcccggcgccatacccggtggcgttccaggcggagtcttctaccccggggcggggctcggagcgctgggcggcggggctctcggtccaggtggaaaacccctcaaaccagtgccaggcggcctggcgggagccggtctcggagctgggcttggcgcctttccagcagtcacttttcccggtgctctggtgcctgggggtgttgccgacgctgcagcggcttataaggccgcgaaagctggggcaggactcggtggcgttccaggcgttggcggattaggggttagtgccggagccgtggttcctcagcccggcgccggagtgaagccaggtaaggtgcctggagtcggactccctggtgtatatccaggaggcgtcctgcctggtgccaggtttccgggagtgggcgtcctgccaggtgtgccaactggcgccggagtaaaacctaaagcacccggagtgggaggtgcgtttgctgggattccaggagtcggccctttcggcggacctcagccaggcgtacctctcggctatcctattaaggcccccaaactgccaggaggttatggtctgccctacactaccgggaaattgccctacgggtatggcccagggggcgtggcaggagcagccgggaaagcaggatacccaacggggacaggcgtgggtccccaagccgccgcagcagcagcagccaaggccgccgccaaattcggagccggtgccgctggagttctcccgggggtgggaggagccggggtgccaggggtgcccggagcgatcccgggaatcggtggcattgccggagtgggaacacccgcagcagccgctgccgctgctgccgccgcaaaagcagctaagtatggcgccgcagctggtctcgtccctggcggccctggtttcggacccggtgttgtgggcgtgcctggggccggagtcccgggagtaggggtaccgggagcaggcattcccgtggtcccaggagcaggaattcccggagcagcagtgcctggcgtggtctccccagaagcagcggcgaaggccgccgctaaagctgcaaaatacggggctagaccaggcgttggggtggggggcatccctacttatggcgttggagcgggcggtttcccagggttcggcgtgggcgtaggcggtattcctggcgtggccggcgtaccaggagtcggcggagtcccgggcgtgggaggcgttccgggcgtgggcatctcaccagaagcgcaggccgccgctgcagctaaagccgctaagtacggggtcggaactccagcggccgccgccgctaaggccgccgcaaaagccgctcagttcggactggttcctggcgttggagtggcaccaggagtaggcgttgcaccaggagtgggcgttgcacctggggtgggcctggcccccggcgttggcgtggcaccaggcgtcggagttgcgcccggagtgggagttgcgcctggcatcggtcctggaggagtggccgccgctgcgaaatcagctgccaaagttgcagcaaaagctcagttacgtgctgccgcaggcctgggcgcggggattcccggattaggcgttggcgtgggcgtcccaggtttaggagtgggcgccggggttcctggcctgggagttggagccggagtacctggttttggcgccggtgctgatgagggagtcaggcgatccctatctcccgagctgcgagaaggcgaccctagttcttctcaacacctgcctagtacaccgagctcgccacgcgtgcccggcgctctggccgcagcaaaagccgcaaaatacggcgcagccgtcccaggagtactcggtggtctgggggcactcgggggtgtagggatcccaggcggagtcgtgggcgccggtcctgccgcggcggccgccgctgcaaaagctgctgcgaaagcagctcaattcggcctagttggtgcagcagggcttggcggtcttggggtgggtggattgggcgtgcctggcgttggcggtcttggtggcatcccaccagcagctgccgcgaaggctgccaaatacggagccgccgggcttggaggagtgctggggggagcaggacagtttcctctgggaggagtcgcagcacgccccggattcgggctctctccaattttcccgggcggcgcttgcctcggtaaagcatgtggacgtaaaaggaaatag

SEQ ID NO: 99442 - DNA, 2136 bp, Artificial Sequence
  derived and/or modified sequence
atggcagggctgaccgcagcagcccctaggccaggcgttttacttctgctgctctctattctgcatccttcgcggcccggcggcgtgccaggggctattcctggtggcgtaccaggcggtgtgttctaccctggagccggcctaggtgctttgggcggaggcgcactaggtcccggcggaaaaccattgaagccagtgcctggcgggttagcgggcgccggcctcggtgcgggcctgggagcattccccgccgttaccttccctggggctttggttcccggaggcgtcgcagatgccgccgctgcttataaagcagccaaagctggcgccggtttgggaggcgttcccggagtgggcggtctgggagtcagtgcggcaccaagcgtgcctggggccgtcgtccctcaacctggcgcgggggttaaaccggggaaggtgcctggagtaggattgccaggtgtctatccaggaggggtactacccggagcccggtttcccggagtgggggttctgcctggcgtgccaaccggtgctggcgtcaaaccaaaagcacctggagtggggggggctttcgcaggaataccaggggttggcccgtttggtggcccccagcctggagtaccgctaggatacccgattaaagccccgaagctgcccgggggatacggcctcccttacaccactggcaaactcccatatggttatggtccaggtggcgtcgccggagctgctggtaaagcaggctaccccactggaacgggcgtagggcctcaagccgctgccgctgcggctgcaaaagcagcagcaaagtttggagctggcgccgctggtgtgctccccggggtgggcggagctggagtgcctggagtccctggggcaatccccggtatcggaggaattgctggggtcggcacacctgctgcagcagccgccgctgcagccgcagccaaggccgcaaaatacggtgcagctgccggtttggttccagggggcccaggatttggacctggagtcgtgggtgtgccaggagcgggcgtgccaggagtgggagtccctggcgctggtatccctgtggtgcctggggccggaatcccgggagccgccgttccaggtgttgttagtccagaggctgccgccaaagctgcagccaaagccgctaaatacggggccaggccaggtgtgggagtgggaggcatccctacgtacggcgtgggtgctggtgggttcccaggatttggcgtcggagtcggaggaattcctggcgtggccggtgttcccggagtggggggtgttcccggggtagggggcgtgccgggtgtaggtatcagtccggaggctcaggccgccgctgctgcaaaagctgcgaagtacggtgtcggaaccccggccgccgcagctgcaaaggccgccgcgaaggcagctcagttcggtctcgtgcccggcgtaggggtagcacctggtgttggagtggccccaggcgtaggagtggctccaggggtgggattagctcctggagtcggcgtggcgcccggagtgggagttgcccccggtgtgggcgtggcaccagggattggcccaggaggggttgccgctgccgccaaatccgccgccaaagtcgctgccaaagctcagctcagggccgccgctggcctgggcgctgggattcccggtctgggagttggagtcggggtgccagggctcggagttggtgccggagttccaggactgggcgtgggagcaggcgtccccggattcggtgcagtgccaggcgctttagccgcagctaaggcagcaaagtatggagcagccgttcccggagtcttaggtgggctaggcgcactgggaggcgtaggcattcctggcggagtcgttggagctgggcctgccgcagccgctgcggctgccaaggcagctgcaaaggcggctcagtttggcctagtaggtgctgccggattgggcggtttgggagtgggtggcctgggagttcccggagttggtgggttaggtggcattcccccagccgcagctgctaaagcagcaaagtacggagtggctgctagacctgggttcggcttaagccctatttttcctggaggcgcctgtttaggtaaggcttgcggcagaaaacggaaatag

SEQ ID NO: 99443 - DNA, 2379 bp, Artificial Sequence
  derived and/or modified sequence
atggcgggcctcactgcagccgctcccaggcccggtgtgttgctcctgctcctatccattttacatccgtcaagacccgggggggtcccgggcgcaattccaggcggggtccccggaggcgtcttctatcccggagcaggcctgggcgcattggggggcggtgcccttggaccaggagggaagcccctgaaacccgttcccggcggactcgccggtgccgggctcggagcaggtctgggggcattcccagccgtgactttccctggagccttagtacctggtggggtggcggatgccgcagctgcatataaagcagctaaggccggtgcaggacttggaggagtaccgggcgtgggaggtctgggcgtgtcagccggagctgtagtgccccaaccaggcgccggggtcaagccaggcaaggtgccaggagtgggcctgccaggggtgtatccgggtggcgtactcccaggagcccgctttccaggcgtgggagtgctgccgggggtgcctactggagctggagttaagcccaaagcccccggggtgggtggtgcattcgcagggataccaggcgtgggtcccttcggggggcctcaaccaggagttcctcttgggtatcctattaaagctccaaaacttccgggggggtatggccttccctacacaactggaaaattaccttacggttacggcccaggaggcgtggcaggcgctgccgggaaggcgggatatcccacaggtacaggcgttggtcctcaggcagccgctgcagccgcagctaaagcggctgccaaatttggcgctggagccgcaggcgtactgcctggcgtgggtggtgcaggagtgcctggtgtacctggggcaatcccgggcatcggaggcattgcaggggttggtactcctgctgccgcagcagccgctgctgcagcagccaaagccgctaaatatggagctgcagcggggctcgttcctgggggccctggctttgggcccggtgttgtcggagtacctggagcgggtgtgcccggggttggtgttccaggcgctgggataccggtagtgccaggagcgggaattcccggagctgccgtcccgggggtggtgagtcctgaagccgctgctaaggccgctgcaaaagcagcaaaatacggcgccagacccggagtgggggtgggaggtatacctacatacggtgtaggcgcaggcggttttcccggatttggcgtgggtgtgggcggaattcctggggtggctggcgtacctggtgtagggggggtgccgggcgttggaggagtgcccggagttggaatctctcctgaagcacaggctgccgctgcagcaaaagccgccaagtacggagccgctggcgcaggtgtcctgggaggcctggtgcctggagcgcctggcgcagtgcccggggtccccggcaccggaggggtgccaggggttgggacgccggcagccgcagctgccaaagctgcagctaaagcagcccagttcgccctgcttaacttagctggcctggttcccggcgtcggagtcgcaccaggagtgggcgtcgcgcccggggtaggagtggcaccaggtgtagggctggctccgggggtgggagttgcaccgggagtgggagttgcaccaggcgtgggtgtagcccctggaatcgggcccggtggtgtcgctgccgctgccaaatccgctgccaaagtcgctgccaaggcccagcttagggctgctgctggactaggcgctgggatacctggtcttggggtaggtgtgggagtacctgggctcggagtcggagctggcgtaccggggctgggtgtgggggctggagtcccaggattcggagcaggcgccgatgaaggtgttaggaggtcattgtccccagagcttagagaaggtgacccctccagctcacaacatctcccatctactcccagttctccacgcgttcccggagcattggctgcagccaaggccgccaagtacggggcggcagtgcctggtgtgttagggggcctcggagcattgggtggagtcggcatccctggaggggtcgtaggagctgggcctgctgccgccgctgccgctgctaaagcagccgccaaggctgcccaatttggattggttggtgcggcaggactgggaggcttgggtgtcggaggtttgggagtgcctggcgtgggcggactgggtggcatccctcctgctgcagccgctaaagctgccaagtacggtgctgccggtcttggaggcgtacttggtggagccggccagtttcccttgggaggcgtcgcagcaaggcccggctttggactgtcccccatttttccaggtggcgcttgcctggggaaggcttgcggtagaaagaggaagtag

SEQ ID NO: 99444 - DNA, 2034 bp, Artificial Sequence
  derived and/or modified sequence
atggctggtttgactgccgccgccccaagaccaggtgtcctcctgctgttactatctatcttacacccttcaagaccaggcggcgtccccggggccatccccggaggcgttcccggcggcgtattctaccccgcactcgggccgggaggtaaaccacttaagcccgtcccaggcggtttagccggggccggactcggggccgggctaggggcatttcccgcggtgacattcccaggtgccctcgtacccggtggagtggctgacgccgctgcagcctataaagccgcaaaggctggcgctggattaggaggcgtcccaggtgtgggcgggttaggcgtgtcagctggagccgtagttccccagccaggggctggagtcaagccaggaaaggtgcccggggtgggactgcctggggtgtatcctggcggcgtgcttcctggggccagattcccaggggtgggggtgctgcccggggtacccacaggcgcaggagtaaaaccaaaagcaccaggagttgggggtgcattcgctggaattcccggggtcggacctttcggggggcctcagcctggagtgcccctgggctacccgataaaggctcctaaactgcctggtggatacgggttaccctacacaactggtaagctaccatacggatatggtccaggtggcgtcgccggtgctgctgggaaggcgggttacccaaccgggacaggcgttggtcctcaggcggcagccgccgcggcggccaaggctgctgcaaagttcggggcaggggccgctggcgtccttccaggagtggggggggctggtgttccgggcgttcctggcgctatcccaggtataggaggcattgccggtgtgggaacccctgccgcagccgcagcggccgccgcagctgccaaagctgcaaaatatggagcagccgccggtctggtgccaggcggccctggatttgggccaggagttgttggagttcctggcgctggagtaccaggagtaggcgtgcccggagccgggattccagtggtgcccggcgcaggcataccgggtgcagccgtccctggcgtggtgagcccagaggctgccgcaaaggctgccgctaaagcagctaagtacggagctagacctggtgtcggggtgggaggcatccctacctacggagtgggcgcaggtggtttccccggattcggagtcggtgtggggggtatcccaggggtggcaggggttccaggggttggcggggtgccaggggttggcggggtccctggcgtgggtataagccctgaagcgcaagccgctgccgctgcaaaagcagcaaagtatggattggtgccaggagttggcgtggctcccggcgtcggcgtagcacccggagtgggtgtggcccccggcgtgggattagctccaggagtcggagtcgccccgggggtgggggttgctcctggcgtaggagtggccccgggaattgggccaggaggagtcgcagcagccgccaagtcggccgcgaaagtcgctgctaaagcccaactgagagcagcagccggcttgggagcagggataccgggtctgggagttggggttggcgtccctgggttgggcgtgggagctggtgtgcccggcttgggcgtgggagcaggagtgccgggctttggagcggttccaggggccctggccgccgctaaggccgctaaatatggcgcagctgtccctggagtgcttggcggcttaggggctcttggaggagtggggattcccggtggggtcgtaggggcagggccagccgccgcggcagccgctgcaaaggctgctgcgaaggccgctcaatttggactcgttggtgctgcggggttgggaggactgggcgtgggaggtctcggagttccaggagttggaggcttaggcggtatacctcccgcggctgccgctaaagcagcgaagtacggtgttgccgcgaggcccggattcgggctcagcccgatcttccctggaggcgcgtgccttggaaaggcctgtggccggaaaagaaagtag

SEQ ID NO: 99445 - DNA, 2118 bp, Artificial Sequence
  derived and/or modified sequence
atggccggtcttacggctgctgcacctcgcccaggtgtgcttcttttgctgctctctattctgcatccttctcgcccaggcggtgtccctggtgccatcccgggaggagtacccggcggtgtgttttatcctggagcgggactaggtgccttaggtgggggggcccttggaccaggggggaagcctctgaagcctgtgccagggggactggccggcgccggactgggcgctggattaggcgcctttcccgcagtaactttcccaggagcattggtgcccggcggcgttgccgacgctgctgctgcctacaaagctgccaaagcaggagcaggtctcggcggagtgcccggggttggagggctgggggtgagtgctggagccgtcgtgcctcagcctggggctggcgtgaagccaggtaaagttcccggagtggggttgccaggagtgtatccaggcggagtgctgccaggtgcacgatttccgggcgtgggggtgctgccaggggtgcctactggtgctggagtgaaaccgaaggccccaggagtcggtggggcgtttgcgggaattcctggagtgggtcccttcgggggtccccagccaggagtgcctttgggataccccattaaagcacctaagctacccggagggtatgggcttccttataccaccggtaagcttccttatggttacggaccggggggcgtcgcgggagccgctggcaaggcagggtatccaacaggaacaggcgtgggacctcaggccgccgccgcagccgctgcaaaagctgcagccaaatttggtgccggagcagccggtgtgttgcctggggtaggaggcgcgggagtgccaggcgtgcccggcgccattccaggaataggaggaatcgcgggggtcggtacccccgcggcagctgctgccgctgctgccgcggctaaagcagctaagtatggggcagccgctgggctcgtcccgggtggcccaggtttcggccccggcgtggtaggagttccaggggccggcgtgccaggtgtgggcgttcccggggccggaatccccgtcgtgcccggagcaggaatccccggcgcagccgttccaggggtggtctctcccgaagccgccgctaaggccgccgctaaggccgctaaatatggtgctagaccaggggtgggggtgggcggaattcctacctatggagtgggagccggagggtttccaggattcggcgttggagtgggagggattccaggagttgctggggtgccaggcgtgggcggagtcccaggtgtaggcggggtcccgggagtcggtatctcacctgaggcacaggcagccgccgcagcaaaggctgcgaagtacgggctcgtgccaggcgttggagtcgccccgggtgttggcgtggcaccaggagtgggagttgctccaggtgtgggactcgcaccaggagtaggggtagcacctggggtcggtgtggcaccaggagtgggcgtagccccaggtatcggacctggaggcgtagccgcagccgccaagagcgcagccaaggtggccgcaaaagcccaactgagggctgccgccgggctaggagctggaatcccaggattaggggttggcgttggtgtaccaggactcggggtcggagccggcgttcctggattgggcgtaggtgccggggtgcccggatttggtgctgtgcctggagccttggcggcggctaaagcagccaagtacggcgctgctgtccccggtgttctggggggacttggagccctggggggtgtggggattcccgggggcgtagttggagcaggccctgcagctgctgccgcggcggccaaagcagcggcaaaggctgcacagtttggactagtgggtgctgcaggactgggtggattaggcgtcgggggcctcggcgtgccaggagtgggggggctcggcggtattccccccgcagccgcggcaaaagctgcaaagtatggcgcagcgggcctcggaggtgtactgggaggagccggccaatttcctctgggaggggttgcggccagacccggatttggactctcccctattttccccgggggcgcttgtctgggaaaagcctgcgggagaaagcgcaaatag

SEQ ID NO: 99446 - DNA, 645 bp, Artificial Sequence
  derived and/or modified sequence
atggccgggctgacagcagcagctccgcgccccggcgtattgctattgttactgtcaattctccaccctagccggcctggcggcgtgcctggcgccattcctggaggagtgcctggtggcgtattctacccgggggctggactcggcgctctaggtgggggggccttaggaccaggcggaaaacctctcaaaccagtgccaggaggcttggcaggagccggactgggggccggtctcggcgcttttccagctgtcacattccccggagccctcgtacccggcggcgtggccgacgctgcagctgcgtacaaagccgctaaagctggtgctggcctgggaggcgttccgggcgtgggcgggctcggagtgagcgcaggtgctgtagtgccacagccaggtgcaggcgtaaaacctgggaaggtgccgggcgtgggcctccccggcgtgtatccaggcggcgttttgcccggcgttggcccgtttgggggaccacagcccggcgtaccactggggtaccccattaaagctcctaagttgccaggtggctatggcctcccctatacgacgggaaagttgccctatggatatggacccggcggcgttgctggcgctgctggaaaggccggttatccgacaggtacctag

SEQ ID NO: 99447 - DNA, 504 bp, Artificial Sequence
  derived and/or modified sequence
atggccggattaactgccgccgctccccggcctggcgttctgctccttttactgtctatcctgcaccccagcaggcccggaggagtaccaggggcaatccctggcggcgttccagggggggttttttaccctggcgcaggtcttggggcactcgggggcggagcactcggacccggcggtaagcctctaaaaccagtaccaggcggtctcgccggcgccggtctgggggcaggactcggcgccttcccagctgtaacattccctggggccctcgtccctggcggggttgccgacgctgctgcagcatacaaagcagcaaaggcaggtgtcgggccatttggaggacctcaacctggagtccccctgggttatcctataaaggcacctaaattgccaggcggttacggcttgccatatacaaccggtaagttaccatatgggtacggaccaggcggcgtcgccggagcagccgggaaggctggatacccaactggtactgggtag

SEQ ID NO: 99448 - DNA, 2079 bp, Artificial Sequence
  derived and/or modified sequence
atggccgggttaactgccgcggcccctcgccctggggtgctgttactgttgttatccattctgcacccgtctcgccccggtggcgtgccaggcgcaatccctggcggcgtgcccggtggtgtcttttatccgggcgccggacttggcgccttaggtggaggagctcttggcccaggtggcaaacctctaaaacccgtaccaggtgggctggctggagctggccttggcgcaggactgggtgccttccctgccgtaaccttccccggcgctttggttcctggcggcgtggctgatgccgcagcggcgtataaggctgccaaagctggagccggtctagggggcgtgcctggtgtggggggactgggcgtgtccgctgccccctcagtgccaggggcagtcgtgcctcagcctggtgcaggggtaaagcccggtaaagtgccaggcgtgggattgccaggagtgtaccccggaggtgtgctgcctggcgctagatttccaggagtgggggtgctcccaggggtgcctacaggagcgggagtcaagcccaaagctcccggagttggtggggcatttgcaggaattccaggcgtcgggccttttggaggtcctcagccgggagtccctctcggttatcctattaaagctccaaagcttcccgggggatatggtctcccttataccaccggcaagctcccctatggatacgggcctggaggcgtggccggagcggccggcaaagcaggctacccgacaggaaccggtgtgggaccacaggccgcagctgctgctgccgccaaagccgccgccaagttcggtgctggcgctgctggcgttctgcctggagtcggcggcgcgggtgtccccggtgtgccaggcgctatacccggtatcggaggcatcgcgggcgtgggaacaccagccgccgctgctgctgctgctgcagccgctaaagccgccaaatacggagctgccgccggcctcgtgccaggaggccctggcttcggccctggggtggttggggtgccgggcgccggagttcccggggtcggcgtgcctggcgctggaatccccgtcgtgcctggtgccggcatccctggagctgctgttccaggggtagtgtctccagaagctgctgctaaagccgctgctaaagccgccaaatatggagctagaccaggcgtcggagtgggagggatacctacttatggtgttggcgccggaggctttccaggatttggcgtgggagtaggcgggatcccaggtgttgcgggtgttcctggtgtaggcggagttccaggggtggggggggtgcccggagtcggaatttctccggaagcccaagctgctgccgccgccaaggctgccaaatacggactggtcccaggagtgggggtcgctccaggggtgggggtggcccctggcgtgggagtggcgccaggcgttggccttgcccccggggtaggagtcgcaccaggggtaggggttgctcctggagtgggggtggcccccggcataggccctggtggagtagcagcagcggcgaaatccgccgcaaaagttgccgcaaaagcacagttgcgcgcagcagccggtctaggcgcaggtatcccaggactgggtgtgggcgtaggcgtgcctggactaggtgtgggagcaggcgtaccaggactgggtgtgggtgcaggcgtccctggatttggtgccgtgcccggagcccttgccgctgccaaagctgcgaagtatggggccgctgttcctggtgtactgggagggctgggagcgttggggggggtggggatcccaggtggagtggtgggcgctggtcccgccgcagccgcagcagctgccaaagcagccgcaaaggccgctcaatttggcctagtgggagccgctggactgggaggactgggtgtggggggactgggcgtgccaggagttggagggctcgggggcatccctcctgcagccgctgccaaggcagctaagtacggggtggccgccagacctggctttggtttatcaccgattttcccggggggtgcgtgtctaggcaaagcgtgcggacggaagagaaagtag

SEQ ID NO: 99449 - DNA, 507 bp, Artificial Sequence
  derived and/or modified sequence
atggcaggcctgaccgccgcagcacctcgtcctggcgtgttgttgttacttctgtccattctccatccatctcgaccaggaggggtacctggggctatccccggaggggttcctggaggagttttttaccccggagccggattaggggctctgggcgggggagccctggggccaggcggaaagcctctgaagcccggcgtgggtccatttggcggacctcagcccggagttccgctgggataccctattaaggcacctaaacttcccggttacggccctggtggggtcgccggggctgcagggaaagctggctatccaactgggactggcgtgggtccccaggccgctgccgctgccgccgcaaaagcagcagccaagtttggggcaggcgctgcaggagtgttgccaggcgttggaggggcaggagtgcctggcgtcccgggcgctatacctggaataggcggcatcgctggcgtcggtacgcctgcagctgcagctgcggcatag

SEQ ID NO: 99450 - DNA, 885 bp, Artificial Sequence
  derived and/or modified sequence
atggccggccttacagccgcagcacctcgaccgggggtcttgcttctgctgttgtcaattcttcatccatcgcgtcctggcggcgtgcctggcgcgatcccaggcggtgttcccggcggtgtgttttatccaggcgcaggtctgggagcattggggggcggagcactgggcccgggtggaaagcccctcaagccaggtctgggcgctttccctgcagtgactttccccggcgctctggtgcccggaggggttgccgatgcggcagccgcatacaaagccgccaaagctggagcaggactggggggcgtcccgggggtgggtggactcggagtcagtgctggtgctgtagtgcctcagcctggagctggggtgaagcctggaaaagtcccaggtgtaggtctgcccggcgtgtacccaggtggcgtattacctggagctcgctttccgggagtgggtgtactccctggggttcccaccggggccggcgtaaaacctaaagctcctggcgtcggaccattcggaggccctcagcccggagttcccctgggttatccaataaaggcccctaagctgccaggtggctacggtcttccatatacaacaggcaagcttccttatggatacggacccggcggggtggccggtgcggccgggaaggcgggttaccctaccggcactggagtgggaccccaagcggcggccgccgctgcagccaaagcagcagctaaatttggggcaggggccgcgggggtgctcccaggtgtgggaggggctggagtgccaggggtaccaggggctatccccgggatcggaggcattgcaggcgtgggtacacctgcggcagcagccgcagccgcagctgccgcaaaagccgctaagtattag

SEQ ID NO: 99451 - DNA, 531 bp, Artificial Sequence
  derived and/or modified sequence
atggcaggtctgactgctgctgctccacgccccggagtgctgctcctcttgctcagtattctgcacccatctagacccggaggcgtaccaggcgcgataccaggaggagtgccgggaggagtcttttacccgggagcaggcttaggggccttaggaggtggtgcattggggccaggtggaaagcctttgaagccagtgcccggcggactggctggtgctgggctcggcgctggtctaggggcctttccagcggtgacctttccgggggccttggttccgggcggtgtagctgacgccgccgcagcctacaaggcggctaaagctggggccggactcggcggcgtcccaggcgtgggaggccttggagtttccgcaggagccgtagtccctcaaccgggcgcgggcgtaaagcccggtaaggtccccggtgttggtggtgcattcgcaggaatcccaggagttggccctttcggaggaccacaacccggcgttccactgggataccctattaaagcccctaaattgccatag

SEQ ID NO: 99452 - DNA, 1992 bp, Artificial Sequence
  derived and/or modified sequence
atggcaggactgacagcagcagcaccaagacccggtgtgcttctgctacttctgagtatcctgcatccatccagacctggaggcgtcccaggggcaatacccgggggagtgcctggtggagtcttctacccaggcgcgggattaggggcactgggcggcggtgcgttggggcccggaggtaagccgttaaaacccgttccaggcggactggccggggccgggttaggtgccggtgcagggctaggcggtgttcccggcgtgggtggtctcggcgtgtctgctggggccgtggtcccccagccaggcgctggtgtcaagccaggcaaagtccccggcgtcggtctccccggtgtgtacccaggaggcgtgctgcctggcgctagatttcctggcgtcggcgtgctccccggagtgccaacaggtgctggagtcaagcccaaagcccccggcgttggaggcgccttcgcagggatacccggagtaggtcctttcggaggcccccaaccaggagttcctctcggataccctattaaggcccccaaacttcctggagggtacggcctgccctatacaacaggcaagctgccttacggctacggccccggaggagttgctggcgccgcaggaaaggctggatatccgaccggtactggagtgggtccacaggccgccgcggccgcagccgccaaggccgccgcaaagtttggagcaggcgccgccggtgtccttccaggggtgggaggcgcaggagttccgggggtgcctggcgcaatacccggcatcggagggatcgctggggtgggcacccctgcagccgcagctgcagccgccgccgccgccaaggccgctaaatatggtgcggcagcaggactggtcccgggaggccccggctttgggcccggcgtggtgggtgtgcccggtgccggagtgcccggggttggcgttcctggggctgggatccccgtggttcccggtgctggcattccaggcgcagctgttccaggagttgtatctcctgaggcagccgccaaggctgctgcaaaagcggcgaagtatggggctagaccgggcgtaggtgtgggcggaatccctacatacggggttggagctggtgggttccccggatttggggtgggcgtggggggaattccaggcgtggcaggagttccaggagttggtggcgtgcccggggttggcggcgtaccaggagtaggaatctcacctgaagctcaagccgctgcagctgcgaaggccgctaaatacggggtcggcacccccgccgctgcagccgcgaaggcagcagccaaggccgctcagtttggcttagtccccggtgttggggtggcacccggagtcggcgttgcgcccggcataggccctggtggagtcgctgccgccgctaagagcgctgctaaagttgcggccaaagcacagctccgcgctgctgcgggtctgggagctggcattccaggcctcggggttggcgtgggtgttcccggcctaggagtgggggctggggtgccaggactcggggttggtgccggagtgccaggttttggggcagttcctggcgcacttgctgccgctaaggccgcgaagtatggagcagcagttcccggggttctagggggactgggcgccttaggcggggtggggattccaggtggagtggtgggggcgggtcctgccgccgctgcagcagcggccaaggccgccgcgaaggcagcacagttcgggctggtcggcgccgctgggctcggagggctgggcgtcggaggtttgggcgtgcccggggtgggtggtctcggcggaattccaccagcggcggcagctaaggctgcaaagtacggagctgctgggcttggcggcgtcttgggcggggctggccagtttcctctcggcggggtagcagcacgccctggctttggactctctcctatctttcccggaggtgcatgtctgggtaaagcctgcggtagaaaaaggaagtag

SEQ ID NO: 99453 - DNA, 2121 bp, Artificial Sequence
  derived and/or modified sequence
atggcgggcctgacagccgctgctccccggcctggggtcctcttacttctgctgagcattctccacccttccaggcctggcggtgtcccaggtgcaatcccaggtggtgtaccaggcggcgtgttctacccaggggctggactgggcgctttagggggcggggctttaggccccgggggaaaacccttgaaaccagtccccggtggccttgcaggagccggactcggcgcaggtctgggtgcattccctgctgtgacattccctggcgcattagtgcctggaggcgtagctgatgccgctgcagcctataaggcagccaaggccggtgccggcctgggcggtgtgcccggggtgggtggattaggcgtcagtgcaggagcagttgtgccacaaccaggcgcaggcgttaagcctggtaaagtacctggggtgggacttcctggcgtatacccagggggagtgctgcctggggccagatttcccggggtgggcgtcttgcctggagttccgacgggtgcaggagtcaaacccaaagcaccaggcgtgggcggtgcgttcgctggcatcccaggcgtgggccctttcggcggccctcaacccggggtccctctgggatatcctatcaaggcaccaaaactgccaggaggttacgggttaccctataccactggcaagctgccctatggatatggacccggaggagtcgcaggcgcggcagggaaggccggatatcctacaggcaccggagtcgggccacaggccgcggcggcagctgccgcaaaagccgctgcaaaattcggggcgggagcagctggcgtgttgccgggagttgggggcgctggcgtgcccggtgtaccaggagctatcccaggaatcgggggaattgcgggcgtgggaacccccgcagctgcagccgccgcagccgccgccgcgaaagctgccaagtatggcgcagcagcgggactggtccctggcgggccagggttcgggcctggcgtggtgggcgtaccaggcgctggcgtcccaggagtcggagtcccaggtgctggaatacccgtggttcccggagccggtatccctggtgccgctgtgcccggcgtggtatctccggaggccgcagccaaagctgcagccaaggccgcaaaatacggggcgagaccaggtgtgggggtcggtggaatacctacatatggggtaggtgccggtggcttcccagggttcggagtcggggtagggggaatcccaggagtcgccggtgtgcctggagtgggaggcgtgcctggggtgggcggcgtacccggggtcggaatcagcccagaagctcaggccgcagcagccgctaaagcagctaagtacggagtgggcacccctgccgccgcagccgcaaaggcagcagcgaaagcggcccaatttggactggtccccggtgtaggggtggcgcctggtgtgggtgtagctccgggggtaggagtggcgcccggagtaggattagctccaggggtgggtgtggcccctggagtgggcgtggctcctggcgtgggcgtggcccctggaattggacctggaggcgttgccgccgccgcaaaaagtgcagcaaaagttgccgccaaagctcagctccgagctgctgcaggactgggcgctggcatcccggggctgggtgttggtgtgggggtacctgggctgggtgtaggagcaggcgtgcctggactcggagttggcgcaggtgttccagggtttggcgcagtacctggagctctagccgccgctaaagccgccaaatatggagccgccgttcccggtgttctgggcggcctaggggcactgggcggggtaggaattccgggcggagttgttggagctgggcccgccgccgcagcagccgcagctaaagccgcagcgaaagctgctcagtttggtctcgtaggggcagcagggttgggaggactgggagtcgggggcctaggagttcccggggtgggaggcttaggggggataccccccgcagcagcagccaaagcagctaagtacggagtcgctgctcgaccgggttttggcctgagcccaatctttccagggggggcgtgtctgggcaaggcttgtgggaggaagaggaagtag

SEQ ID NO: 99454 - DNA, 2145 bp, Artificial Sequence
  derived and/or modified sequence
atggccggcctcactgcagccgctcctagacctggtgtactgttactgctgttgagcatccttcacccgagcaggcccggaggcgtacctggggcaatccctggcggagttcctgggggagtgttctaccctgcgctcggtcctggagggaagcctttaaaaccagtgcccggaggactggccggggcaggattaggagctggtctgggcgcttttcctgctgtaactttccctggagcgttggtccccgggggtgttgccgatgctgccgcagcttacaaagccgcaaaggccggtgctggacttggcggtgttccgggcgttggaggccttggagttagcgctggtgcagtggtcccccagcctggagccggagtgaagccgggcaaggtccccggcgtgggcctcccgggcgtatatcctggcggcgtactgccaggtgcgaggttccccggcgtgggcgtcttgccaggagtccccacaggagccggcgttaaaccaaaggcgcccggagttgggggagcctttgctgggataccaggggtcggaccattcggtggaccacagccaggagttcccctaggctatcctatcaaagctccgaagctccccggcgggtacggcctgccatacacaaccgggaagctcccttacggctacggtcctggcggggtcgctggcgctgcgggaaaggcaggataccctacaggcacgggtgtgggtccacaggccgccgctgccgccgccgcaaaagccgccgccaaattcggcgctggcgcagccggagttttaccaggtgtgggaggcgccggggtccctggcgtaccaggagcgatacccggcataggaggcattgcaggagtgggcacacccgcagcggcagctgcagctgcggccgcagcaaaggccgctaaatacggtgcagctgccggcttggttccaggaggaccaggttttggaccaggtgtggtgggcgtgccaggcgctggagtccctggagttggagtcccaggcgcaggcatacccgtggtccccggtgccggaatccccggggccgctgtgcctggtgtagtgagtccagaggccgctgcaaaagcagcagctaaagccgcaaaatatggcgccaggcctggggtaggcgtgggtggcatcccaacgtacggagtcggtgctggagggttccccggctttggggtgggcgtgggtggtataccaggcgtagccggggttccaggagtggggggtgttcctggggtgggcggggtgccaggcgttggaattagtcccgaggcccaggcagcagctgcagcaaaagccgctaagtacggtgtagggactcccgcagcagccgcagccaaggcagccgcaaaagctgctcagtttggactcgtgccaggggtgggggtggcgcccggagtcggcgtggcaccgggggtaggtgtggctcccggagtcggtttggccccgggagttggagtggctcctggggtaggtgtcgctccaggagtgggagtcgccccggggatcggccctgggggcgtggcagccgcagcaaagtcagccgccaaagtcgccgccaaggcacagctcagggccgctgccggtttgggagcaggaatcccaggattaggggttggcgtcggggtcccgggcctgggcgtaggcgcaggagtacccggtctaggggttggcgctggtgtgccaggttttggagctgtgcctggagcgcttgccgctgccaaagccgctaagtacggggccgcagttcctggtgtgctcggaggactaggagctttaggaggcgtgggaattccaggcggcgtagtgggggccggacctgcggcggctgcagccgctgccaaggccgcagccaaggctgctcagttcggcttggtcggagctgccgggttgggtgggctgggagtgggaggactgggggtgcccggggtaggaggacttgggggaatacctcccgccgctgcagccaaagccgccaagtacggcgctgctggtcttggaggagttcttggaggcgcaggacagtttcccctcggaggggtggctgctagacctggtttcggattaagtcccattttccctgggggtgcatgtttagggaaggcttgtgggagaaaacgcaaatag

SEQ ID NO: 99455 - RNA, 2175 nt, Artificial Sequence
  derived and/or modified sequence
auggccgggcuaacugcugcagccccaaggccagggguccuguugcuguuauugaguauccugcacccuaguagacccgguggaguaccuggggcgauucccggagggguccccgguggcguuuuuuaccccggugcggggcugggcgcccugggggggggugcucuugggccaggugggaagccauugaagcccgugccagguggccucgccggcgccgguuugggcgcaggauuaggggccuucccagcagucacauuccccggggcucuugugccuggcgguguugcagacgcugccgccgcuuauaaggccgcuaaggcgggcgccgggcuagggggagucccuggagucggaggucuuggaguguccgcuggugcaguaguuccgcagcccggugccgguguaaaaccugggaaggugcccggugugggccugcccgggguauaccccgggggaguguugcccggagcgcgguucccugguguaggaguguugccuggcguuccaacuggggcuggcguuaaacccaaggcccccggcgugggaggggccuuugccggcauuccuggggucggcccauucggaggaccgcagcccggcgugccucuaggcuaccccauuaaggccccuaaacugccuggaggguacggccugccuuauacuacgggaaaacuccccuauggcuacgguccaggugguguagcaggcgccgccgggaaggcuggcuauccgaccggcacuggcguuggcccgcaggccgccgccgccgcagcagccaaggcagcugcgaaguucggcgccggggcagcugggguguugccuggggugggcggagccggcguaccgggcgucccuggcgccauuccugggauagggggaaucgcugggguaggcacucccgcggcugccgccgccgcagccgcugccgcuaaagccgcuaaauauggagccgcugcuggacuugugccaggcggucccgguuuugggccagggguggucggagugccaggagcggggguaccuggaguugggguccccggagcaggaaucccuguugugccaggagccgggauuccaggagcagcugugccuggggucguuagucccgaggcagccgcgaaggccgccgccaaagccgccaaguauggcgcucggcccggggucggaguuggcggcauuccuacuuacgggguaggcgcaggcgguuucccuggauuuggcguaggaguuggagguauuccgggcguagccggcgucccgggggugggcggcgucccuggagucgggggagucccuggaguagguaucucgccggaggcgcaggcagcggccgccgccaaagccgcuaaguacggaguaggaaccccugccgcagcugccgcaaaggcagcggcaaaggcagcacaguucggauuaguuccuggggucgggguggcgccaggcgucgggguugccccaggggugggagucgcuccuggaguuggacuggccccaggagucggaguggcaccaggaguaggagucgccccuggggucggaguggccccaggaauagguccugggggcguggcagcugcugcuaaaagcgcagcuaaaguagccgcgaaagcucaacucagggcagcagccgggcugggugcuggaauaccggggcucggcguugggguuggcgugcccgggcugggagucggagccggggugccuggauuaggagugggagcaggggugcccggcuuuggcgcugugccgggagcguuggccgcugccaaggcggcaaaguauggagccgcggugccaggcguguugggaggguugggagcacugggcggagugggcaucccugggggggucguuggcgccgggccagccgcugcagcugcggccgcuaaagccgccgccaaagcagcccaguuuggguuaguuggggccgcuggacucgguggauuaggagucggaggacuaggagugccuggaguagguggucucggcggaaucccaccugccgcggcggccaaggcugccaaauacggagccgccggccucggcggcgugcucgggggggcgggccaguucccgcugggcggcguggccgcgcgccccggguuuggacugagcccuauuuuuccagggggagccugccuggguaaggcauguggacggaaacgcaaauag

SEQ ID NO: 99456 - RNA, 2274 nt, Artificial Sequence
  derived and/or modified sequence
auggcaggacuaaccgccgccgcucccaggccaggaguccugcugcucuuacugucgauuuugcacccaucacgacccggugggguuccaggcgccauccccggugggguuccugggggcgucuucuacccaggcgccgggcuuggagcccuugggggaggagcacugggucccggcgggaagccgcuaaaaccugucccagguggccuggcaggugcgggccugggcgccggauugggagcuuuucccgcgguuacguucccuggagcucucgucccgggcgguguugcagacgcagccgcggcguacaaagcugcuaaagcgggcgccgggcucggagguguuccaggcguggguggccugggugucagugccggggcaguugugccacagccaggggccgggguuaagcccggaaagguacccggggucgggcugccuggagucuauccaggaggaguucuucccggcgcucgcuuccccggagugggaguacugccuggggugccgacuggagcaggcgucaaaccgaaagcuccuggcguugggggagcauucgcuggcauuccuggcgugggacccuuugggggaccacaaccaggugugccccugggguaccccaucaaggccccaaagcugcccggcggcuacggacucccauacaccacagggaagcuuccauauggguacggcccugggggcguggccggcgcugccgggaaagcggguuauccgacagggacuggugugggcccucaggcugccgccgccgccgcagcuaaggcagcugcuaaauuuggugcuggggcggcaggagugcugccagggguggggggcgcuggcgucccaggggugccuggggccaucccuggaaucggggguauugccggaguggguacuccggccgccgccgccgccgccgccgcugcagcaaaggcggccaaauacggcgccgcagcaggucuagugccgggcgggcccggcuucggcccaggaguggugggagugccgggagcuggggugcccggugucggagucccuggagccggaauucccguggugcccggggccggcaucccuggggcagcuguaccaggcgucguaucaccggaggccgcagcuaaagccgcagccaaagcugcuaaauauggagcaaggcccggggugggaguuggagguauaccgaccuauggagugggggcgggcgguuucccaggguucggcgugggcguaggcgguauuccuggcguggccggcguaccaggagucggcggagucccgggcgugggaggcguuccgggcgugggcaucucaccagaagcgcaggccgccgcugcagcuaaagccgcuaaguacggggucggaacuccagcggccgccgccgcuaaggccgccgcaaaagccgcucaguucggacugguuccuggcguuggaguggcaccaggaguaggcguugcaccaggagugggcguugcaccuggggugggccuggcccccggcguuggaguggcaccgggagugggaguugccccggggguggguguagcacccgggauagggcccggggggguggcagccgccgccaagucagcagccaagguugcggccaaggcacagcugagggcagcagcuggcuuaggagccggcauucccggccugggcguuggagucggcgugccggguuugggagugggcgcuggcguucccgggcugggaguuggugccggugugccaggguuuggugccggagcagacgagggagucagaagaucccucuccccggagcugagagagggcgaucccagcagcucucagcacuuacccuccacgccuagcaguccacgagugcccggagcucuggcagccgcaaaggcggcaaaguacggcgcugcugugccugggguccuuggaggccugggugcucugggcggugugggaauaccagguggagugguuggggcuggucccgccgcagccgcugcugcugcuaaggccgcagcaaaagcagcccaguuuggguugguuggugccgcaggguuggggggacugggagugggaggccugggcguacccgguguggguggucucggcgggauaccuccagccgccgcggcuaaggcggcuaaguacggugccgcaggacuugguggcguucuggguggagccggucaguucccacucgguggcguggcugcacgaccaggguuuggccugucccccauuuuuccuggcggugccugcuuggguaaagcguguggacgaaagcgcaaguag

SEQ ID NO: 99457 - RNA, 2379 nt, Artificial Sequence
  derived and/or modified sequence
auggccgggcuuaccgcugcugcuccucggccuggagugcuuuugcuuuugcugagcauucugcauccuucgcgacccggaggugucccaggagcuauaccaggcggggugccgggaggcguauucuaccccggagccggccuaggagcguuaggcggcggugcucucggccccgguggcaagccucucaagccaguacccgggggacucgcuggugccggguugggagccggacucggcgcguucccagccguaaccuuuccaggcgcucuagugccgggaggcguggccgaugccgccgcugcauauaaagcagcuaaggccggugcaggacuuggaggaguaccgggcgugggaggucugggcgugucagccggagcuguagugccccaaccaggcgccggggucaagccaggcaaggugccaggagugggccugccagggguguauccggguggcguacucccaggagcccgcuuuccaggcgugggagugcugccgggggugccuacuggagcuggaguuaagcccaaagcccccgggguggguggugcauucgcagggauaccaggcgugggucccuucggggggccucaaccaggggugccucucggguacccaauuaaggccccaaaauugccuggaggcuacggucucccauacacaacuggaaaacugccauacggguacggcccaggaggaguggcaggugcugccgggaaggcaggguaucccaccgguacugguguuggaccgcaagcugcugcagcugccgcagccaaagcugcagccaaguucggcgccggcgcugcaggggugcugcccggaguugguggugcuggaguaccgggggucccgggggcaauccccgguauaggugggaucgccggcguuggcacgcccgccgccgccgccgccgccgccgccgcugcaaaagcagcuaaauauggcgccgcugccggacuggucccuggggguccaggcuucggcccuggggugguuggcguccccggcgccggcgucccaggagugggcgugccuggagcaggcauuccuguugucccaggcgccgguauucccggggccgcugugccuggaguuguuucccccgaggccgcggcuaaagccgcagcuaaagcagcgaaguacggugccaggccaggagucggagucggaggaauuccaaccuauggaguaggggcagggggauuuccaggauucggggugggcgucggaggaaucccagggguugccggagugccuggggugggcggcguuccuggcgucggaggagugccuggagucgguaucagcccagaggcccaggccgccgcugcugccaaagcagccaaauacggcgcagcuggcgccgguguacuuggcggccuagugccaggagccccgggagccguccccggugugccggggacuggaggaguucccggagugggaaccccugcagccgcugccgccaaagcagccgcaaaagcagcucaauuugcccugcuaaaucuggcggggcucgugccaggugugggaguugcccccggagugggcguggcaccuggagugggaguggccccaggagugggccuggcgccuggcgucggaguagccccuggcguuggcgucgcaccaggaguuggcgucgcacccggaauaggcccuggcggaguagccgccgcggccaaaagcgcugccaaagucgccgcaaaagcccaauuacgcgcagccgcagggcuuggggcuggcauucccggucugggaguggggguugggguuccagggcuaggugugggcgcugggguuccaggccuuggugugggugcugguguucccggguuuggagcaggagcugacgagggugugagaaggagucucucaccugaacuuagagagggcgauccaagcuccucccaacauuugccaucuaccccuucuucgccccgcgucccaggcgcuuuagcugccgcaaaagcagcgaaguauggcgcugccguccccggcguccuugguggccuaggggcgcucgggggcguagggaucccgggggggguggucggugcuggccccgcggcggcugccgcggccgcuaaagccgccgcaaaggcugcgcaauucggacuaguuggagcagcagggcugggcgggcucggugugggagggcugggcguacccggugucggggguuuggguggcauuccuccugcugcugcggcgaaggccgcaaaguauggggcagccggccuuggcggcgugcucggcggagcaggacaguucccccuuggcggaguggccgccagacccggauucgggcuuagccccaucuuucccggcggugcuugucuugggaaagccugcggucggaaaaggaaguag

SEQ ID NO: 99458 - RNA, 2034 nt, Artificial Sequence
  derived and/or modified sequence
auggcaggguuaacagccgccgcaccucggccugggguucuucuucucuugcugagcauccugcaucccagucggcccggugggguccccggggccauuccugguggggucccaggggggguauucuacccggcuuugggcccaggugguaagccccugaaacccguaccgggcggccuggcgggcgcgggccugggagccgggcugggagccuuuccagccgugacuuuuccaggagcccucguccccggaggcguagcugacgcagcagcagcuuacaaagccgcaaaagccggcgcggggcugggcggcguaccuggugugggcggauuaggcguauccgcaggcgccguggucccgcagccaggugccggcguaaagcccggaaaaguucccggcguuggguuaccuggcgucuauccagggggcguacuucccggcgcucgguucccuggggugggagugcuaccaggcgugccaacuggagcaggcgucaaaccuaaagccccaggaguugggggcgccuuugccggcauucccggugugggccccuuugggggcccccagccaggcguaccccugggauauccaauuaaagcgccuaaguugcccggcgguuacggucugccuuauacuacagggaaacuacccuacggguaugggcccgggggaguggcaggagcagccggcaaagccggauauccuaccgggaccgggguaggaccgcaagccgcagcugcugccgcagcaaaggcugcagccaaguuuggcgcuggcgccgcuggcguucuaccgggaguggggggugccggagugccgggcguuccgggggcaauuccaggcauaggcgguauugcugggguaggcacaccugcggcagccgcagcugcugcagcagcagccaaagccgcaaaguauggagcagcugcuggacuggugccugggggacccggcuucgguccaggugucgugggcgugcccggagcgggcguuccagguguugguguaccaggugcaggaauucccgugguuccuggggccgggauucccggugcagcugucccgggugucguuucaccugaagcugcagcaaaggcugccgccaaagcugccaaauacggagcaaggccaggcgugggcguaggcgguaucccuacuuacggcguuggugcagggggguucccagguuuuggcguuggagugggugggauacccggaguggcaggggugccaggcgucggcggggugcccggcguggguggugugccuggcgucgguaucucaccagaagcucaagcagccgcugccgccaaagcugccaaauaugggcuggugccuggaguuggaguagcccccgguguuggcguagccccuggagucggaguggcaccaggcgugggccuagcuccaggugugggcguggcccccggcgugggcguggcacccgggguggguguagccccugguauaggccccggcgguguggcugccgcagccaaaucugcagcaaaggucgccgcuaaagcccaguugcgcgccgccgccggacucggggccggaauucccggcuugggugucggcguuggagugccaggucugggugucggcgcuggugucccggggcuuggggucggcgccggcgucccgggcuucggcgccgugccuggugcacuggcagccgcaaaggcggcuaaauacggugcugccgucccgggggugcucgguggucucggugcgcucgggggaguagguauccccgggggaguaguuggcgcaggucccgcagcggccgcagcugccgcuaaggcugcugcuaaggcggcccaguuuggauuagugggggcagcaggucuuggagguuugggugucggaggucuaggaguccccggugugggcggauuaggggggauaccacccgccgccgcagccaaagcggccaaguacgguguugcagcucguccgggauucgguuuguccccgauuuucccuggaggagcuugccuggguaaagcuugcgguagaaagcgcaaguag

SEQ ID NO: 99459 - RNA, 2118 nt, Artificial Sequence
  derived and/or modified sequence
auggccggacuuacagccgccgccccacggccugggguucuuuuguugcugcucagcauucuucacccuucacgcccuggcgggguuccaggcgcgauaccagguggagugccugggggagucuuuuacccaggagcgggacugggggcccuggguggaggggcguuggggccuggaggcaaaccacuaaagccagugccuggagggcuugcuggggcaggacugggggcuggucuuggggcuuuuccugcugugacauucccaggagcacuugugcccgguggcguagcugaugcagccgccgccuacaaggcugcgaaagccggagcaggccucggagggguucccggaguggggggucugggagugucugcuggugcugugguaccccagccgggagcaggcguuaagcccggcaaggugccaggcgugggcuugccagguguuuauccugggggugugcugcccggagcucgcuucccaggagucggcguucucccagggguccccaccggggcuggcgugaagccuaaagccccagggguagguggagcauuugcagguauaccuggcgucggucccuuuggcggcccacagccuggggucccgcucggcuaucccauaaaggcacccaaacuaccaggcggauacggacuccccuauaccacagggaaacuuccuuacggauacgggccaggaggagucgccggcgcugcggguaaagcugguuaccccacagggacuggggucggaccgcaggcagccgcggcagcagcugcuaaggcagcggcgaaguuuggcgcuggcgccgccggaguccuccccgggguaggcggcgccggugugccuggagucccgggggcaauccccggaauugguggaaucgcaggaguggggacacccgcugccgccgcggccgccgcagcagccgcgaaggccgcuaaauauggagcugccgccggucuagugccgggaggaccugguuuuggcccuggagucgugggcguccccggcgccggggugccaggcgugggcguccccggcgcaggcauccccgucguaccaggggccggcauuccaggagcggcugugccuggcguggucucccccgaggccgccgcaaaggcugcagccaaggccgcgaaguauggagcaagacccgggguuggcgugggcgguauuccgacauacgggguaggcgcaggcggcuuuccagguuucggugucggcgugggcggcauuccaggggucgcagggguaccuggcgugggcggcguucccggggucgggggcgugcccggagugggaauuagcccugaagcacaagccgcagcagcagcgaaagccgcaaaguacgggcugguucccggagucggaguggcccccgggguggggguugcccccggcguuggcguggcuccuggggugggacucgcccccggaguagggguugccccugggguugggguggcacccgguguggguguugcgccuggcaucggcccaggaggcguagccgccgccgcaaagucugcagccaaaguugcugcaaaagcccaacugcgggcugcugccggacugggagcuggcaucccuggacuuggcgucggugucggggucccuggccuggguguaggagcuggcgugcccggacucggagucggagccggcgucccgggcuucggggcugugccuggggcacucgccgccgccaaagcagcaaaauacggggcagcuguucccggggugcuggguggccucggcgcuuuggggggcgucgggauuccuggcgggguuguaggggcaggcccggcugcugccgcugccgccgcuaaggccgcggccaaggccgcucaguucggguuggugggggccgccggacugggcgggcugggcgucgggggcuugggcgugccuggggugggagguuuaggaggaaucccucccgcugccgcagccaaggccgccaaauauggggccgcgggauugggugguguauuagguggggccggacaguuuccccucgguggggucgcagcaagaccaggauuuggccucucgccuauuuuccccggaggcgccugucucggaaaagcuugcggaagaaaaagaaaguag

SEQ ID NO: 99460 - RNA, 645 nt, Artificial Sequence
  derived and/or modified sequence
auggccgggcugacagcagcagcuccgcgccccggcguauugcuauuguuacugucaauucuccacccuagccggccuggcggcgugccuggcgccauuccuggaggagugccugguggcguauucuacccgggggcuggacucggcgcucuaggugggggggccuuaggaccaggcggaaaaccucucaaaccagugccaggaggcuuggcaggagccggacugggggccggucucggcgcuuuuccagcugucacauuccccggagcccucguacccggcggcguggccgacgcugcagccgcuuacaaagcugcgaaagcuggcgcaggacucgggggugugccaggcguuggcggacuuggcgucagcgccggugccguggugccccagccgggugcuggugugaaacccggaaaggugcccgggguaggacugcccggaguuuacccaggcgggguacugccuggaguggggccuuuuggcgguccucagccuggcgugccgcugggauacccaauuaaagcucccaagcucccuggcgguuacggccugccuuauacaacuggaaaacugccuuacggauacggaccugguggggucgcaggcgccgcgggcaaagcaggcuauccgacaggcaccuag

SEQ ID NO: 99461 - RNA, 504 nt, Artificial Sequence
  derived and/or modified sequence
auggccgggcuaacugccgcggcgcccagaccaggugugcuguuacuccuccuuucgauccuacacccuagcagaccuggcggagucccaggagcuauucccgguggcgugccgggcgguguuuuuuauccuggugcaggucugggcgcccugggggggggugcucugggcccugggggcaagccgcucaaaccugugccugggggguuggcgggugcaggacugggugccggacuaggagccuuuccggccgugaccuuccccggagcacugguuccuggaggcguggccgaugcugcugccgccuacaaagcagccaaggcaggcgucggcccuuucggggggccccagccuggcgucccucucgguuacccgauuaaagcaccaaaguugcccggaggauauggacuaccuuauacuacaggaaagcuuccauauggguacggcccuggcggcguugcaggagcugccgggaaggcgggauaccccacuggcacagguuag

SEQ ID NO: 99462 - RNA, 2079 nt, Artificial Sequence
  derived and/or modified sequence
auggcaggccuuacugccgcagcgccaaggccggggguuuuauuguugcuccuuuccauucuccauccuagccguccuggcggggugcccggcgcuauaccaggcggcguacccggagguguuuuuuauccuggagcgggauuaggggcucugggagggggcgcuuuggggccagguggaaagccucugaaaccugugccuggugguuuggccggagccggccugggggcgggguugggcgccuucccggcugucaccuucccuggugcccugguucccggaggagucgcagacgcugccgccgccuauaaggcugcgaaagcuggagcuggccucgguggggucccagguguagggggucucggggugagugccgcuccauccguucccggcgccgucguaccccagccuggagccggagucaagccuggcaaggugccugguguuggcuugccaggcgucuacccuggugggguacugccaggcgcucgcuuccccggugugggagugcugccuggugugcccacuggggcaggagucaagcccaaggcaccaggaguaggcggggcuuuugcuggaauucccggcgugggccccuucggcgguccccagcccggcgucccacuuggguauccaauuaaggcuccaaaauugccgggcggcuacgggcucccauacacaacgggaaaguugcccuacggauauggcccuggcggcgucgcaggggccgcaggcaaggcuggcuaucccacaggcacaggaguugggccucaagcugcagcggccgcugccgccaaagccgcagcuaaguuuggagcuggagcagcuggcguguugccaggagugggcggcgccggagugcccggaguaccuggagccauccccgggauuggugggauugccggcguggggacaccagcugccgcugcagcggccgcugcugccgcuaaagcagcuaaguacggcgcugcggcuggacucguuccgggaggcccuggguuugggccuggcgucgugggagugcccggagccggcgugcccggagugggagucccgggcgccggcaucccuguugugcccggugcaggaauccccggggccgccgucccagggguggucagcccugaggccgccgcaaaagcugccgcgaaggccgcaaaguacggggcucggccgggaguagguguagggggcauuccaacuuauggcguuggugccgggggauucccuggguuuggcgucgggguagggggaauacccggcguggcgggcgugcccggagugggugggguaccggguguuggcggaguacccggcguaggaaucaguccagaagcccaagcugcggccgccgccaaggccgcuaaguacggccugguuccuggcgugggcguggcaccaggcgucggaguggcuccagguguaggugucgcuccgggagugggucuggcaccgggcgugggaguggccccagguguggggguugccccaggaguaggagucgcaccagguauaggcccuggcggcguggccgccgcugccaagagugcugcuaaaguggcugccaaggcccagcugagggccgccgcuggguugggggcagggauuccaggguugggugucggggugggugucccuggacuaggagugggggcaggcgugccuggccugggagugggcgccggggucccaggauucggugccgugccaggggcucucgccgcugccaaagcugccaaguauggcgccgcugugccuggaguccuuggaggacugggagcccugggcggggucgggauucccggaggcgucgugggcgccgggcccgccgcagcggcggcugccgcaaaagcagcugcaaaggccgcgcaguucggucuggucggugcugcagguuuaggcggccugggagucggcggucuggggguaccagggguugggggucucggaggcaucccacccgcugcugcugccaaggccgccaaauacggugucgcggcccgcccaggcuucggacugucuccgauuuucccagguggcgcuugccuugggaaggcgugcggaagaaagagaaaauag

SEQ ID NO: 99463 - RNA, 507 nt, Artificial Sequence
  derived and/or modified sequence
auggcuggccugacggccgccgccccuaggccuggcguacugcucuuacuucuguccauucuccacccuucacgcccaggagguguccccggggcuaucccuggcgguguacccggaggagucuucuauccuggagccgguuugggagcacugggaggcggagcccucggaccugguggaaaaccgcuaaagcccgggguggggccauucggcggcccucagccaggagugccucugggauaucccauaaaggcaccaaagcuuccuggguacggcccugggggcguggccggagccgcuggaaaagcaggcuacccaaccggaacugggguugggccucaggcagccgcagccgcagcugcaaaggccgccgcaaaauucggggcuggggcugccgggguuuuacccggugugggaggagccggagucccuggcgucccaggagcuauuccuggaauuggcggaaucgccggaguaggcacccccgcugccgcugcugccgcauag

SEQ ID NO: 99464 - RNA, 885 nt, Artificial Sequence
  derived and/or modified sequence
auggcuggacucacagcagccgcgccaagacccgguguucuucuccugcucuugagcauacuccacccuagucggccugggggcgugccuggcgccauaccaggggggguuccgggaggaguauucuacccgggggcgggccuaggugcauuggguggaggagcccucgguccuggagggaaaccgcucaaaccuggauugggggccuucccagccguaaccuuccccggcgcacucguucccggaggagucgcugaugcugcugccgcauauaaagcugcuaaggccggcgccgguuuaggaggcgugccugggguuggcggccuuggagugagugccggggccguggucccacagccaggagccggcgugaagccuggaaagguuccgggggucggacuccccgguguuuauccuggcgggguacucccaggcgcuagauucccuggcgucggcguucugccuggcguccccaccggcgcaggcguaaagccuaaagccccagguguaggcccauuuggaggaccucagcccggugucccccugggcuauccaauaaaggcucccaaacugcccgguggguauggacugccauacacaaccggaaagcugccauaugguuacggaccugggggugucgccggcgcagcaggaaaggccggguacccgaccgguaccggcguggggccucaggccgcagcggcugccgccgccaaagcugccgccaaguuuggcgcgggggcagcugggguguuacccggcguggguggcgcugggguccccggcgugcccggagcaauucccggaaucggaggcauugcagggguugggacccccgccgccgcggccgccgcagcagcagcugccaaagcggcuaaauacuag

SEQ ID NO: 99465 - RNA, 531 nt, Artificial Sequence
  derived and/or modified sequence
auggccggacugacagcagcugccccuagacccggaguacuccuccucuuacugucaaucuugcacccauccagaccgggugggguuccaggggcgaucccuggcgguguccccggcggugucuucuacccaggagcaggacugggcgcauuagggggaggugcacugggcccugguggaaaaccacucaagccaguucccggugggcuggcaggggccggccucggggccggccuaggagccuucccagccguuaccuucccuggcgcuuuagugcccggaggagucgcagacgcugcugcagcauauaaagcagccaaggccggcgccggacuggguggcgugccuggcguggggggccugggaguuucagcgggagcagugguuccccagcccggagcgggggugaaaccugggaagguaccggggguuggcggagcauucgcaggaauuccuggcguuggccccuucggagguccgcagccaggcguaccuuugggcuauccaauuaaagcucccaagcuaccguag

SEQ ID NO: 99466 - RNA, 1992 nt, Artificial Sequence
  derived and/or modified sequence
auggccgggcugacagccgcagccccccguccuggcgugcugcuguuacugcuuagcauucugcacccgucucggccaggcgggguuccgggugccauccccggcggggugccagggggcguuuucuacccaggagcaggcuugggcgcccucggaggcggggcucuuggucccggaggcaagccacucaaaccugugccggguggacuggcaggcgccggacucggcgcaggcgccggccuugggggcgugccuggcgugggugggcucggcgucucugcaggagcugucgugccgcagcccggagccgguguaaagccuggaaaagugcccggaguaggcuuacccggcguguaucccggaggcguacugccuggagcuagauucccuggugugggcguacuacccggaguuccuaccggcgcgggcgugaagccuaaagcaccgggaguggggggagcguucgcaggcaucccuggaguuggaccuuucggugguccccagccaggcgugccccuuggguauccaauaaaggccccuaaguugccuggaggguacggacucccguacacaacggguaaauugccuuacggguacggacccgggggggucgccggagccgcgggcaaagcagguuaccccacgggcacuggaguugggccacaggcugccgcggcugcugccgcuaaggcagccgccaaguucggggcaggcgccgcuggugugcugccuggggucggcggugccgggguaccaggugucccaggggccauuccagggauuggugguaucgccggggugggaacaccagccgcagcagccgcugccgccgcagccgccaaagccgcuaaauacggagccgcagcuggccucgugcccggggguccugguuuugguccaggcgugguggggguucccggggccggcgugccagguguaggggugccaggagccgggauuccugucgugccuggggcaggcauuccuggugccgcugugcccggcguggugucccccgaggcagcugcuaaggcagcugcgaaagccgccaaauacggugcacggcccggggugggcgucggugggauuccuacauacggaguaggcgccggggguuuucccggcuuuggaguggguguggguggcaucccaggcguugccggugucccaggagugggaggcguucccggagugggaggaguaccagguguugguauuuccccugaagcccaggcagccgcagccgcuaaagccgcaaaauauggugucgggacacccgcugcagccgccgccaaggccgcugcuaaggccgcccaguucggacuuguuccuggcguggguguugcuccaggggugggaguugccccaggcauugggcccgguggugucgccgccgcugccaaaagugcagccaagguggcagcuaaagcgcagcuucgggcugcugcuggacucggggcggguauuccuggucuggguguaggggugggaguaccgggauuggggguuggcgcuggugugccuggacugggggugggugccgggguccccggauuuggggccguucccggggcuuuggcagcugccaaagcugcuaaauauggggcugcagugccgggaguucucggaggguuaggcgcuuuaggcggcgugggcauucccggaggaguugugggagcgggaccugcagccgcugccgcugcggcuaaggccgcagcaaaggccgcccaguuugggcugguuggcgcugccgggcuuggcggguugggggugggcgggcugggagugccagggguuggcggacucggaggcaucccuccggcagcagcagcgaaagccgccaaguauggugccgccggacuagggggggucuuaggcggugcgggucaguuuccccugggagggguggcugcaagacccggauuuggccucucaccgauuuuccccggaggugcuugucugggcaaggcaugcgggcgcaagaggaaauag

SEQ ID NO: 99467 - RNA, 2121 nt, Artificial Sequence
  derived and/or modified sequence
auggcaggguugacagccgccgcaccccggccagguguguuguugcugcugcugagcauucugcacccuuccaggccaggaggagugccuggagcaauucccggagguguccccggcggcguguuuuacccuggagccgggcugggggcccuuggaggaggggccuuagguccggguggaaagccccugaaaccuguuccugguggccuugccggggccgggcugggugcugguuuaggcgcuuuccccgcggucaccuuuccaggcgcacucgucccagggggagucgcagaugccgcagccgcuuacaaggcugcuaaagccggagcaggacugggaggugucccaggaguuggaggcuuggggguuuccgccggcgccgucgugccccagccaggcgcaggagucaagcccggcaaagugccgggcgugggucugccuggcgucuaccccggcgguguucuaccaggugcgagguucccaggagugggaguauugccgggggucccuaccggggcagggguuaaaccgaaagcuccagggguggguggagcuuucgccgguaucccugggguggggcccuucggcggcccacagccuggagucccauugggcuauccaauuaaggccccgaagcugccuggcgguuacggauugccauacacuacagguaagcugccauacggcuacgguccagggggcguggcuggcgccgcaggaaaggcagguuaccccacagggacuggaguagguccacaggccgcggcugcugcagccgccaaagcggcugccaaguucggcgcaggcgccgccgguguacugccuggagugggaggggcuggcgugcccggcgugccaggagcaauuccuggcaucgguggcauugccggagugggaacaccggcugcagccgccgcagccgcagccgcagccaaggcagcuaaauauggcgcggccgccgguuugguacccggugggcccggcuuugggccaggaguuguaggcgugcccggugcugggguaccuggugucggcgugccuggggccggaauuccuguggugccgggggccggcauucccggagcagcaguacccgguguggucaguccugaagccgcggccaaggccgcugccaaagccgccaaguacggcgcgaggcccggggugggagucggagggauucccacauacggcguuggggccggaggguuccccggauuuggugugggcgucggcgguauaccugguguugcgggcguccccggcguagggggcgugccagggguggggggggucccuggaguaggaauaagcccagaagcucaagccgcagccgcugcuaaagcugccaaauauggaguaggcacaccagccgccgcagcugccaaggcagcggccaaagccgcccaauucggacugguaccuggcguuggcgucgccccuggggugggagucgcaccugggguuggaguggcuccaggugucggccucgccccugggguggggguggccccaggcguggggguggcucccggcgugggcguugcuccaggaauaggaccuggagggguggcagcugcagcuaagucggccgcaaagguagcagcaaaagcccaguuacgggcugccgccgggcugggugccggaauuccggggcugggagugggugugggagucccgggacucggcguuggagcaggcgugccugggcuuggagucggugcuggaguuccuggcuucggagccgugccuggagcacucgccgccgcuaaagcggcaaaguauggugcagccgugccuggggugcugggcggucuaggcgcccuagguggagugggcauuccaggcggcguggucggggcaggcccugcagcagcugccgcugccgcaaaagccgcugccaaagcugcacaguuuggucucgugggagcagccggguugggaggcuugggagucggaggacucggggugccuggcguggguggccuuggcggcauccccccagccgcagccgccaaggcagccaaauauggaguugcugcccggccaggcuuuggcuuaucaccuauauucccuggcggagcuugucuggggaaagccugcggaagaaagaggaaauag

SEQ ID NO: 99468 - RNA, 2145 nt, Artificial Sequence
  derived and/or modified sequence
auggccgggcugacugcugccgcaccccgccccgggguacuauugcuuuuauuaaguaucuuacacccuucacgccccgggggcguaccuggugccauuccaggcggaguuccaggugguguguucuauccagcccuugguccuggaggcaaaccccugaagccugugcccggcggauuagcaggcgcuggccugggcgcagggcugggagcuuuuccagcuguaacuuucccgggagcgcuuguccccggggguguugccgaugcugcagcagcuuacaaggccgcaaaagcaggggcaggccuaggcggagugccgggcguggggggacucggcguuucagcuggggcagugguuccucagcccggcgcugguguuaaacccgguaagguccccggcgugggccugccaggugucuacccugggggcgugcugccgggugcacgguuccccggaguuggagugcugcccggcguccccacaggggcaggggugaagccuaaagcuccuggugucggaggcgccuucgccggcaucccaggagucggcccauuuggggguccucagcccggaguaccucugggguauccuauuaaagccccaaagcuaccagggggauauggauuaccauacacaacaggcaaguugccauacggcuacggcccgggcggaguggccggagccgcuggcaaagcgggauaccccacugggacggggguuggaccccaagccgcagccgcugccgccgccaaggccgcagcaaaauucggggccggugcagccgggguguuaccuggcguuggaggggccggcguacccggcguaccuggggcuauccccggcauaggcggaauagccggcguaggcacgccugcggccgccgcugcagcugccgcugcagccaaagcagcaaaguacggugccgccgcuggauuggugcccggcggaccaggguucggaccgggagucgugggcguuccuggagcuggaguccccggaguuggggugccaggagccggcaucccagucgucccuggagccgguaucccaggggcagcaguccccggggugguaagcccugaggccgcugccaaggccgccgccaaggcggcaaaauauggagcaagacccggggucggcguagguggaauaccaacauauggugugggcgcuggggguuuccccggcuuuggcgucggcgucggaggaauccccggaguagccggugucccaggugugggcggugucccgggaguggggggcgugccaggcgucggcaucucccccgaggcucaggccgcugccgcugccaaggccgcuaaauacggugugggcacaccagccgcagccgccgcuaaggccgcugccaaggccgcucaauuugggcuggugccaggaguuggcguugcgcccgguguaggcguugcccccggcguuggagucgcaccuggcgugggauuggcucccgggguugguguugcccccggagugggcguugcaccaggagugggagucgccccggggaucggcccugggggcguggcagccgcagcaaagucagccgccaaagucgccgccaaggcacagcucagggccgcugccgguuugggagcaggaaucccaggauuagggguuggcgucggggucccgggccugggcguaggcgcaggaguacccggucuagggguuggcgcuggugugccagguuuuggagcugugccuggagcgcuugccgcugccaaagccgcuaaguacggggccgcaguuccuggugugcucggaggacuaggagcuuuaggaggaguggguauacccggcggaguggugggggcaggucccgccgcugcugcggcugcugcuaaagcugcagcaaaagccgcccaguuuggccucgugggcgcugcggguuugggcgggcugggugucggaggccuaggggucccaggagucgguggccuuggcggcaucccccccgcggccgccgcaaaggcugccaaauauggagcagcugggcucggcggcguucuggguggagccggacaauucccacuugggggcguagcagcccgccccggauucgggcuuagcccaaucuucccagggggagccugccuuggcaaggcaugcgggcguaagcggaaauag

SEQ ID NO: 99469 - RNA, 2175 nt, Artificial Sequence
  derived and/or modified sequence
auggcagggcugaccgccgcggcaccccgaccaggcgucuuauuacugcuguuaucaauccugcaccccucucgaccaggcggagugcccggcgcgauucccggcggagucccaggcggcguuuucuacccaggggcuggauugggagcucugggagguggggcuuuggguccgggugggaagccauuaaaaccggugccagguggacuugccggcgcuggccugggagccggccuuggcgccuuuccagccguaacauuccccggugcguuagugccaggaggagucgcugacgcagccgcagcguacaaagcugccaaagccggcgccgggcuggguggggugccuggcguggggggucucggagugucagcaggcgcgguagugccucagccaggagcaggagugaagcccggaaaagugcccggcgugggguugccugggguuuacccagggggugugcuaccgggggcuagauuuccaggaguuggaguucuuccuggagugccuacaggugcgggugugaaaccuaaggcaccaggaguggggggagcuuucgcagggauuccuggggugggcccuuucggggggccccagcccggugucccgcucggcuacccuaucaaggcuccuaaacucccaggcgguuacggauuaccauauacuaccggcaagcuucccuauggauacggcccagggggaguagcaggcgccgcaggcaaggcugguuacccaacaggaacaggcgucgguccacaggcagcggcagccgcugcugcaaaggccgccgcgaaauuuggcgcaggagcugcugggguccuuccaggcguggguggggcgggagucccugguguccccggagcaaucccuggaaucgguggcauugccggugugggcacuccggccgccgccgccgcagccgccgcagccgccaaagcagcaaaguacggagcagcugccggccuugugccuggggguccuggguucgggcccggcguuguaggugucccaggggcgggcgugcccggcguaggugugccgggggccgguauucccgucgucccuggugcaggcauaccaggagccgcugugccuggcgugguuagcccugaggcugcugccaaggccgcagccaaggcugccaaguauggagcuagacccggcguuggcguuggcggaaucccaacauacggggugggugcagguggauuuccaggguuuggggucggggugggcggaaucccuggugucgcaggggucccagggguugggggagugccugggguaggaggagugccgggcgugggaaucucacccgaagcacaggcagccgcagccgccaaagcagccaaguacggaguggggacaccagccgccgcugcagcaaaggccgcggcuaaagccgcacaguucggacuggugccuggcgugggcgucgcacccggcguggggguugcuccaggagucggcguggcacccggggugggucuggcaccuggggucggcguggcaccuggcguuggcguggcccccggcgugggaguggcgcccgguauugguccgggugguguggccgcggccgcaaagucugccgcgaaaguugcagcuaaggcucaacuccgugcugccgccggccuuggugcagggaucccuggacucggugugggggugggaguuccuggauugggagucggagcuggugugccuggccugggaguuggcgccgguguuccaggauuuggcgcagugccuggagcucucgccgcagccaaggcugcaaaauauggcgccgccguaccugguguucuugggggacugggggccuugggcggcguggguauaccugggggggucgugggagcagggcccgcugccgcggcugcugccgcaaaagcagccgcuaaagccgcacaauuuggacuggugggugcugccggacugggagguuuaggagucggcggccucggggugccagggguaggaggauuaggaggaauucccccagccgcagcagcgaaggcugcaaaguauggagcagccgggcugggaggugugcucgggggggcuggacaauuuccgcuaggcgggguggcagcaaggccaggauuuggccuguccccgaucuuccccgguggugcaugucuggguaaagcaugcggacgcaaacgaaaauag

SEQ ID NO: 99470 - RNA, 2274 nt, Artificial Sequence
  derived and/or modified sequence
auggcuggcuuaaccgcugccgcucccaggccaggcguguugcugcuccucuuaagcauccugcaucccuccagaccagguggcguucccggcgccauacccgguggcguuccaggcggagucuucuaccccggggcggggcucggagcgcugggcggcggggcucucgguccagguggaaaaccccucaaaccagugccaggcggccuggcgggagccggucucggagcugggcuuggcgccuuuccagcagucacuuuucccggugcucuggugccuggggguguugccgacgcugcagcggcuuauaaggccgcgaaagcuggggcaggacucgguggcguuccaggcguuggcggauuagggguuagugccggagccgugguuccucagcccggcgccggagugaagccagguaaggugccuggagucggacucccugguguauauccaggaggcguccugccuggugccagguuuccgggagugggcguccugccaggugugccaacuggcgccggaguaaaaccuaaagcacccggagugggaggugcguuugcugggauuccaggagucggcccuuucggcggaccucagccaggcguaccucucggcuauccuauuaaggcccccaaacugccaggagguuauggucugcccuacacuaccgggaaauugcccuacggguauggcccagggggcguggcaggagcagccgggaaagcaggauacccaacggggacaggcguggguccccaagccgccgcagcagcagcagccaaggccgccgccaaauucggagccggugccgcuggaguucucccgggggugggaggagccggggugccaggggugcccggagcgaucccgggaaucgguggcauugccggagugggaacacccgcagcagccgcugccgcugcugccgccgcaaaagcagcuaaguauggcgccgcagcuggucucgucccuggcggcccugguuucggacccgguguugugggcgugccuggggccggagucccgggaguagggguaccgggagcaggcauucccguggucccaggagcaggaauucccggagcagcagugccuggcguggucuccccagaagcagcggcgaaggccgccgcuaaagcugcaaaauacggggcuagaccaggcguugggguggggggcaucccuacuuauggcguuggagcgggcgguuucccaggguucggcgugggcguaggcgguauuccuggcguggccggcguaccaggagucggcggagucccgggcgugggaggcguuccgggcgugggcaucucaccagaagcgcaggccgccgcugcagcuaaagccgcuaaguacggggucggaacuccagcggccgccgccgcuaaggccgccgcaaaagccgcucaguucggacugguuccuggcguuggaguggcaccaggaguaggcguugcaccaggagugggcguugcaccuggggugggccuggcccccggcguuggcguggcaccaggcgucggaguugcgcccggagugggaguugcgccuggcaucgguccuggaggaguggccgccgcugcgaaaucagcugccaaaguugcagcaaaagcucaguuacgugcugccgcaggccugggcgcggggauucccggauuaggcguuggcgugggcgucccagguuuaggagugggcgccgggguuccuggccugggaguuggagccggaguaccugguuuuggcgccggugcugaugagggagucaggcgaucccuaucucccgagcugcgagaaggcgacccuaguucuucucaacaccugccuaguacaccgagcucgccacgcgugcccggcgcucuggccgcagcaaaagccgcaaaauacggcgcagccgucccaggaguacucgguggucugggggcacucggggguguagggaucccaggcggagucgugggcgccgguccugccgcggcggccgccgcugcaaaagcugcugcgaaagcagcucaauucggccuaguuggugcagcagggcuuggcggucuugggguggguggauugggcgugccuggcguuggcggucuugguggcaucccaccagcagcugccgcgaaggcugccaaauacggagccgccgggcuuggaggagugcuggggggagcaggacaguuuccucugggaggagucgcagcacgccccggauucgggcucucuccaauuuucccgggcggcgcuugccucgguaaagcauguggacguaaaaggaaauag

SEQ ID NO: 99471 - RNA, 2136 nt, Artificial Sequence
  derived and/or modified sequence
auggcagggcugaccgcagcagccccuaggccaggcguuuuacuucugcugcucucuauucugcauccuucgcggcccggcggcgugccaggggcuauuccugguggcguaccaggcgguguguucuacccuggagccggccuaggugcuuugggcggaggcgcacuaggucccggcggaaaaccauugaagccagugccuggcggguuagcgggcgccggccucggugcgggccugggagcauuccccgccguuaccuucccuggggcuuugguucccggaggcgucgcagaugccgccgcugcuuauaaagcagccaaagcuggcgccgguuugggaggcguucccggagugggcggucugggagucagugcggcaccaagcgugccuggggccgucgucccucaaccuggcgcggggguuaaaccggggaaggugccuggaguaggauugccaggugucuauccaggagggguacuacccggagcccgguuucccggaguggggguucugccuggcgugccaaccggugcuggcgucaaaccaaaagcaccuggaguggggggggcuuucgcaggaauaccagggguuggcccguuugguggcccccagccuggaguaccgcuaggauacccgauuaaagccccgaagcugcccgggggauacggccucccuuacaccacuggcaaacucccauaugguuaugguccagguggcgucgccggagcugcugguaaagcaggcuaccccacuggaacgggcguagggccucaagccgcugccgcugcggcugcaaaagcagcagcaaaguuuggagcuggcgccgcuggugugcuccccggggugggcggagcuggagugccuggagucccuggggcaauccccgguaucggaggaauugcuggggucggcacaccugcugcagcagccgccgcugcagccgcagccaaggccgcaaaauacggugcagcugccgguuugguuccagggggcccaggauuuggaccuggagucgugggugugccaggagcgggcgugccaggagugggagucccuggcgcugguaucccuguggugccuggggccggaaucccgggagccgccguuccagguguuguuaguccagaggcugccgccaaagcugcagccaaagccgcuaaauacggggccaggccaggugugggagugggaggcaucccuacguacggcgugggugcugguggguucccaggauuuggcgucggagucggaggaauuccuggcguggccgguguucccggagugggggguguucccgggguagggggcgugccggguguagguaucaguccggaggcucaggccgccgcugcugcaaaagcugcgaaguacggugucggaaccccggccgccgcagcugcaaaggccgccgcgaaggcagcucaguucggucucgugcccggcguagggguagcaccugguguuggaguggccccaggcguaggaguggcuccaggggugggauuagcuccuggagucggcguggcgcccggagugggaguugcccccggugugggcguggcaccagggauuggcccaggagggguugccgcugccgccaaauccgccgccaaagucgcugccaaagcucagcucagggccgccgcuggccugggcgcugggauucccggucugggaguuggagucggggugccagggcucggaguuggugccggaguuccaggacugggcgugggagcaggcguccccggauucggugcagugccaggcgcuuuagccgcagcuaaggcagcaaaguauggagcagccguucccggagucuuaggugggcuaggcgcacugggaggcguaggcauuccuggcggagucguuggagcugggccugccgcagccgcugcggcugccaaggcagcugcaaaggcggcucaguuuggccuaguaggugcugccggauugggcgguuugggaguggguggccugggaguucccggaguugguggguuagguggcauucccccagccgcagcugcuaaagcagcaaaguacggaguggcugcuagaccuggguucggcuuaagcccuauuuuuccuggaggcgccuguuuagguaaggcuugcggcagaaaacggaaauag

SEQ ID NO: 99472 - RNA, 2379 nt, Artificial Sequence
  derived and/or modified sequence
auggcgggccucacugcagccgcucccaggcccgguguguugcuccugcuccuauccauuuuacauccgucaagacccgggggggucccgggcgcaauuccaggcgggguccccggaggcgucuucuaucccggagcaggccugggcgcauuggggggcggugcccuuggaccaggagggaagccccugaaacccguucccggcggacucgccggugccgggcucggagcaggucugggggcauucccagccgugacuuucccuggagccuuaguaccuggugggguggcggaugccgcagcugcauauaaagcagcuaaggccggugcaggacuuggaggaguaccgggcgugggaggucugggcgugucagccggagcuguagugccccaaccaggcgccggggucaagccaggcaaggugccaggagugggccugccagggguguauccggguggcguacucccaggagcccgcuuuccaggcgugggagugcugccgggggugccuacuggagcuggaguuaagcccaaagcccccgggguggguggugcauucgcagggauaccaggcgugggucccuucggggggccucaaccaggaguuccucuuggguauccuauuaaagcuccaaaacuuccggggggguauggccuucccuacacaacuggaaaauuaccuuacgguuacggcccaggaggcguggcaggcgcugccgggaaggcgggauaucccacagguacaggcguugguccucaggcagccgcugcagccgcagcuaaagcggcugccaaauuuggcgcuggagccgcaggcguacugccuggcguggguggugcaggagugccugguguaccuggggcaaucccgggcaucggaggcauugcagggguugguacuccugcugccgcagcagccgcugcugcagcagccaaagccgcuaaauauggagcugcagcggggcucguuccugggggcccuggcuuugggcccgguguugucggaguaccuggagcgggugugcccgggguugguguuccaggcgcugggauaccgguagugccaggagcgggaauucccggagcugccgucccggggguggugaguccugaagccgcugcuaaggccgcugcaaaagcagcaaaauacggcgccagacccggagugggggugggagguauaccuacauacgguguaggcgcaggcgguuuucccggauuuggcgugggugugggcggaauuccugggguggcuggcguaccugguguagggggggugccgggcguuggaggagugcccggaguuggaaucucuccugaagcacaggcugccgcugcagcaaaagccgccaaguacggagccgcuggcgcagguguccugggaggccuggugccuggagcgccuggcgcagugcccgggguccccggcaccggaggggugccagggguugggacgccggcagccgcagcugccaaagcugcagcuaaagcagcccaguucgcccugcuuaacuuagcuggccugguucccggcgucggagucgcaccaggagugggcgucgcgcccgggguaggaguggcaccagguguagggcuggcuccgggggugggaguugcaccgggagugggaguugcaccaggcguggguguagccccuggaaucgggcccgguggugucgcugccgcugccaaauccgcugccaaagucgcugccaaggcccagcuuagggcugcugcuggacuaggcgcugggauaccuggucuugggguaggugugggaguaccugggcucggagucggagcuggcguaccggggcugggugugggggcuggagucccaggauucggagcaggcgccgaugaagguguuaggaggucauuguccccagagcuuagagaaggugaccccuccagcucacaacaucucccaucuacucccaguucuccacgcguucccggagcauuggcugcagccaaggccgccaaguacggggcggcagugccugguguguuagggggccucggagcauuggguggagucggcaucccuggaggggucguaggagcugggccugcugccgccgcugccgcugcuaaagcagccgccaaggcugcccaauuuggauugguuggugcggcaggacugggaggcuugggugucggagguuugggagugccuggcgugggcggacuggguggcaucccuccugcugcagccgcuaaagcugccaaguacggugcugccggucuuggaggcguacuugguggagccggccaguuucccuugggaggcgucgcagcaaggcccggcuuuggacugucccccauuuuuccagguggcgcuugccuggggaaggcuugcgguagaaagaggaaguag

SEQ ID NO: 99473 - RNA, 2034 nt, Artificial Sequence
  derived and/or modified sequence
auggcugguuugacugccgccgccccaagaccagguguccuccugcuguuacuaucuaucuuacacccuucaagaccaggcggcguccccggggccauccccggaggcguucccggcggcguauucuaccccgcacucgggccgggagguaaaccacuuaagcccgucccaggcgguuuagccggggccggacucggggccgggcuaggggcauuucccgcggugacauucccaggugcccucguacccgguggaguggcugacgccgcugcagccuauaaagccgcaaaggcuggcgcuggauuaggaggcgucccaggugugggcggguuaggcgugucagcuggagccguaguuccccagccaggggcuggagucaagccaggaaaggugcccggggugggacugccugggguguauccuggcggcgugcuuccuggggccagauucccaggggugggggugcugcccgggguacccacaggcgcaggaguaaaaccaaaagcaccaggaguugggggugcauucgcuggaauucccggggucggaccuuucggggggccucagccuggagugccccugggcuacccgauaaaggcuccuaaacugccugguggauacggguuacccuacacaacugguaagcuaccauacggauaugguccagguggcgucgccggugcugcugggaaggcggguuacccaaccgggacaggcguugguccucaggcggcagccgccgcggcggccaaggcugcugcaaaguucggggcaggggccgcuggcguccuuccaggaguggggggggcugguguuccgggcguuccuggcgcuaucccagguauaggaggcauugccggugugggaaccccugccgcagccgcagcggccgccgcagcugccaaagcugcaaaauauggagcagccgccggucuggugccaggcggcccuggauuugggccaggaguuguuggaguuccuggcgcuggaguaccaggaguaggcgugcccggagccgggauuccaguggugcccggcgcaggcauaccgggugcagccgucccuggcguggugagcccagaggcugccgcaaaggcugccgcuaaagcagcuaaguacggagcuagaccuggugucggggugggaggcaucccuaccuacggagugggcgcaggugguuuccccggauucggagucggugugggggguaucccagggguggcagggguuccagggguuggcggggugccagggguuggcggggucccuggcguggguauaagcccugaagcgcaagccgcugccgcugcaaaagcagcaaaguauggauuggugccaggaguuggcguggcucccggcgucggcguagcacccggaguggguguggcccccggcgugggauuagcuccaggagucggagucgccccggggguggggguugcuccuggcguaggaguggccccgggaauugggccaggaggagucgcagcagccgccaagucggccgcgaaagucgcugcuaaagcccaacugagagcagcagccggcuugggagcagggauaccgggucugggaguugggguuggcgucccuggguugggcgugggagcuggugugcccggcuugggcgugggagcaggagugccgggcuuuggagcgguuccaggggcccuggccgccgcuaaggccgcuaaauauggcgcagcugucccuggagugcuuggcggcuuaggggcucuuggaggaguggggauucccgguggggucguaggggcagggccagccgccgcggcagccgcugcaaaggcugcugcgaaggccgcucaauuuggacucguuggugcugcgggguugggaggacugggcgugggaggucucggaguuccaggaguuggaggcuuaggcgguauaccucccgcggcugccgcuaaagcagcgaaguacgguguugccgcgaggcccggauucgggcucagcccgaucuucccuggaggcgcgugccuuggaaaggccuguggccggaaaagaaaguag

SEQ ID NO: 99474 - RNA, 2118 nt, Artificial Sequence
  derived and/or modified sequence
auggccggucuuacggcugcugcaccucgcccaggugugcuucuuuugcugcucucuauucugcauccuucucgcccaggcggugucccuggugccaucccgggaggaguacccggcgguguguuuuauccuggagcgggacuaggugccuuaggugggggggcccuuggaccaggggggaagccucugaagccugugccagggggacuggccggcgccggacugggcgcuggauuaggcgccuuucccgcaguaacuuucccaggagcauuggugcccggcggcguugccgacgcugcugcugccuacaaagcugccaaagcaggagcaggucucggcggagugcccgggguuggagggcugggggugagugcuggagccgucgugccucagccuggggcuggcgugaagccagguaaaguucccggagugggguugccaggaguguauccaggcggagugcugccaggugcacgauuuccgggcgugggggugcugccaggggugccuacuggugcuggagugaaaccgaaggccccaggagucgguggggcguuugcgggaauuccuggagugggucccuucggggguccccagccaggagugccuuugggauaccccauuaaagcaccuaagcuacccggaggguaugggcuuccuuauaccaccgguaagcuuccuuaugguuacggaccggggggcgucgcgggagccgcuggcaaggcaggguauccaacaggaacaggcgugggaccucaggccgccgccgcagccgcugcaaaagcugcagccaaauuuggugccggagcagccgguguguugccugggguaggaggcgcgggagugccaggcgugcccggcgccauuccaggaauaggaggaaucgcgggggucgguacccccgcggcagcugcugccgcugcugccgcggcuaaagcagcuaaguauggggcagccgcugggcucgucccggguggcccagguuucggccccggcgugguaggaguuccaggggccggcgugccaggugugggcguucccggggccggaauccccgucgugcccggagcaggaauccccggcgcagccguuccagggguggucucucccgaagccgccgcuaaggccgccgcuaaggccgcuaaauauggugcuagaccaggggugggggugggcggaauuccuaccuauggagugggagccggaggguuuccaggauucggcguuggagugggagggauuccaggaguugcuggggugccaggcgugggcggagucccagguguaggcggggucccgggagucgguaucucaccugaggcacaggcagccgccgcagcaaaggcugcgaaguacgggcucgugccaggcguuggagucgccccggguguuggcguggcaccaggagugggaguugcuccaggugugggacucgcaccaggaguagggguagcaccuggggucgguguggcaccaggagugggcguagccccagguaucggaccuggaggcguagccgcagccgccaagagcgcagccaagguggccgcaaaagcccaacugagggcugccgccgggcuaggagcuggaaucccaggauuagggguuggcguugguguaccaggacucggggucggagccggcguuccuggauugggcguaggugccggggugcccggauuuggugcugugccuggagccuuggcggcggcuaaagcagccaaguacggcgcugcuguccccgguguucuggggggacuuggagcccugggggguguggggauucccgggggcguaguuggagcaggcccugcagcugcugccgcggcggccaaagcagcggcaaaggcugcacaguuuggacuagugggugcugcaggacuggguggauuaggcgucgggggccucggcgugccaggagugggggggcucggcgguauuccccccgcagccgcggcaaaagcugcaaaguauggcgcagcgggccucggagguguacugggaggagccggccaauuuccucugggagggguugcggccagacccggauuuggacucuccccuauuuuccccgggggcgcuugucugggaaaagccugcgggagaaagcgcaaauag

SEQ ID NO: 99475 - RNA, 645 nt, Artificial Sequence
  derived and/or modified sequence
auggccgggcugacagcagcagcuccgcgccccggcguauugcuauuguuacugucaauucuccacccuagccggccuggcggcgugccuggcgccauuccuggaggagugccugguggcguauucuacccgggggcuggacucggcgcucuaggugggggggccuuaggaccaggcggaaaaccucucaaaccagugccaggaggcuuggcaggagccggacugggggccggucucggcgcuuuuccagcugucacauuccccggagcccucguacccggcggcguggccgacgcugcagcugcguacaaagccgcuaaagcuggugcuggccugggaggcguuccgggcgugggcgggcucggagugagcgcaggugcuguagugccacagccaggugcaggcguaaaaccugggaaggugccgggcgugggccuccccggcguguauccaggcggcguuuugcccggcguuggcccguuugggggaccacagcccggcguaccacugggguaccccauuaaagcuccuaaguugccagguggcuauggccuccccuauacgacgggaaaguugcccuauggauauggacccggcggcguugcuggcgcugcuggaaaggccgguuauccgacagguaccuag

SEQ ID NO: 99476 - RNA, 504 nt, Artificial Sequence
  derived and/or modified sequence
auggccggauuaacugccgccgcuccccggccuggcguucugcuccuuuuacugucuauccugcaccccagcaggcccggaggaguaccaggggcaaucccuggcggcguuccaggggggguuuuuuacccuggcgcaggucuuggggcacucgggggcggagcacucggacccggcgguaagccucuaaaaccaguaccaggcggucucgccggcgccggucugggggcaggacucggcgccuucccagcuguaacauucccuggggcccucgucccuggcgggguugccgacgcugcugcagcauacaaagcagcaaaggcaggugucgggccauuuggaggaccucaaccuggagucccccuggguuauccuauaaaggcaccuaaauugccaggcgguuacggcuugccauauacaaccgguaaguuaccauauggguacggaccaggcggcgucgccggagcagccgggaaggcuggauacccaacugguacuggguag

SEQ ID NO: 99477 - RNA, 2079 nt, Artificial Sequence
  derived and/or modified sequence
auggccggguuaacugccgcggccccucgcccuggggugcuguuacuguuguuauccauucugcacccgucucgccccgguggcgugccaggcgcaaucccuggcggcgugcccgguggugucuuuuauccgggcgccggacuuggcgccuuagguggaggagcucuuggcccagguggcaaaccucuaaaacccguaccaggugggcuggcuggagcuggccuuggcgcaggacugggugccuucccugccguaaccuuccccggcgcuuugguuccuggcggcguggcugaugccgcagcggcguauaaggcugccaaagcuggagccggucuagggggcgugccugguguggggggacugggcguguccgcugcccccucagugccaggggcagucgugccucagccuggugcagggguaaagcccgguaaagugccaggcgugggauugccaggaguguaccccggaggugugcugccuggcgcuagauuuccaggagugggggugcucccaggggugccuacaggagcgggagucaagcccaaagcucccggaguugguggggcauuugcaggaauuccaggcgucgggccuuuuggagguccucagccgggagucccucucgguuauccuauuaaagcuccaaagcuucccgggggauauggucucccuuauaccaccggcaagcuccccuauggauacgggccuggaggcguggccggagcggccggcaaagcaggcuacccgacaggaaccggugugggaccacaggccgcagcugcugcugccgccaaagccgccgccaaguucggugcuggcgcugcuggcguucugccuggagucggcggcgcggguguccccggugugccaggcgcuauacccgguaucggaggcaucgcgggcgugggaacaccagccgccgcugcugcugcugcugcagccgcuaaagccgccaaauacggagcugccgccggccucgugccaggaggcccuggcuucggcccuggggugguuggggugccgggcgccggaguucccggggucggcgugccuggcgcuggaauccccgucgugccuggugccggcaucccuggagcugcuguuccagggguagugucuccagaagcugcugcuaaagccgcugcuaaagccgccaaauauggagcuagaccaggcgucggagugggagggauaccuacuuaugguguuggcgccggaggcuuuccaggauuuggcgugggaguaggcgggaucccagguguugcggguguuccugguguaggcggaguuccagggguggggggggugcccggagucggaauuucuccggaagcccaagcugcugccgccgccaaggcugccaaauacggacuggucccaggagugggggucgcuccagggguggggguggccccuggcgugggaguggcgccaggcguuggccuugcccccgggguaggagucgcaccagggguagggguugcuccuggaguggggguggcccccggcauaggcccugguggaguagcagcagcggcgaaauccgccgcaaaaguugccgcaaaagcacaguugcgcgcagcagccggucuaggcgcagguaucccaggacugggugugggcguaggcgugccuggacuaggugugggagcaggcguaccaggacugggugugggugcaggcgucccuggauuuggugccgugcccggagcccuugccgcugccaaagcugcgaaguauggggccgcuguuccugguguacugggagggcugggagcguugggggggguggggaucccagguggaguggugggcgcuggucccgccgcagccgcagcagcugccaaagcagccgcaaaggccgcucaauuuggccuagugggagccgcuggacugggaggacuggguguggggggacugggcgugccaggaguuggagggcucgggggcaucccuccugcagccgcugccaaggcagcuaaguacgggguggccgccagaccuggcuuugguuuaucaccgauuuucccggggggugcgugucuaggcaaagcgugcggacggaagagaaaguag

SEQ ID NO: 99478 - RNA, 507 nt, Artificial Sequence
  derived and/or modified sequence
auggcaggccugaccgccgcagcaccucguccuggcguguuguuguuacuucuguccauucuccauccaucucgaccaggagggguaccuggggcuauccccggagggguuccuggaggaguuuuuuaccccggagccggauuaggggcucugggcgggggagcccuggggccaggcggaaagccucugaagcccggcguggguccauuuggcggaccucagcccggaguuccgcugggauacccuauuaaggcaccuaaacuucccgguuacggcccugguggggucgccggggcugcagggaaagcuggcuauccaacugggacuggcguggguccccaggccgcugccgcugccgccgcaaaagcagcagccaaguuuggggcaggcgcugcaggaguguugccaggcguuggaggggcaggagugccuggcgucccgggcgcuauaccuggaauaggcggcaucgcuggcgucgguacgccugcagcugcagcugcggcauag

SEQ ID NO: 99479 - RNA, 885 nt, Artificial Sequence
  derived and/or modified sequence
auggccggccuuacagccgcagcaccucgaccgggggucuugcuucugcuguugucaauucuucauccaucgcguccuggcggcgugccuggcgcgaucccaggcgguguucccggcgguguguuuuauccaggcgcaggucugggagcauuggggggcggagcacugggcccggguggaaagccccucaagccaggucugggcgcuuucccugcagugacuuuccccggcgcucuggugcccggagggguugccgaugcggcagccgcauacaaagccgccaaagcuggagcaggacuggggggcgucccggggguggguggacucggagucagugcuggugcuguagugccucagccuggagcuggggugaagccuggaaaagucccagguguaggucugcccggcguguacccagguggcguauuaccuggagcucgcuuuccgggaguggguguacucccugggguucccaccggggccggcguaaaaccuaaagcuccuggcgucggaccauucggaggcccucagcccggaguuccccuggguuauccaauaaaggccccuaagcugccagguggcuacggucuuccauauacaacaggcaagcuuccuuauggauacggacccggcgggguggccggugcggccgggaaggcggguuacccuaccggcacuggagugggaccccaagcggcggccgccgcugcagccaaagcagcagcuaaauuuggggcaggggccgcgggggugcucccaggugugggaggggcuggagugccagggguaccaggggcuauccccgggaucggaggcauugcaggcguggguacaccugcggcagcagccgcagccgcagcugccgcaaaagccgcuaaguauuag

SEQ ID NO: 99480 - RNA, 531 nt, Artificial Sequence
  derived and/or modified sequence
auggcaggucugacugcugcugcuccacgccccggagugcugcuccucuugcucaguauucugcacccaucuagacccggaggcguaccaggcgcgauaccaggaggagugccgggaggagucuuuuacccgggagcaggcuuaggggccuuaggagguggugcauuggggccagguggaaagccuuugaagccagugcccggcggacuggcuggugcugggcucggcgcuggucuaggggccuuuccagcggugaccuuuccgggggccuugguuccgggcgguguagcugacgccgccgcagccuacaaggcggcuaaagcuggggccggacucggcggcgucccaggcgugggaggccuuggaguuuccgcaggagccguagucccucaaccgggcgcgggcguaaagcccgguaagguccccgguguugguggugcauucgcaggaaucccaggaguuggcccuuucggaggaccacaacccggcguuccacugggauacccuauuaaagccccuaaauugccauag

SEQ ID NO: 99481 - RNA, 1992 nt, Artificial Sequence
  derived and/or modified sequence
auggcaggacugacagcagcagcaccaagacccggugugcuucugcuacuucugaguauccugcauccauccagaccuggaggcgucccaggggcaauacccgggggagugccugguggagucuucuacccaggcgcgggauuaggggcacugggcggcggugcguuggggcccggagguaagccguuaaaacccguuccaggcggacuggccggggccggguuaggugccggugcagggcuaggcgguguucccggcguggguggucucggcgugucugcuggggccguggucccccagccaggcgcuggugucaagccaggcaaaguccccggcgucggucuccccgguguguacccaggaggcgugcugccuggcgcuagauuuccuggcgucggcgugcuccccggagugccaacaggugcuggagucaagcccaaagcccccggcguuggaggcgccuucgcagggauacccggaguagguccuuucggaggcccccaaccaggaguuccucucggauacccuauuaaggcccccaaacuuccuggaggguacggccugcccuauacaacaggcaagcugccuuacggcuacggccccggaggaguugcuggcgccgcaggaaaggcuggauauccgaccgguacuggaguggguccacaggccgccgcggccgcagccgccaaggccgccgcaaaguuuggagcaggcgccgccgguguccuuccaggggugggaggcgcaggaguuccgggggugccuggcgcaauacccggcaucggagggaucgcuggggugggcaccccugcagccgcagcugcagccgccgccgccgccaaggccgcuaaauauggugcggcagcaggacuggucccgggaggccccggcuuugggcccggcguggugggugugcccggugccggagugcccgggguuggcguuccuggggcugggauccccgugguucccggugcuggcauuccaggcgcagcuguuccaggaguuguaucuccugaggcagccgccaaggcugcugcaaaagcggcgaaguauggggcuagaccgggcguaggugugggcggaaucccuacauacgggguuggagcugguggguuccccggauuuggggugggcguggggggaauuccaggcguggcaggaguuccaggaguugguggcgugcccgggguuggcggcguaccaggaguaggaaucucaccugaagcucaagccgcugcagcugcgaaggccgcuaaauacggggucggcacccccgccgcugcagccgcgaaggcagcagccaaggccgcucaguuuggcuuaguccccgguguugggguggcacccggagucggcguugcgcccggcauaggcccugguggagucgcugccgccgcuaagagcgcugcuaaaguugcggccaaagcacagcuccgcgcugcugcgggucugggagcuggcauuccaggccucgggguuggcguggguguucccggccuaggagugggggcuggggugccaggacucgggguuggugccggagugccagguuuuggggcaguuccuggcgcacuugcugccgcuaaggccgcgaaguauggagcagcaguucccgggguucuagggggacugggcgccuuaggcgggguggggauuccagguggaguggugggggcggguccugccgccgcugcagcagcggccaaggccgccgcgaaggcagcacaguucgggcuggucggcgccgcugggcucggagggcugggcgucggagguuugggcgugcccgggguggguggucucggcggaauuccaccagcggcggcagcuaaggcugcaaaguacggagcugcugggcuuggcggcgucuugggcggggcuggccaguuuccucucggcgggguagcagcacgcccuggcuuuggacucucuccuaucuuucccggaggugcaugucuggguaaagccugcgguagaaaaaggaaguag

SEQ ID NO: 99482 - RNA, 2121 nt, Artificial Sequence
  derived and/or modified sequence
auggcgggccugacagccgcugcuccccggccugggguccucuuacuucugcugagcauucuccacccuuccaggccuggcggugucccaggugcaaucccaggugguguaccaggcggcguguucuacccaggggcuggacugggcgcuuuagggggcggggcuuuaggccccgggggaaaacccuugaaaccaguccccgguggccuugcaggagccggacucggcgcaggucugggugcauucccugcugugacauucccuggcgcauuagugccuggaggcguagcugaugccgcugcagccuauaaggcagccaaggccggugccggccugggcggugugcccgggguggguggauuaggcgucagugcaggagcaguugugccacaaccaggcgcaggcguuaagccugguaaaguaccuggggugggacuuccuggcguauacccagggggagugcugccuggggccagauuucccggggugggcgucuugccuggaguuccgacgggugcaggagucaaacccaaagcaccaggcgugggcggugcguucgcuggcaucccaggcgugggcccuuucggcggcccucaacccggggucccucugggauauccuaucaaggcaccaaaacugccaggagguuacggguuacccuauaccacuggcaagcugcccuauggauauggacccggaggagucgcaggcgcggcagggaaggccggauauccuacaggcaccggagucgggccacaggccgcggcggcagcugccgcaaaagccgcugcaaaauucggggcgggagcagcuggcguguugccgggaguugggggcgcuggcgugcccgguguaccaggagcuaucccaggaaucgggggaauugcgggcgugggaacccccgcagcugcagccgccgcagccgccgccgcgaaagcugccaaguauggcgcagcagcgggacuggucccuggcgggccaggguucgggccuggcguggugggcguaccaggcgcuggcgucccaggagucggagucccaggugcuggaauacccgugguucccggagccgguaucccuggugccgcugugcccggcgugguaucuccggaggccgcagccaaagcugcagccaaggccgcaaaauacggggcgagaccaggugugggggucgguggaauaccuacauaugggguaggugccgguggcuucccaggguucggagucgggguagggggaaucccaggagucgccggugugccuggagugggaggcgugccuggggugggcggcguacccggggucggaaucagcccagaagcucaggccgcagcagccgcuaaagcagcuaaguacggagugggcaccccugccgccgcagccgcaaaggcagcagcgaaagcggcccaauuuggacugguccccgguguagggguggcgccugguguggguguagcuccggggguaggaguggcgcccggaguaggauuagcuccagggguggguguggccccuggagugggcguggcuccuggcgugggcguggccccuggaauuggaccuggaggcguugccgccgccgcaaaaagugcagcaaaaguugccgccaaagcucagcuccgagcugcugcaggacugggcgcuggcaucccggggcuggguguugguguggggguaccugggcuggguguaggagcaggcgugccuggacucggaguuggcgcagguguuccaggguuuggcgcaguaccuggagcucuagccgccgcuaaagccgccaaauauggagccgccguucccgguguucugggcggccuaggggcacugggcgggguaggaauuccgggcggaguuguuggagcugggcccgccgccgcagcagccgcagcuaaagccgcagcgaaagcugcucaguuuggucucguaggggcagcaggguugggaggacugggagucgggggccuaggaguucccggggugggaggcuuaggggggauaccccccgcagcagcagccaaagcagcuaaguacggagucgcugcucgaccggguuuuggccugagcccaaucuuuccagggggggcgugucugggcaaggcuugugggaggaagaggaaguag

SEQ ID NO: 99483 - RNA, 2145 nt, Artificial Sequence
  derived and/or modified sequence
auggccggccucacugcagccgcuccuagaccugguguacuguuacugcuguugagcauccuucacccgagcaggcccggaggcguaccuggggcaaucccuggcggaguuccugggggaguguucuacccugcgcucgguccuggagggaagccuuuaaaaccagugcccggaggacuggccggggcaggauuaggagcuggucugggcgcuuuuccugcuguaacuuucccuggagcguugguccccggggguguugccgaugcugccgcagcuuacaaagccgcaaaggccggugcuggacuuggcgguguuccgggcguuggaggccuuggaguuagcgcuggugcaguggucccccagccuggagccggagugaagccgggcaagguccccggcgugggccucccgggcguauauccuggcggcguacugccaggugcgagguuccccggcgugggcgucuugccaggaguccccacaggagccggcguuaaaccaaaggcgcccggaguugggggagccuuugcugggauaccaggggucggaccauucgguggaccacagccaggaguuccccuaggcuauccuaucaaagcuccgaagcuccccggcggguacggccugccauacacaaccgggaagcucccuuacggcuacgguccuggcggggucgcuggcgcugcgggaaaggcaggauacccuacaggcacggguguggguccacaggccgccgcugccgccgccgcaaaagccgccgccaaauucggcgcuggcgcagccggaguuuuaccaggugugggaggcgccggggucccuggcguaccaggagcgauacccggcauaggaggcauugcaggagugggcacacccgcagcggcagcugcagcugcggccgcagcaaaggccgcuaaauacggugcagcugccggcuugguuccaggaggaccagguuuuggaccagguguggugggcgugccaggcgcuggagucccuggaguuggagucccaggcgcaggcauacccgugguccccggugccggaauccccggggccgcugugccugguguagugaguccagaggccgcugcaaaagcagcagcuaaagccgcaaaauauggcgccaggccugggguaggcguggguggcaucccaacguacggagucggugcuggaggguuccccggcuuuggggugggcgugggugguauaccaggcguagccgggguuccaggagugggggguguuccuggggugggcggggugccaggcguuggaauuagucccgaggcccaggcagcagcugcagcaaaagccgcuaaguacgguguagggacucccgcagcagccgcagccaaggcagccgcaaaagcugcucaguuuggacucgugccagggguggggguggcgcccggagucggcguggcaccggggguagguguggcucccggagucgguuuggccccgggaguuggaguggcuccugggguaggugucgcuccaggagugggagucgccccggggaucggcccugggggcguggcagccgcagcaaagucagccgccaaagucgccgccaaggcacagcucagggccgcugccgguuugggagcaggaaucccaggauuagggguuggcgucggggucccgggccugggcguaggcgcaggaguacccggucuagggguuggcgcuggugugccagguuuuggagcugugccuggagcgcuugccgcugccaaagccgcuaaguacggggccgcaguuccuggugugcucggaggacuaggagcuuuaggaggcgugggaauuccaggcggcguagugggggccggaccugcggcggcugcagccgcugccaaggccgcagccaaggcugcucaguucggcuuggucggagcugccggguugggugggcugggagugggaggacugggggugcccgggguaggaggacuugggggaauaccucccgccgcugcagccaaagccgccaaguacggcgcugcuggucuuggaggaguucuuggaggcgcaggacaguuuccccucggagggguggcugcuagaccugguuucggauuaagucccauuuucccugggggugcauguuuagggaaggcuugugggagaaaacgcaaauag

SEQ ID NO: 99484 - protein, 99 aa, Artificial Sequence
  derived and/or modified sequence
MGECPHLVDVRLGHRSLATGPEQSDICHTGSEARWTTTWYGSLSFSRHKYKMLADLTPGVEMSCRHWARWLTPVIPALWKAEAGGLPELRSSRPAWTTW

SEQ ID NO: 99485 - protein, 65 aa, Artificial Sequence
  derived and/or modified sequence
MQSEVQRQPDRSIQNPLTVGSHTPCLTPPTMSCNNSQVWWCVPVVPATWEPEAGGSLESSSSRLQ

SEQ ID NO: 99486 - protein, 55 aa, Artificial Sequence
  derived and/or modified sequence
VIGWVWWLTPVIPALWEAEAGGSPEIRSSRPAWPTWGNPSLLKIQKLARRGGAHL

SEQ ID NO: 99487 - DNA, 168 bp, Artificial Sequence
  derived and/or modified sequence
gtgatcggctgggtgtggtggctgacccccgtgatccccgccctgtgggaggccgaggccggcggcagccccgagatcagaagcagcagacccgcctggcccacctggggcaaccccagcctgctgaagatccagaagctggccagaagaggcggcgcccacctgtag

SEQ ID NO: 99488 - DNA, 168 bp, Artificial Sequence
  derived and/or modified sequence
gtaatcgggtgggtctggtggctcacaccagtgatcccggctctgtgggaagctgaagctggcggctcccctgaaattcgctcaagtaggccagcctggccaacgtggggaaacccatcacttcttaagatacaaaaactcgccagaaggggtggggcccacctatag

SEQ ID NO: 99489 - DNA, 168 bp, Artificial Sequence
  derived and/or modified sequence
gtcatcggctgggtgtggtggctgacccctgtgatcccagccctgtgggaggccgaggccggcggcagccctgagatccgcagcagcaggcctgcctggcccacctggggcaaccccagcctgctgaagatccagaagctggccaggagaggaggagcccacctgtag

SEQ ID NO: 99490 - DNA, 168 bp, Artificial Sequence
  derived and/or modified sequence
gtgatcggctgggtgtggtggctgacccccgtgatccccgccctgtgggaagccgaggccggaggatccccagaaatccggtcatccaggcccgcatggcctacctggggcaatccatctttgctcaaaatccaaaagcttgctcgaaggggaggtgcccacttgtag

SEQ ID NO: 99491 - DNA, 168 bp, Artificial Sequence
  derived and/or modified sequence
gtgatcggatgggtgtggtggctaacaccggtgataccagctctctgggaagccgaggccggaggcagccccgagatcaggtctagcaggcccgcttggcccacctgggggaatccgtccctgcttaaaatccaaaaattggccagacgcggtggagcccacctctag

SEQ ID NO: 99492 - protein, 276 aa, Artificial Sequence [sequence omitted]

SEQ ID NO: 99493 - protein, 276 aa, Artificial Sequence [sequence omitted]

SEQ ID NO: 99494 - protein, 276 aa, Artificial Sequence
  derived and/or modified sequence
MAWWKSWIEQEGVTVKSSSHFNPDPDAETLYKAMKGIGVGSQLLSHQAAAFAFPSSALTSVSPWGQQGHLCCNPAGTNEQAIIDVLTKRSNTQRQQIAKSFKAQFGKDLTETLKSELSGKFERLIVALMYPPYRYEAKELHDAMKGSRDDVSSFVDPGLALQDAQDLYAAGEKIRGTDEMKFITILCTRSATHLLRVKCTQNLHSYFAERLYYAMKGAGTRDGTLIRNIVSRSEIDLNLIKCHFKKMYGKTLSSMIMEDTSGDYKNALLSLVGSDP

SEQ ID NO: 99495 - DNA, 831 bp, Artificial Sequence
  derived and/or modified sequence
atggcctggtggaagagctggatcgagcaggagggcgtgaccgtgaagagcagcagccacttcaaccccgaccccgacgccgagaccctgtaccaggccatgaagggcatcggcgtgggcagccagctgctgagccaccaggccgccgccttcgccttccccagcagcgccctgaccagcgtgagcccctggggccagcagggccacctgtgctgcaaccccgccggcaccaacgagcaggccatcatcgacgtgctgaccaagagaagcaacacccagagacagcagatcgccaagagcttcaaggcccagttcggcaaggacctgaccgagaccctgaagagcgagctgagcggcaagttcgagagactgatcgtggccctgatgtaccccccctacagatacgaggccaaggagctgcacgacgccatgaagggcagcagagacgacgtgagcagcttcgtggaccccggcctggccctgcaggacgcccaggacctgtacgccgccggcgagaagatcagaggcaccgacgagatgaagttcatcaccatcctgtgcaccagaagcgccacccacctgctgagagtgaagtgcacccagaacctgcacagctacttcgccgagagactgtactacgccatgaagggcgccggcaccagagacggcaccctgatcagaaacatcgtgagcagaagcgagatcgacctgaacctgatcaagtgccacttcaagaagatgtacggcaagaccctgagcagcatgatcatggaggacaccagcggcgactacaagaacgccctgctgagcctggtgggcagcgacccctag

SEQ ID NO: 99496 - DNA, 831 bp, Artificial Sequence
  derived and/or modified sequence
atggcctggtggaaggcctggatcgagcaggagggcgtgaccgtgaagagcagcagccacttcaaccccgaccccgacgccgagaccctgtacaaggccatgaagggcatcggcgtgggcagccagctgctgagccaccaggccgccgccttcgccttccccagcagcgccctgaccagcgtgagcccctggggccagcagggccacctgtgctgcaaccccgccggcaccaacgagcaggccatcatcgacgtgctgaccaagagaagcaacacccagagacagcagatcgccaagagcttcaaggcccagttcggcaaggacctgaccgagaccctgaagagcgagctgagcggcaagttcgagagactgatcgtggccctgatgtaccccccctacagatacgaggccaaggagctgcacgacgccatgaagggcagcagagacgacgtgagcagcttcgtggaccccgccctggccctgcaggacgcccaggacctgtacgccgccggcgagaacatcagaggcaccgacgagatgaagttcatcaccatcctgtgcaccagaagcgccacccacctgctgagagtgaagtgcacccagaacctgcacagctacttcgccgagagactgtactacgccatgaagggcgccggcaccagagacggcaccctgatcagaaacatcgtgagcagaagcgagatcgacctgaacctgatcaagtgccacttcaagaagatgtacggcaagaccctgagcagcatgatcatggaggacaccagcggcgactacaagaacgccctgctgagcctggtgggcagcgacccctag

SEQ ID NO: 99497 - DNA, 831 bp, Artificial Sequence
  derived and/or modified sequence
atggcctggtggaaatcttggatcgagcaggaaggggtgaccgttaaaagttctagccacttcaaccccgatcctgacgcagaaacattgtaccaggcaatgaaggggattggagtggggtcccagctgctctcacatcaagccgccgcattcgcgttcccctcctccgccctcacttcggtctccccttggggacagcagggtcacttgtgctgcaaccctgctggaacgaacgaacaggccattatcgatgtcctgactaaacgctccaatacccagcggcagcagatagccaagtcttttaaggcccagttcggtaaagacctaacggagacgctgaaatccgagttgagtggaaagttcgagcggctcatagtcgcattgatgtaccccccttatagatacgaggcgaaagagctccacgacgcaatgaaaggttctagagatgacgtgagcagcttcgtggacccagggctcgcactgcaagacgcacaggacctgtacgccgctggtgagaaaattagagggaccgacgaaatgaagttcatcacaattttgtgtacccggtcagctacacatctgcttcgcgtgaaatgtacccagaatctccattcctactttgcggaaaggttgtactatgccatgaagggcgccggaacccgagacggcactctcattcgtaatatcgtaagccgctccgagatcgatctgaacctgataaagtgtcactttaagaagatgtacggcaagacgttgagctcaatgatcatggaagatacatctggagattacaaaaacgcgctgctctctctcgtgggatcggatccgtag

SEQ ID NO: 99498 - DNA, 831 bp, Artificial Sequence
  derived and/or modified sequence
atggcctggtggaaggcttggattgagcaggaaggcgtgacagtcaagtccagcagccacttcaaccctgatcccgatgccgaaacactttacaaggccatgaagggcatcggggtagggtcccagctgctgagccaccaggctgcagcctttgcctttccctcctcagccctaacatctgtgtcaccctgggggcagcagggacatctgtgctgtaaccctgccggcaccaatgaacaggctattatcgatgttctcaccaagcggtcgaatacgcagcgccagcagatcgcaaaatcattcaaagctcaattcggtaaggacttgacggagactctgaagagcgagctgtccgggaaattcgagcggctgatcgtggcattgatgtatcctccttacagatatgaggctaaagagcttcatgatgccatgaagggctcacgggatgacgtaagctctttcgtggacccagcactagccttgcaggacgcccaggatttgtacgcagcaggtgagaatatacgcggcaccgatgagatgaaattcataacgatcctgtgtacccgtagcgcaacacatctcctgcgcgttaaatgcacccaaaacttgcattcttattttgctgaacgtctgtattacgctatgaagggcgcggggacacgcgacgggactttgatccggaacattgttagcaggtcagagatcgatctgaacctcatcaagtgtcacttcaaaaaaatgtacggcaagactctctcaagtatgataatggaggacaccagcggtgactataagaacgccctcctgagcttggtgggatccgatccatag

SEQ ID NO: 99499 - DNA, 831 bp, Artificial Sequence
  derived and/or modified sequence
atggcctggtggaagtcctggattgagcaggagggcgtgacagtgaagagcagcagccacttcaacccagaccctgatgctgagaccctgtaccaggccatgaagggcattggagtgggcagccagctgctgagccaccaggccgccgcctttgccttccccagcagcgccctgacctctgtgagcccctggggccagcagggccacctgtgctgcaacccagctggcaccaatgagcaggccatcattgatgtgctgaccaagaggagcaacacccagaggcagcagatcgccaagagcttcaaggcccagtttgggaaggacctgacagagaccctgaagtctgagctgagcggcaagtttgagcggctgattgtggccctgatgtacccaccctaccgctatgaggccaaggagctgcatgatgccatgaagggcagcagagatgatgtgtcctcctttgtggaccccggcctggccctgcaggatgcccaggacctgtatgctgctggggagaagatccggggcacagatgagatgaagttcatcaccatcctgtgcaccaggtctgccacccacctgctgcgggtgaagtgcacccagaacctgcacagctactttgctgagcggctgtactatgccatgaagggggccggcaccagagatggcaccctcatcagaaatattgtgagccgctcagaaattgacctgaacctgatcaagtgccacttcaagaagatgtatggcaagaccctgagctccatgatcatggaggacaccagcggggactacaagaatgccctgctgagcctggtgggcagtgacccctag

SEQ ID NO: 99500 - DNA, 831 bp, Artificial Sequence
  derived and/or modified sequence
atggcctggtggaaggcctggattgagcaggagggcgtgacagtgaagagcagcagccacttcaacccagaccctgatgctgagaccctgtacaaggccatgaagggcattggagtgggcagccagctgctgagccaccaggccgccgcctttgccttccccagcagcgccctgacctctgtgagcccctggggccagcagggccacctgtgctgcaacccagctggcaccaatgagcaggccatcattgatgtgctgaccaagaggagcaacacccagaggcagcagatcgccaagagcttcaaggcccagtttgggaaggacctgacagagaccctgaagtctgagctgagcggcaagtttgagcggctgattgtggccctgatgtacccaccctaccgctatgaggccaaggagctgcatgatgccatgaagggcagcagagatgatgtgtcctcctttgtggaccctgccctggccctgcaggatgcccaggacctgtatgctgctggggagaacatccggggcacagatgagatgaagttcatcaccatcctgtgcaccaggtctgccacccacctgctgcgggtgaagtgcacccagaacctgcacagctactttgctgagcggctgtactatgccatgaagggggccggcaccagagatggcaccctcatcagaaatattgtgagccgctcagaaattgacctgaacctgatcaagtgccacttcaagaagatgtatggcaagaccctgagctccatgatcatggaggacaccagcggggactacaagaatgccctgctgagcctggtgggcagtgacccctag

SEQ ID NO: 99501 - DNA, 831 bp, Artificial Sequence
  derived and/or modified sequence
atggcctggtggaagagctggatcgagcaggagggcgtgaccgtgaagtccagttcccatttcaacccagatcctgacgcagagacattatatcaggcaatgaagggaatcggcgttggcagtcagcttttgtcccatcaggccgctgccttcgcctttccttcaagtgccctgacctccgtgagtccatggggccagcagggccatctgtgttgtaaccccgccggcacgaatgaacaagctataattgatgtgctcaccaagcggtcgaatacccagcgccaacagattgcaaagagttttaaggcccagttcggtaaggatcttactgaaactctgaaatccgagctgtccgggaagtttgaaagattgattgtagctctcatgtacccgccatataggtacgaggctaaggagcttcatgacgctatgaagggttcccgggacgatgttagctcgtttgttgacccaggtctggccttgcaggatgctcaggatctgtacgcggctggagaaaagattcggggaactgacgagatgaagtttatcactatcttgtgtacacgcagcgcgacacacttactcagggttaagtgcactcagaacttgcacagctacttcgccgaacgactgtattacgctatgaagggggccggcactcgcgatggaaccctcatccgtaacatcgtctcccggagcgagatcgaccttaatctgatcaaatgtcacttcaagaagatgtatgggaagaccctcagctccatgattatggaggatactagcggagattacaaaaacgcccttctgtccctggtgggaagcgacccctag

SEQ ID NO: 99502 - DNA, 831 bp, Artificial Sequence
  derived and/or modified sequence
atggcctggtggaaggcctggatcgagcaggagggcgtgaccgtgaaaagttcctcccattttaaccccgaccccgatgccgagaccctatacaaagcaatgaagggcatcggtgtggggtctcagctgttgtcccatcaggccgcagccttcgctttcccctccagtgcactgaccagtgtgtcaccatggggtcaacaaggccacctgtgctgtaatccagcaggtactaatgagcaggccattatagatgttttgaccaaacgctctaacacccaaagacagcagattgccaagtctttcaaggctcaattcggtaaagacctaactgaaacactgaagtcagagctctcagggaaattcgagcggctgattgttgctctcatgtatcctccttaccgatatgaagcaaaggagctgcatgatgccatgaagggctcccgggacgatgtcagctctttcgtggatcccgcgctggccctgcaagacgctcaggacttatatgcagccggggaaaacatacggggaacagacgaaatgaaatttattacaatattgtgcaccagatcggcgactcacctgttgcgagtcaagtgtacgcagaacctgcatagctattttgccgaacgactctactatgctatgaagggcgcgggcacccgggacggcaccctgattaggaacatcgtaagcagatcagagattgatctgaatttgatcaaatgccatttcaagaagatgtacgggaagactctatcgagtatgatcatggaagacacctcaggagactacaagaacgctctgctgagcctggtgggttccgacccctag

SEQ ID NO: 99503 - DNA, 1860 bp, Artificial Sequence
  derived and/or modified sequence
gggggcgaggggacggcaggcaggtgtggcgctgccctgggcgggcttgcacccccacacccaagtgagcggcctgctcactcctcagctgcaggagccagacgtgtggagtcccagcagaggccaacctgtgtctcttcatctccctgggaaaggtgcccccgaggtgaaagagatggcctggtggaaatcctggattgaacaggagggtgtcacagtgaagagcagctcccacttcaacccagaccctgatgcagagaccctctaccaagccatgaaggggatcggtgtcgggtcccaactgctcagccaccaagcagctgccttcgccttcccctcctccgccctcaccagtgtgtcaccctgggggcagcagggtcacttgtgctgtaaccctgcagggaccaacgagcaggctatcatcgatgtgctcaccaagagaagcaacacgcagcggcagcagatcgccaagtccttcaaggctcagttcggcaaggacctcactgagaccttgaagtctgagctcagtggcaagtttgagaggctcattgtggcccttatgtacccgccatacagatacgaagccaaggagctgcatgacgccatgaagggcagcagggatgatgtgagcagctttgtggacccaggactggccctccaagacgcacaggatctgtatgcggcaggcgagaagattcgtgggactgatgagatgaaattcatcaccatcctgtgcacgcgcagtgccactcacctgctgagagtgaaatgcacccaaaacctccacagctactttgcagagagactctactatgccatgaagggagcagggacgcgtgatgggaccctgataagaaacatcgtttcaaggagcgagattgacttaaatcttatcaaatgtcacttcaagaagatgtacggcaagaccctcagcagcatgatcatggaagacaccagcggcgactacaagaacgccctgctgagcctggtgggcagcgacccctgaggcacagaagaacaagagcaaagaccatgaagccagagtctccaggactcctcactcaacctcggccatggacgcaggttgggtgtgaggggggtcccagcctttcagtcttctatttccctatttccagtgctttccagccgggtttctgacccagagggtggaaccggcctggactcctcttcccaacttcctccaggtcatttcccagtgtgagcacaatgccaaccttagtgtttctccagccagacagatgcctcagcatgaagggcttggggacttgtggatcattccttcctccctgcaggagcttcccaagctggtcacagagtctcctgggcacaggttatacagaccccagccccattcccatctactgaaacagggtctccacaagaggggccagggaatatgggtttttaacaagcgtcttacaaaacacttctctatcatgcagccggagagctggctgggagcccttttgttttagaacacacatccttcagcagctgagaaacgaacacgaatccatcccaaccgagatgccattaacattcatctaaaaatgttaggctctaaatggacgaaaaattctctcgccatcttaataacaaaataaactacaaattcctgacccaaggacactgtgttataagaggcgtgggctcccctggtggctgaccaggtcagctgccctggccttgcacccctctgcatgcagcacagaagggtgtgaccatgccctcagcaccactcttgtccccactgaacggcaactgagactgggtacctggagattctgaagtgcctttgctgtggttttcaaaataataaagatttgtattcaactcaaa

SEQ ID NO: 99504 - DNA, 1861 bp, Artificial Sequence
  derived and/or modified sequence
cgggggcgagggggcggcaggcaggtgtagcgctgccctgggcgggcttgcacccccacacccaagtgagcggcctgctcactcctcagctgcaggagccagacgtgtggagtcccagcagaggccaacctgtgtctcttcatctccgtgagaaaggtgcccccgaagtgaaagagatggcctggtggaaagcctggattgaacaggagggtgtcacagtgaagagcagctcccacttcaacccagaccctgatgcagagaccctctacaaagccatgaaggggatcggtgtcgggtcccaactgctcagccaccaagcagctgccttcgccttcccctcctccgccctcaccagtgtgtcaccctgggggcagcagggtcacttgtgctgtaaccctgcagggaccaacgagcaggctatcatcgatgtgctcaccaagagaagcaacacgcagcggcagcagatcgccaagtccttcaaggctcagttcggcaaggacctcactgagaccttgaagtctgagctcagtggcaagtttgagaggctcattgtggcccttatgtacccgccatacagatacgaagccaaggagctgcatgacgccatgaagggcagcagggatgatgtgagcagctttgtggacccggcactggccctccaagacgcacaggatctgtatgcggcaggcgagaatattcgtgggactgatgagatgaaattcatcaccatcctgtgcacgcgcagtgccactcacctgctgagagtgaaatgcacccaaaacctccacagctactttgcagagagactctactatgccatgaagggagcagggacgcgtgatgggaccctgataagaaacatcgtttcaaggagcgagattgacttaaatcttatcaaatgtcacttcaagaagatgtacggcaagaccctcagcagcatgatcatggaagacaccagcggtgactacaagaacgccctgctgagcctggtgggcagcgacccctgaggcacagaagaacaagagcaaagaccatgaagccagagtctccaggactcctcactcaacctcggccatggacgcaggttgggtgtgaggggggtcccagcctttcggtcttctatttccctatttccagtgctttccagccgggtttctgacccagagggtggaaccggcctggactcctcttcccaacttcctccaggtcatttcccagtgtgagcacaatgccaaccttagtgtttctccagccagacagatgcctcagcatgaagggcttggggacttgtggatcattccttcctccctgcaggagcttcccaagctggtcacagagtctcctgggcacaggttatacagaccccagccccattcccatctactgaaacagggtctccacaagaggggccagggaatatgggtttttaacaagcgtcttacaaaacacttctctatcatgcagccggagagctggctgggagcccttttgttttagaacacacatccttcagcagctgagaaacgaacacgaatccatcccaaccgagatgccattaacattcatctaaaaatgttaggctctaaatggacgaaaaattctctcgccatcttaataacaaaataaactacaaattcctgacccaaggacactgtgttataagaggcgtgggctcccctggtggctgaccaggtcagctgccctggccttgcacccctctgcatgcagcacagaagggtgtgaccatgccctcagcaccactcttgtccccactgaacggcaactgagactgggtacctggagattctgaagtgcctttgctgtggttttcaaaataataaagatttgtattcaactcaaa

SEQ ID NO: 99505 - DNA, 831 bp, Artificial Sequence
  derived and/or modified sequence
atggcatggtggaaatcttggatcgaacaagaaggagtgacagtgaaatcttcttctcattttaatcccgatcccgacgctgagactctgtatcaagcgatgaagggcatcggcgtgggaagtcagcttcttagccatcaagctgctgcctttgcgttccctagctccgccctaacctctgtgagcccttggggacaacagggtcacctctgctgcaatcctgctggcacaaatgagcaggctatcatcgatgtcttgacaaagaggtctaacacccagagacagcagatcgccaagtcctttaaagcccagttcggaaaggacctcacagagaccctgaaaagtgagttatccggtaaatttgaacgcctgattgtggccctcatgtatcccccataccggtacgaggcaaaggagctgcacgatgctatgaaggggtcacgggatgacgttagctcatttgtagaccccggtctggccctccaggacgcccaggatctctacgcagcaggcgagaagatcagaggaaccgatgaaatgaagttcattacaattctctgcaccaggagcgccacccatctcctgcgcgttaaatgcactcagaatttgcacagttactttgcagaacgactgtattatgctatgaagggggcaggtacgagagatggtacccttattcggaacattgtctctcgaagcgagatcgacctgaacctcataaaatgccacttcaaaaagatgtatggcaaaacgcttagctctatgattatggaagatacatcaggcgactataagaacgcccttttgagtttggtgggaagcgatccatag

SEQ ID NO: 99506 - DNA, 831 bp, Artificial Sequence
  derived and/or modified sequence
atggcctggtggaaggcatggatcgagcaggaaggggttacggtgaagagctcttcccactttaaccccgatccggatgccgaaacattatacaaagcaatgaaagggatcggagtgggaagccagctactgtctcaccaggctgccgctttcgcatttccttcgagtgcgctgacctccgttagcccttgggggcagcagggccatctctgctgtaatcccgcaggaaccaacgaacaagccatcatcgatgttctaacaaagcgcagcaatacacaacgtcagcaaatagccaaaagttttaaggctcagtttgggaaagatctgacagagactctaaaaagtgaattgagcggcaaatttgagagacttattgtcgccctcatgtatccaccatatcgatatgaagctaaggagcttcacgacgctatgaagggttcccgtgatgacgtgtcttccttcgtcgaccctgcgttagctctgcaggacgcacaggacctttatgccgctggtgaaaacattaggggcacggacgaaatgaaattcattacgatactatgcaccagatcggccacacacttgttgcgggtgaaatgcacccagaatttgcattcttactttgccgaaagactctactacgccatgaagggcgctggaacgcgggatggaacgctcatacggaacatcgtcagccgaagcgaaattgatctgaacctgatcaaatgccactttaagaaaatgtacggtaagacactgagcagcatgatcatggaagatacatccggcgactacaagaatgcccttctgagcctggtgggatcggatccctag

SEQ ID NO: 99507 - DNA, 831 bp, Artificial Sequence
  derived and/or modified sequence
atggcctggtggaagtcctggatcgaacaggagggcgttacggtgaagtcctccagtcatttcaaccccgatccagatgcagaaaccttgtataaagctatgaagggtattggcgtgggctctcagctgctctctcaccaggctgctgccttcgccttcccaagttccgcacttactagtgtgtccccctgggggcaacaggggcatttgtgctgcaacccggcagggaccaatgagcaagcgataattgatgttttgacaaaacggagcaatactcaacggcaacagattgctaagtctttcaaagcccagtttgggaaggacttaaccgaaacactcaagtcagagctgtctggtaagttcgaaaggttaatcgtcgccctgatgtatccgccctacaggtatgaagctaaggagctgcatgacgccatgaagggctctcgtgacgacgtatcttctttcgtggatcctgggctagccctccaggatgctcaggatctttatgcggccggagaaaagatacgtgggaccgatgagatgaaattcatcaccatcctctgcacaagaagcgccactcatctgttacgagtcaaatgtacccagaacttgcactcctattttgcggagcggctctactacgccatgaaaggcgcggggacacgtgacggaacactgataagaaacattgtgtcccgtagcgaaatcgatcttaacttgatcaaatgccacttcaaaaagatgtatggcaagaccctgagtagtatgatcatggaggacacctcaggcgactacaaaaacgccctgcttagccttgtggggtctgatccctag

SEQ ID NO: 99508 - DNA, 831 bp, Artificial Sequence
  derived and/or modified sequence
atggcctggtggaagtcctggattgagcaggagggcgtgacagtgaagagcagcagccacttcaacccagaccctgatgctgagaccctgtacaaggccatgaagggcattggagtgggcagccagctgctgagccaccaggccgccgcctttgccttccccagcagcgccctgacctctgtgagcccctggggccagcagggccacctgtgctgcaacccagctggcaccaatgagcaggccatcattgatgtgctgaccaagaggagcaacacccagaggcagcagatcgccaagagcttcaaggcccagtttgggaaggacctgacagagaccctgaagtctgagctgagcggcaagtttgagcggctgattgtggccctgatgtacccaccctaccgctatgaggccaaggagctgcatgatgccatgaagggcagcagagatgatgtgtcctcctttgtggaccccggcctggccctgcaggatgcccaggacctgtatgctgctggggagaagatccggggcacagatgagatgaagttcatcaccatcctgtgcaccaggtctgccacccacctgctgcgggtgaagtgcacccagaacctgcacagctactttgctgagcggctgtactatgccatgaagggggccggcaccagagatggcaccctcatcagaaatattgtgagccgctcagaaattgacctgaacctgatcaagtgccacttcaagaagatgtatggcaagaccctgagctccatgatcatggaggacaccagcggggactacaagaatgccctgctgagcctggtgggcagtgacccctag

SEQ ID NO: 99509 - DNA, 831 bp, Artificial Sequence
  derived and/or modified sequence
atggcctggtggaagagctggatcgagcaggagggcgtgaccgtgaagagcagctcgcacttcaaccccgaccctgacgccgaaaccctttacaaagctatgaaagggataggagtgggcagtcagttgcttagtcatcaggcagccgcctttgcgttccccagctctgccctgacatccgtatctccatgggggcagcaggggcatctgtgctgtaatcctgccggcactaacgagcaggcaattattgacgttctgactaagcggtctaatacacagagacagcagattgcgaaatctttcaaagcacagtttggaaaggacttgaccgagaccctgaagtccgaactaagcggcaaattcgaaaggctcattgttgcactaatgtaccctccataccgatacgaggcgaaagagctgcatgatgccatgaagggatccagagatgatgtctccagctttgtggaccctggactcgccctccaggacgctcaagatctgtacgccgccggcgaaaaaataagaggcacagacgagatgaaattcatcacaatcctgtgcactaggagtgcaacacacctgctgagagttaagtgcacacagaacctgcattcatatttcgcagagcgactgtactacgccatgaaaggcgcagggactcgagatggtactctgattcggaatatagtgtcccgcagtgagattgacttgaacttaataaagtgccacttcaagaaaatgtacgggaaaactctgtcctccatgattatggaggacacgagtggagactacaagaacgctctcttgagtcttgtgggaagcgacccttag

SEQ ID NO: 99510 - DNA, 1861 bp, Artificial Sequence
  derived and/or modified sequence
cgggggcgaggggacggcaggcaggtgtggcgctgccctgggcgggcttgcacccccacacccaagtgagcggcctgctcactcctcagctgcaggagccagacgtgtggagtcccagcagaggccaacctgtgtctcttcatctccctgggaaaggtgcccccgaggtgaaagagatggcctggtggaaatcctggattgaacaggagggtgtcacagtgaagagcagctcccacttcaacccagaccctgatgcagagaccctctacaaagccatgaaggggatcggtgtcgggtcccaactgctcagccaccaagcagctgccttcgccttcccctcctccgccctcaccagtgtgtcaccctgggggcagcagggtcacttgtgctgtaaccctgcagggaccaacgagcaggctatcatcgatgtgctcaccaagagaagcaacacgcagcggcagcagatcgccaagtccttcaaggctcagttcggcaaggacctcactgagaccttgaagtctgagctcagtggcaagtttgagaggctcattgtggcccttatgtacccgccatacagatacgaagccaaggagctgcatgacgccatgaagggcagcagggatgatgtgagcagctttgtggacccaggactggccctccaagacgcacaggatctgtatgcggcaggcgagaagattcgtgggactgatgagatgaaattcatcaccatcctgtgcacgcgcagtgccactcacctgctgagagtgaaatgcacccaaaacctccacagctactttgcagagagactctactatgccatgaagggagcagggacgcgtgatgggaccctgataagaaacatcgtttcaaggagcgagattgacttaaatcttatcaaatgtcacttcaagaagatgtacggcaagaccctcagcagcatgatcatggaagacaccagcggtgactacaagaacgccctgctgagcctggtgggcagcgacccctgaggcacagaagaacaagagcaaagaccatgaagccagagtctccaggactcctcactcaacctcggccatggacgcaggttgggtgtgaggggggtcccagcctttcggtcttctatttccctatttccagtgctttccagccgggtttctgacccagagggtggaaccggcctggactcctcttcccaacttcctccaggtcatttcccagtgtgagcacaatgccaaccttagtgtttctccagccagacagatgcctcagcatgaagggcttggggacttgtggatcattccttcctccctgcaggagcttcccaagctggtcacagagtctcctgggcacaggttatacagaccccagccccattcccatctactgaaacagggtctccacaagaggggccagggaatatgggtttttaacaagcgtcttacaaaacacttctctatcatgcagccggagagctggctgggagcccttttgttttagaacacacatccttcagcagctgagaaacgaacacgaatccatcccaaccgagatgccattaacattcatctaaaaatgttaggctctaaatggacgaaaaattctctcgccatcttaataacaaaataaactacaaattcctgacccaaggacactgtgttataagaggcgtgggctcccctggtggctgaccaggtcagctgccctggccttgcacccctctgcatgcagcacagaagggtgtgaccatgccctcagcaccactcttgtccccactgaacggcaactgagactgggtacctggagattctgaagtgcctttgctgtggttttcaaaataataaagatttgtattcaactcaaa

SEQ ID NO: 99511 - DNA, 831 bp, Artificial Sequence
  derived and/or modified sequence
atggcctggtggaagtcttggatcgaacaagaaggcgtgacagttaagtcatcgtctcattttaacccggatccagacgctgagacactgtataaggcgatgaagggaatcggggttggctctcaactcctctcccaccaggctgctgccttcgcatttcccagcagcgctctgaccagcgtgtctccatggggacagcagggccacctttgctgcaatcctgccggtaccaatgagcaggcgataatcgatgtgctgacaaagcgatccaacactcagaggcaacagatcgcgaaaagctttaaggcgcagtttggtaaggacctgacggaaaccctcaagagcgagttgtccggcaaattcgaaagactgattgttgcactcatgtaccccccatacaggtacgaagccaaggaactccacgacgcgatgaagggaagcagagatgacgtcagctctttcgtagacccagggctggccctccaagatgcccaggatttatatgctgcgggagaaaaaataaggggaaccgatgagatgaagttcatcacaatcctgtgcaccagaagtgcaacccatcttctccgcgtgaagtgcacacagaatctgcatagctatttcgctgaacgtctctactacgcaatgaagggtgctgggactagggatgggaccctgattcgcaatatcgtgtctagaagcgagatcgacctcaacttgatcaaatgtcactttaagaagatgtacggaaagacactcagctcaatgattatggaagacacgtctggggactacaagaacgctcttctttctttggtggggagtgatccatag

SEQ ID NO: 99512 - DNA, 831 bp, Artificial Sequence
  derived and/or modified sequence
atggcctggtggaagagctggatcgagcaggagggcgtgaccgtgaagagcagcagccacttcaaccccgaccccgacgccgagaccctgtacaaggccatgaagggcatcggcgtgggcagccagctgctgagccaccaggccgccgccttcgccttccccagcagcgccctgaccagcgtgagcccctggggccagcagggccacctgtgctgcaaccccgccggcaccaacgagcaggccatcatcgacgtgctgaccaagagaagcaacacccagagacagcagatcgccaagagcttcaaggcccagttcggcaaggacctgaccgagaccctgaagagcgagctgagcggcaagttcgagagactgatcgtggccctgatgtaccccccctacagatacgaggccaaggagctgcacgacgccatgaagggcagcagagacgacgtgagcagcttcgtggaccccggcctggccctgcaggacgcccaggacctgtacgccgccggcgagaagatcagaggcaccgacgagatgaagttcatcaccatcctgtgcaccagaagcgccacccacctgctgagagtgaagtgcacccagaacctgcacagctacttcgccgagagactgtactacgccatgaagggcgccggcaccagagacggcaccctgatcagaaacatcgtgagcagaagcgagatcgacctgaacctgatcaagtgccacttcaagaagatgtacggcaagaccctgagcagcatgatcatggaggacaccagcggcgactacaagaacgccctgctgagcctggtgggcagcgacccctag

SEQ ID NO: 99513 - protein, 213 aa, Artificial Sequence
  derived and/or modified sequence
MAITQFRLFKFCTCLATVFSFLKRLICRSGRGRKLSGDQITLPTTVDYSSVPKQTDVEEWTSWDEDAPTSVKIEGGNGNVATQQNSLEQLEPDYFKDMTPTIRKTQKIVIKKREPLNFGIPDGSTGFSSRLAATQDLPFIHQSSELGDLDTWQENTNAWEEEEDAAWQAEEVLRQQKLADREKRAAEQQRKKMEKEAQRLMKKEQNKIGVKLS

SEQ ID NO: 99514 - protein, 197 aa, Artificial Sequence
  derived and/or modified sequence
MAITQFRLFKFCTCLATVFSFLKRLICRSGRGRKLSGDQITLPTTVDYSSVPKQTDVEEWTSWDEDAPTSVKIEGGNGNVATQQNSLEQLEPDYFKDMTPTIRKTQKIVIKKREPLNFGIPDGSTGFSSRLAATQDLPFIHQSSELGDLDTWQENTNAWEEEEDAAWQAEEVLRQQKLADREKRAAEQQRKKMEKEA

SEQ ID NO: 99515 - protein, 258 aa, Artificial Sequence
  derived and/or modified sequence
MAITQFRLFKFCTCLATVFSFLKRLICRSGRGRKLSGDQITLPTTVDYSSVPKQTDVEEWTSWDEDAPTSVKIEGGNGNVATQQNSLEQLEPDYFKDMTPTIRKTQKIVIKKREPLNFGIPDGSTGFSSRLAATQDLPFIHQSSELGDLDTWQENTNAWEEEEDAAWQAEEVLRSRTNVCLLCSLLFHHPTPTSTPYINQSVKIERVSLGQWSYGKSKEQQKLADREKRAAEQQRKKMEKEAQRLMKKEQNKIGVKLS

SEQ ID NO: 99516 - protein, 78 aa, Artificial Sequence
  derived and/or modified sequence
MAITQFRLFKFCTCLATVFSFLKRLICRSGRGRKLSGDQITLPTTVDYSSVPKQTDVEEWTSWDEDAPTSVKIEGGNG

SEQ ID NO: 99517 - DNA, 642 bp, Artificial Sequence
  derived and/or modified sequence
atggccattactcagttcagacttttcaagttctgtacatgcttagccactgtctttagctttctcaaacgcctgatttgccgttctggccgggggcggaagttgtccggagaccagattaccctacccaccaccgtcgactactcctcagtgccgaagcaaacggatgttgaggaatggacctcatgggacgaagatgcaccaacttctgtgaaaattgaaggcgggaatgggaatgtagccacacaacagaactcgttggagcagcttgagcccgattattttaaggatatgaccccaacaatcagaaagacgcagaaaatcgtgattaagaaacgggagcctttgaatttcggtattcccgacgggtccaccggattctctagtcgccttgctgccacacaagacctgccattcatacaccagtccagcgagctcggagacttagacacctggcaggaaaacactaacgcgtgggaggaagaggaagacgcagcctggcaggctgaggaagtcctgcgtcagcagaagcttgctgatcgcgaaaagagggcagccgagcagcagagaaagaagatggaaaaggaagcacagagacttatgaaaaaggagcagaacaaaatcggggtcaagctctcatag

SEQ ID NO: 99518 - DNA, 642 bp, Artificial Sequence
  derived and/or modified sequence
atggctattacacaatttcgtctgttcaagttctgcacatgcctcgctactgtgttcagtttcctgaaacggctcatttgccggagcggcaggggacgcaaactgagtggtgaccagatcaccctgcccacaacagtggactacagcagcgtgcctaaacagacagacgttgaggaatggacgagttgggacgaagacgctccaacatccgtaaagatcgaaggcggcaacggaaatgtagccactcagcagaatagtctggaacagctggaacccgactatttcaaggacatgacccccactattagaaagacacagaaaattgtcataaagaagcgggaacctctgaattttgggataccggacggatctaccggcttctccagccgactggctgccactcaagacctcccgttcattcatcagagttccgaactcggcgatttggacacctggcaggagaacacaaatgcctgggaagaagaggaggatgccgcctggcaagctgaagaggtgctcaggcagcagaaattggccgacagagagaaaagggcggcggagcagcaaaggaaaaagatggaaaaagaagcccaacgcctgatgaaaaaagaacaaaataagatcggggtgaaattatcatag

SEQ ID NO: 99519 - DNA, 594 bp, Artificial Sequence
  derived and/or modified sequence
atggccattacccagtttcggttatttaaattctgcacatgcctggcaaccgtgtttagtttcttgaagcggctgatttgcagatcagggcgtggccggaagctctcaggggatcagatcaccctccccactaccgtggattactcttctgttcccaagcaaactgatgtggaagaatggacaagctgggatgaggacgccccaacatcagtgaagatcgagggcggcaatggtaatgtggcaacgcagcaaaattctcttgagcagcttgagcccgactacttcaaggacatgacccctaccatcagaaaaacacaaaaaatcgttatcaaaaagcgggagcctttaaatttcggcattcctgacggtagcaccgggttcagctcaagactggccgcgactcaagatctgcctttcattcatcaaagttcggagctgggagacctggatacttggcaggaaaatactaatgcatgggaagaagaggaggatgctgcctggcaggccgaggaggttctccgtcaacagaaacttgcagaccgcgaaaagcgggctgctgagcaacagaggaaaaagatggagaaggaggcctag

SEQ ID NO: 99520 - DNA, 777 bp, Artificial Sequence
  derived and/or modified sequence
atggctatcactcaattccgcctcttcaaattttgcacctgcctcgccacagtcttctctttcttgaagcggctgatttgccgctctggacggggcaggaagctgagcggcgaccagataacccttcctaccactgtggactattccagcgtccctaagcaaactgacgtcgaagagtggacaagctgggatgaagatgcccccacttccgttaaaattgaaggaggcaacggtaatgtcgcaacgcaacagaacagtctcgagcaacttgaacccgactatttcaaagacatgaccccaactattcgaaaaacccagaaaatcgttatcaagaagagggagcctttgaatttcggcattcctgacggctccactggcttctcctccagattagcggccacccaggacctgccttttatccatcagtcctctgaattgggtgacctggacacttggcaggaaaatacaaatgcctgggaagaagaggaggacgcagcatggcaggccgaggaagttctgcgctcacgcaccaatgtttgtcttctgtgctcactgctattccatcatccaacacctacctcaacaccttacattaatcagagcgtgaaaattgagcgggtgtctcttggtcagtggagctacgggaagtccaaggagcagcagaagcttgccgatagagaaaagcgggctgccgaacagcaacgaaagaagatggaaaaggaggcacagaggcttatgaaaaaggagcagaataagattggcgtgaagctttcctag

SEQ ID NO: 99521 - DNA, 237 bp, Artificial Sequence
  derived and/or modified sequence
atggctatcacccagttccggctgtttaagttttgcacttgtcttgccactgtattctcatttctcaagaggctgatatgcagaagcggtcgagggaggaaattgagcggcgatcagatcaccctgccaaccaccgtcgactactcatcagtgccaaaacagactgatgtcgaagaatggacaagctgggacgaggacgcccccacttccgtgaaaattgaaggggggaatgggtag

SEQ ID NO: 99522 - DNA, 642 bp, Artificial Sequence
  derived and/or modified sequence
atggccatcacccagttccgcctcttcaagttctgcacctgcctggccaccgtcttctccttcctgaagaggctcatctgccgcagcggccggggcaggaagctgagcggggaccagatcaccctgcccaccaccgtggactacagctctgtgcccaagcagacagatgtggaggagtggacctcctgggatgaagatgcccccacctctgtgaagattgaaggaggaaatggaaatgtggccacccagcagaacagcctggagcagctggagccagactacttcaaggacatgacccccaccatcaggaagacccagaagatcgtcatcaagaagcgggagcccctgaactttggcatcccagatggcagcacaggcttcagcagccggctggccgccacccaggacctgcccttcatccaccagagcagcgagctgggggacctggacacctggcaggagaacaccaatgcctgggaggaggaggaggatgctgcctggcaggccgaggaggtgctgcggcagcagaagctggccgaccgggagaagagagctgctgagcagcagaggaagaagatggagaaggaggcccagaggctgatgaagaaggagcagaacaagattggagtgaagctgtcctag

SEQ ID NO: 99523 - DNA, 594 bp, Artificial Sequence
  derived and/or modified sequence
atggccatcacccagttccgcctcttcaagttctgcacctgcctggccaccgtcttctccttcctgaagaggctcatctgccgcagcggccggggcaggaagctgagcggggaccagatcaccctgcccaccaccgtggactacagctctgtgcccaagcagacagatgtggaggagtggacctcctgggatgaagatgcccccacctctgtgaagattgaaggaggaaatggaaatgtggccacccagcagaacagcctggagcagctggagccagactacttcaaggacatgacccccaccatcaggaagacccagaagatcgtcatcaagaagcgggagcccctgaactttggcatcccagatggcagcacaggcttcagcagccggctggccgccacccaggacctgcccttcatccaccagagcagcgagctgggggacctggacacctggcaggagaacaccaatgcctgggaggaggaggaggatgctgcctggcaggccgaggaggtgctgcggcagcagaagctggccgaccgggagaagagagctgctgagcagcagaggaagaagatggagaaggaggcctag

SEQ ID NO: 99524 - DNA, 777 bp, Artificial Sequence
  derived and/or modified sequence
atggccatcacccagttccgcctcttcaagttctgcacctgcctggccaccgtcttctccttcctgaagaggctcatctgccgcagcggccggggcaggaagctgagcggggaccagatcaccctgcccaccaccgtggactacagctctgtgcccaagcagacagatgtggaggagtggacctcctgggatgaagatgcccccacctctgtgaagattgaaggaggaaatggaaatgtggccacccagcagaacagcctggagcagctggagccagactacttcaaggacatgacccccaccatcaggaagacccagaagatcgtcatcaagaagcgggagcccctgaactttggcatcccagatggcagcacaggcttcagcagccggctggccgccacccaggacctgcccttcatccaccagagcagcgagctgggggacctggacacctggcaggagaacaccaatgcctgggaggaggaggaggatgctgcctggcaggccgaggaggtgctgcggagcaggaccaacgtgtgcctgctgtgcagcctgctcttccaccaccccacccccaccagcaccccctacatcaaccagagcgtgaagattgaaagagtgtccctgggccagtggagctatggcaagagcaaggagcagcagaagctggccgaccgggagaagagagctgctgagcagcagaggaagaagatggagaaggaggcccagaggctgatgaagaaggagcagaacaagattggagtgaagctgtcctag

SEQ ID NO: 99525 - DNA, 237 bp, Artificial Sequence
  derived and/or modified sequence
atggccatcacccagttccgcctcttcaagttctgcacctgcctggccaccgtcttctccttcctgaagaggctcatctgccgcagcggccggggcaggaagctgagcggggaccagatcaccctgcccaccaccgtggactacagctctgtgcccaagcagacagatgtggaggagtggacctcctgggatgaagatgcccccacctctgtgaagattgaaggaggaaatggatag

SEQ ID NO: 99526 - DNA, 642 bp, Artificial Sequence
  derived and/or modified sequence
atggccatcacccagttccggctgttcaagttctgcacctgcctggcaaccgtgttctcattcctgaagaggctgatttgccggtcaggaagagggaggaaactgtcaggtgatcagattactctccccacaacagtcgactactctagtgtccctaaacaaaccgacgtagaagaatggacctcttgggacgaggatgcaccaacgtctgtcaaaattgaaggtggtaacggtaacgtggccacacagcagaattctctggagcagctggagccagactattttaaggatatgaccccaactatccgaaaaactcagaagattgtcataaagaaacgggaaccattgaactttgggatcccagacggctctacagggttcagctcccgcttagctgctacacaggatctgccattcatccatcagtccagcgagttaggggacttggacacatggcaagagaacaccaacgcctgggaggaagaggaagacgccgcatggcaggcggaagaggtgctgcggcagcagaagttggccgaccgcgagaagagagccgctgagcagcaacgcaaaaaaatggagaaagaagcccagcgcctcatgaaaaaggaacaaaacaagatcggcgtcaaattgtcctag

SEQ ID NO: 99527 - DNA, 642 bp, Artificial Sequence
  derived and/or modified sequence
atggccatcacccagttccggctgttcaagttctgcacctgcctggctaccgtcttctcgttcttaaagaggttgatttgtcggagtggccggggaaggaaactctccggagatcaaataactctcccaaccacagtggactattcttcggtgccgaagcagaccgacgtggaggaatggacttcatgggacgaagacgctcccacatcggtgaaaatcgaaggagggaatggtaatgtggctacacaacagaactccctggagcagctggaacctgactattttaaggacatgacccctaccattcgaaagacacagaagattgtcatcaaaaagcgagaacccctcaacttcgggatcccagatggcagtaccggcttctccagtcggttagccgccacccaagatttgccctttatccaccagtcttccgagcttggcgatttagacacttggcaagaaaataccaatgcatgggaggaggaggaggacgccgcttggcaagccgaagaggtgctgcgccagcagaagctggccgatcgtgagaaacgggccgctgaacagcaacgaaagaagatggaaaaggaggcacagagactgatgaagaaagagcagaataagatcggggtgaagttgtcttag

SEQ ID NO: 99528 - DNA, 594 bp, Artificial Sequence
  derived and/or modified sequence
atggccatcacccagttccggctgttcaagttctgcacctgcctggctactgtcttctcatttctaaagagacttatatgtcggtccgggagaggacggaagctcagcggggatcagattactcttcccaccactgtagattattcttccgtgccgaagcagacagatgtggaggagtggacatcctgggatgaggacgcgccaaccagcgttaaaatagaaggtggcaatggtaatgtggctactcagcagaatagtttagagcagctggagcccgattactttaaggatatgacgcctaccatacgcaaaacgcagaaaattgtcatcaaaaagagagagcctctgaatttcgggattccggatggctcgacaggcttctccagtcgtctagctgccacacaggacctgccattcattcatcaatcatctgagttaggagacctggatacgtggcaggagaatacaaacgcctgggaggaagaggaggacgctgcgtggcaggccgaggaggtgttgagacagcaaaagctggctgatcgcgaaaaacgcgcagctgagcagcagagaaagaagatggagaaggaggcttag

SEQ ID NO: 99529 - DNA, 777 bp, Artificial Sequence
  derived and/or modified sequence
atggccatcacccagttccggctgttcaagttctgcacctgcctggccactgtcttctcattcctgaagcgtctgatctgtcgctccgggcggggtcggaaacttagcggggaccagattactctgccaacaactgtggattattcatcagttcctaaacagacagatgtggaggagtggactagctgggacgaagatgcacctactagcgtaaagattgagggaggtaacggaaacgttgccacgcaacagaatagtctggagcagctggagcctgactactttaaagacatgacacccaccatccggaaaacccagaagattgtgatcaagaagagagagcctttgaatttcgggattcctgatggaagcaccggcttcagtagccggctggcagcaactcaggatttgccattcatccaccaatcttctgagctgggagacttggacacatggcaggagaacacaaatgcctgggaggaggaagaagacgccgcctggcaggctgaggaggtgctacgaagtagaacgaacgtatgcctattgtgttccctgctgtttcaccaccctactccaactagcacaccttacatcaatcagtccgtcaagatagagagagtgtcccttggccagtggtcgtacggaaaatctaaggagcagcagaagctcgccgaccgagagaagcgcgctgccgagcagcagaggaagaagatggagaaggaagctcagagactcatgaaaaaggagcagaataagatcggtgttaaactgagttag

SEQ ID NO: 99530 - DNA, 237 bp, Artificial Sequence
  derived and/or modified sequence
atggccatcacccagttccggctgttcaagttctgcacctgcctggctaccgtcttcagctttttgaagaggttgatctgccggagtggtcgggggcgtaaattgtctggagaccaaatcactttacccaccacagtagattattcttctgtacccaaacagacagacgtcgaagagtggacttcctgggacgaagatgcccctacctccgtaaaaatcgagggtggcaacggctag

SEQ ID NO: 99531 - DNA, 642 bp, Artificial Sequence
  derived and/or modified sequence
atggccatcacccagttccgcctgttcaaattctgtacctgcctggcaactgtcttctccttcttaaagaggctcatctgccgttctggtcgcggtaggaagctaagcggggaccaaattactctgccaaccactgtcgactactccagcgtgcctaaacagactgatgtcgaggaatggacttcttgggatgaggacgccccaacatctgtcaaaatcgaaggagggaacggaaacgttgcgacacagcagaatagtctcgagcagctggaacctgattactttaaagacatgacaccaacaatcagaaagacgcagaaaattgttatcaagaagagggaacccttgaatttcggaattccggatggatctactggatttagcagtagactggcagcgacacaggacctccctttcatccatcagtcttccgagttaggcgacctcgacacctggcaagagaacacgaacgcttgggaggaagaagaggatgcagcctggcaggctgaagaggtgctccgccaacagaagctggctgatcgagagaaaagagcagctgagcagcagagaaagaagatggagaaagaggcgcagaggctgatgaagaaggagcagaataagattggtgttaagctcagttag

SEQ ID NO: 99532 - DNA, 642 bp, Artificial Sequence
  derived and/or modified sequence
atggctatcacccagttccggctgtttaagttttgtacttgcctggctactgtgttttccttcctgaagcgccttatttgtaggagcgggcgtgggcgtaagctgagcggagatcagattacccttcctaccaccgtggactattcctccgtcccgaagcagacggatgtggaggagtggaccagttgggacgaagatgcacccacctctgtcaaaatcgaaggtggcaatgggaacgtggcaacccaacagaatagcctcgagcagctcgaaccggactattttaaggatatgactccgactattcggaagacccagaaaatcgtcataaagaaacgtgaaccattgaattttggaatcccagacggcagcacaggttttagctctaggctggcagctacacaagatctccctttcatccaccagtcatccgagctcggtgacctggatacttggcaagaaaacactaacgcctgggaagaggaggaggacgccgcttggcaggcggaggaggtacttcgacagcaaaagctggccgacagagaaaagcgggctgccgaacagcagagaaagaaaatggagaaggaagcccagagactcatgaagaaggaacagaataagatcggagtcaagctcagctag

SEQ ID NO: 99533 - DNA, 594 bp, Artificial Sequence
  derived and/or modified sequence
atggcaattacgcagtttcgacttttcaaattctgcacatgtttggccaccgtcttcagctttttgaagcgcctcatatgcaggagcgggcgagggcgaaaactgagcggggatcaaatcactctgcccacaactgtggattattcaagcgtgcccaaacagaccgatgttgaggaatggaccagttgggacgaggacgctcctacatcagtgaagatcgaagggggaaatgggaatgtggcgacccagcagaactctttagaacagctggagcccgattattttaaggatatgacaccaactatccgcaaaacccaaaagatcgtgatcaaaaagcgcgaaccgctaaacttcggtatccccgacggctccacagggtttagtagcaggctcgccgcaacacaggatttacccttcatccaccaaagcagtgaattaggagacttggatacgtggcaggagaacacaaatgcctgggaagaggaggaagacgccgcatggcaggctgaggaggtgctcagacagcagaagctggccgacagggaaaagagggccgcagagcagcagaggaagaaaatggaaaaggaggcatag

SEQ ID NO: 99534 - DNA, 777 bp, Artificial Sequence
  derived and/or modified sequence
atggccatcactcagttcagattgttcaaattctgcacctgtctcgcaaccgtatttagtttccttaaacggttgatctgtcgctccggcagaggccgtaaattgtctggagatcagatcacactcccgactacagtcgattacagtagcgtgcccaagcagactgatgtggaggaatggacctcatgggacgaggatgctcccacgtcggtgaagatagaagggggtaacggaaacgtcgctacacaacaaaactcactggaacagctagaacccgattatttcaaggatatgaccccaactattcgcaagactcaaaagatcgtgatcaagaaaagagaacccctaaacttcggaattcccgacggatcgactggctttagttccagactggctgccacacaagatctaccgtttattcaccagagctcggaactaggagacctcgatacatggcaggaaaatacaaatgcttgggaggaggaagaagacgccgcttggcaggctgaagaggttttacgtagtagaaccaacgtgtgcctgctgtgttccctgctgtttcaccatcctacccccacgtccacgccctatatcaaccagtcggtcaagatcgagcgggtgtcacttggccagtggtcgtatggtaagagtaaggaacaacagaagttggcagaccgtgagaaacgggcagccgagcagcagcggaaaaagatggaaaaggaagcccaaaggctgatgaaaaaggagcagaacaaaataggagtaaaactctcgtag

SEQ ID NO: 99535 - DNA, 237 bp, Artificial Sequence
  derived and/or modified sequence
atggcaattacacagttccgtctgtttaagttctgcacctgcctggcgaccgtctttagctttttaaagcggctgatctgtcgcagcggacggggaagaaagctgagcggcgaccagattactctacccaccaccgtggattactcatccgtgcctaaacagaccgatgttgaagaatggacttcctgggacgaggacgctcctacttcggttaaaattgaaggcggaaacggctag

SEQ ID NO: 99536 - DNA, 642 bp, Artificial Sequence
  derived and/or modified sequence
atggccatcacccagttcagactgttcaagttctgcacctgcctggccaccgtgttcagcttcctgaagagactgatctgcagaagcggcagaggcagaaagctgagcggcgaccagatcaccctgcccaccaccgtggactacagcagcgtgcccaagcagaccgacgtggaggagtggaccagctgggacgaggacgcccccaccagcgtgaagatcgagggcggcaacggcaacgtggccacccagcagaacagcctggagcagctggagcccgactacttcaaggacatgacccccaccatcagaaagacccagaagatcgtgatcaagaagagagagcccctgaacttcggcatccccgacggcagcaccggcttcagcagcagactggccgccacccaggacctgcccttcatccaccagagcagcgagctgggcgacctggacacctggcaggagaacaccaacgcctgggaggaggaggaggacgccgcctggcaggccgaggaggtgctgagacagcagaagctggccgacagagagaagagagccgccgagcagcagagaaagaagatggagaaggaggcccagagactgatgaagaaggagcagaacaagatcggcgtgaagctgagctag

SEQ ID NO: 99537 - DNA, 594 bp, Artificial Sequence
  derived and/or modified sequence
atggccatcacccagttcagactgttcaagttctgcacctgcctggccaccgtgttcagcttcctgaagagactgatctgcagaagcggcagaggcagaaagctgagcggcgaccagatcaccctgcccaccaccgtggactacagcagcgtgcccaagcagaccgacgtggaggagtggaccagctgggacgaggacgcccccaccagcgtgaagatcgagggcggcaacggcaacgtggccacccagcagaacagcctggagcagctggagcccgactacttcaaggacatgacccccaccatcagaaagacccagaagatcgtgatcaagaagagagagcccctgaacttcggcatccccgacggcagcaccggcttcagcagcagactggccgccacccaggacctgcccttcatccaccagagcagcgagctgggcgacctggacacctggcaggagaacaccaacgcctgggaggaggaggaggacgccgcctggcaggccgaggaggtgctgagacagcagaagctggccgacagagagaagagagccgccgagcagcagagaaagaagatggagaaggaggcctag

SEQ ID NO: 99538 - DNA, 777 bp, Artificial Sequence
  derived and/or modified sequence
atggccatcacccagttcagactgttcaagttctgcacctgcctggccaccgtgttcagcttcctgaagagactgatctgcagaagcggcagaggcagaaagctgagcggcgaccagatcaccctgcccaccaccgtggactacagcagcgtgcccaagcagaccgacgtggaggagtggaccagctgggacgaggacgcccccaccagcgtgaagatcgagggcggcaacggcaacgtggccacccagcagaacagcctggagcagctggagcccgactacttcaaggacatgacccccaccatcagaaagacccagaagatcgtgatcaagaagagagagcccctgaacttcggcatccccgacggcagcaccggcttcagcagcagactggccgccacccaggacctgcccttcatccaccagagcagcgagctgggcgacctggacacctggcaggagaacaccaacgcctgggaggaggaggaggacgccgcctggcaggccgaggaggtgctgagaagcagaaccaacgtgtgcctgctgtgcagcctgctgttccaccaccccacccccaccagcaccccctacatcaaccagagcgtgaagatcgagagagtgagcctgggccagtggagctacggcaagagcaaggagcagcagaagctggccgacagagagaagagagccgccgagcagcagagaaagaagatggagaaggaggcccagagactgatgaagaaggagcagaacaagatcggcgtgaagctgagctag

SEQ ID NO: 99539 - DNA, 237 bp, Artificial Sequence
  derived and/or modified sequence
atggccatcacccagttcagactgttcaagttctgcacctgcctggccaccgtgttcagcttcctgaagagactgatctgcagaagcggcagaggcagaaagctgagcggcgaccagatcaccctgcccaccaccgtggactacagcagcgtgcccaagcagaccgacgtggaggagtggaccagctgggacgaggacgcccccaccagcgtgaagatcgagggcggcaacggctag

SEQ ID NO: 99540 - DNA, 2379 bp, Artificial Sequence
  derived and/or modified sequence
gtgcagcattcgccatgctccgctcacgcgtgggagactgggctgtggggtaccggcccggaaagcacgcagcctccaaagccgccttcctcagggaaatttgcgtgaccttactgccctccgtctacaggccttgtacctctccaggccgatttttccacaatttaaatctcagttcacctggtatccagctccagcaacttagagcgtttcacgtcacgccgggcgccaggcgtcggcttgtataacctgaaaacgctcctgtttttctcatctgtgcagtgggttttgattcccaccatggccatcacccagtttcggttatttaaattttgtacctgcctagcaacagtattctcattcctaaagagattaatatgcagatctggcagaggacggaaattaagtggagaccaaataactttgccaactacagttgattattcatcagttcctaagcagacagatgttgaagagtggacttcctgggatgaagatgcacccaccagtgtaaagatcgaaggagggaatgggaatgtggcaacacaacaaaattctttggaacaactggaacctgactattttaaggacatgacaccaactattaggaaaactcagaaaattgttattaagaagagagaaccattgaattttggcatcccagatgggagcacaggtttctctagtagattagcagctacacaagatctgccttttattcatcagtcttctgaattaggtgacttagatacctggcaggaaaataccaatgcatgggaagaagaagaagatgcagcctggcaagcagaagaagttctgagacagcagaaactagcagacagagaaaagagagcagccgaacaacaaaggaagaaaatggaaaaggaagcacaacggctaatgaagaaggaacaaaacaaaattggtgtgaaactttcataacacatgttcaaattttatcatgccagtaggagaaatctcagctccacaacccaagcaacatttgtatggatttaagagtattttaagaagacatactgcttgattttaatacattgatcaggccatccaggacaccacgattctcccaaagtaccttgaactcttagtgattgagactcaaaaaaacaaaaaagacttgagacaatgttttcttcaacatgctccaaatataagacatttgtttgctgtacagaaagtatcacaaatggaatatatcagtacctctcaagctagtgtttctagctaaataaatgggtgtatataattttatggtggaaaagaactgtactgtctgttatgatttccttcaatgtgcataatgataaaataaataattttaatattcttttgtttccatggttacctgacctaaattagataaattgtagggctttagctttcttatttttgtcaaaagttggtgttgacatacattccctctaatttgaactggtattgtttacgtttgatacaacattaaggaatttgatgattttcatttcatgaaaatgacattaaatgcaataattttacttatcataaacattttgtacatcattattttcttttggattagtgttgtcatacatgtaatttatatcacatgtataaacattgaaaatcaactaaaatgacatttgttctacattataacttgtgagtttcaagaactagtattagtagttttttcctttcattatagattgtaagatgttgtggtatctttgagtgccttagttcttccttcctcccaaaagccattaatttacaaatgcttaaagccatcaggtcaaatatttcaaagcctttagatgatttctgtactagctttagatgtctgacgttatgtaggttacctgtgttcttggctaggaaaacattattgattcattaaatcataaaggtgggaataataatcttttatttatgatgttgattggctccaaaatagtcttaaggaaataaatactgggtctgtaggggaaaagtagacttcatagtttaaaatcccattaaccttttcaccgcagttgaaatgcatccagcctgattttcctatcattttggaatttttaaggatttttactttcttaagttactgcctagaatcaacattcggtgagattttgaaatgtcatagatactgtacaggccaaaccttactaatttattttacttaaagtgatattttatagaaaaatcataagttatacaatgagaaccctttaagcccttagcctaagctttcagactaaatgtgattatagaataagatgaaagttaactttggtacagagctttttatagccccaaattatatttccagttattatattcattagaatttctgctaataaactcccaacttaaatagaa

SEQ ID NO: 99541 - DNA, 1467 bp, Artificial Sequence
  derived and/or modified sequence
gatgaaggggcggccatggcagctgcgcagaggcaacgcaggctgctacggagcgcgcgcccggctttgaatgagcggggctgggagtgagcgggcggagcgcgagctcgaggaagagacaggcagcgcgcgtgagcgcgccttgtgtgcgcgcgcggcccgcggcagctcggagcctccgccgggcgggcggggagggggaggggcaggttttgattcccaccatggccatcacccagtttcggttatttaaattttgtacctgcctagcaacagtattctcattcctaaagagattaatatgcagatctggcagaggacggaaattaagtggagaccaaataactttgccaactacagttgattattcatcagttcctaagcagacagatgttgaagagtggacttcctgggatgaagatgcacccaccagtgtaaagatcgaaggagggaatgggaatgtggcaacacaacaaaattctttggaacaactggaacctgactattttaaggacatgacaccaactattaggaaaactcagaaaattgttattaagaagagagaaccattgaattttggcatcccagatgggagcacaggtttctctagtagattagcagctacacaagatctgccttttattcatcagtcttctgaattaggtgacttagatacctggcaggaaaataccaatgcatgggaagaagaagaagatgcagcctggcaagcagaagaagttctgagacagcagaaactagcagacagagaaaagagagcagccgaacaacaaaggaagaaaatggaaaaggaagcacaacggctaatgaagaaggaacaaaacaaaattggtgtgaaactttcataacacatgttcaaattttatcatgccagtaggagaaatctcagctccacaacccaagcaacatttgtatggatttaagagtattttaagaagacatactgcttgattttaatacattgatcaggccatccaggacaccacgattctcccaaagtaccttgaactcttagtgattgagactcaaaaaaacaaaaaagacttgagacaatgttttcttcaacatgctccaaatataagacatttgtttgctgtacagaaagtatcacaaatggaatatatcagtacctctcaagctagtgtttctagctaaataaatgggtgtatataattttatggtggaaaagaactgtactgtctgttatgatttccttcaatgtgcataatgataaaataaataattttaatattcttttgtttccatggttacctgacctaaattagataaattgtagggctttagctttcttatttttgtcaaaagttggtgttgacatacattccctctaatttgaactggtattgtttacgtttgatacaacattaaggaatttgatgattttcatttcatgaaaatgacattaaatgcaataattttacttatcat

SEQ ID NO: 99542 - DNA, 706 bp, Artificial Sequence
  derived and/or modified sequence
atggcacagaatgttcgattttactaccagctctcacactccgcttctgtttccccttctcttacgggccgctgctcaaacctttatttatcaaatttaagttttgattcccaccatggccatcacccagtttcggttatttaaattttgtacctgcctagcaacagtattctcattcctaaagagattaatatgcagatctggcagaggacggaaattaagtggagaccaaataactttgccaactacagttgattattcatcagttcctaagcagacagatgttgaagagtggacttcctgggatgaagatgcacccaccagtgtaaagatcgaaggagggaatgggaatgtggcaacacaacaaaattctttggaacaactggaacctgactattttaaggacatgacaccaactattaggaaaactcagaaaattgttattaagaagagagaaccattgaattttggcatcccagatgggagcacaggtttctctagtagattagcagctacacaagatctgccttttattcatcagtcttctgaattaggtgacttagatacctggcaggaaaataccaatgcatgggaagaagaagaagatgcagcctggcaagcagaagaagttctgagacagcagaaactagcagacagagaaaagagagcagccgaacaacaaaggaagaaaatggaaaaggaagca

SEQ ID NO: 99543 - DNA, 777 bp, Artificial Sequence
  derived and/or modified sequence
atggccatcacccagtttcggttatttaaattttgtacctgcctagcaacagtattctcattcctaaagagattaatatgcagatctggcagaggacggaaattaagtggagaccaaataactttgccaactacagttgattattcatcagttcctaagcagacagatgttgaagagtggacttcctgggatgaagatgcacccaccagtgtaaagatcgaaggagggaatgggaatgtggcaacacaacaaaattctttggaacaactggaacctgactattttaaggacatgacaccaactattaggaaaactcagaaaattgttattaagaagagagaaccattgaattttggcatcccagatgggagcacaggtttctctagtagattagcagctacacaagatctgccttttattcatcagtcttctgaattaggtgacttagatacctggcaggaaaataccaatgcatgggaagaagaagaagatgcagcctggcaagcagaagaagttctgagatccaggaccaatgtatgtttactctgctctctcctgtttcatcatcccactcctacctccactccctacattaaccaatcagtaaagatagagagagtgagtctgggtcagtggagttacggaaagagtaaggaacagcagaaactagcagacagagaaaagagagcagccgaacaacaaaggaagaaaatggaaaaggaagcacaacggctaatgaagaaggaacaaaacaaaattggtgtgaaactttcataa

SEQ ID NO: 99544 - DNA, 813 bp, Artificial Sequence
  derived and/or modified sequence
ggtactcctaggtattggcatttctttaatagattcccagatttgtgaaccactggactaaatgagctccatggtaactttcaatttactagctatgtgactttggtcaagttatttgacctctcttaattcaatttcctcatctataaaatggatataaggaaatatattcatctgcaagttaaaaatatttaaagtattttaaatagtattatgttcatgtggttcaaactttaaaaggtacacagagatttaatatattctattttatacttttttattttttgaattgtagatttttgtattaatagatttaggtaaaattattttcaaaaactcagaatgaagggttttatccttacaaccattgaaaactcgaaaacctggtttttgacttgttaatatgatttaaattataattttaaaatttactgtgttatagtttctagagaaaggtaaaaaatatcttagatttttcttagtgcataataggtcttttcaggacaggagtatgacttttgaaatcaatttaatgcattttttgttttgtgcctcttccacaggttttgattcccaccatggccatcacccagtttcggttatttaaattttgtacctgcctagcaacagtattctcattcctaaagagattaatatgcagatctggcagaggacggaaattaagtggagaccaaataactttgccaactacagttgattattcatcagttcctaagcagacagatgttgaagagtggacttcctgggatgaagatgcacccaccagtgtaaagatcgaaggagggaatggga

SEQ ID NO: 99545 - protein, 757 aa, Artificial Sequence
  derived and/or modified sequence
MAGLTAAAPRPGVLLLLLSILHPSRPGGVPGAIPGGVPGGVFYPGAGLGALGGGALGPGGKPLKPVPGGLAGAGLGAGLGAFPAVTFPGALVPGGVADAAAAYKAAKAGAGLGGVPGVGGLGVSAGAVVPQPGAGVKPGKVPGVGLPGVYPGGVLPGARFPGVGVLPGVPTGAGVKPKAPGVGGAFAGIPGVGPFGGPQPGVPLGYPIKAPKLPGGYGLPYTTGKLPYGYGPGGVAGAAGKAGYPTGTGVGPQAAAAAAAKAAAKFGAGAAGVLPGVGGAGVPGVPGAIPGIGGIAGVGTPAAAAAAAAAAKAAKYGAAAGLVPGGPGFGPGVVGVPGAGVPGVGVPGAGIPVVPGAGIPGAAVPGVVSPEAAAKAAAKAAKYGARPGVGVGGIPTYGVGAGGFPGFGVGVGGIPGVAGVPGVGGVPGVGGVPGVGISPEAQAAAAAKAAKYGVGTPAAAAAKAAAKAAQFGLVPGVGVAPGVGVAPGVGVAPGVGLAPGVGVAPGVGVAPGVGVAPGIGPGGVAAAAKSAAKVAAKAQLRAAAGLGAGIPGLGVGVGVPGLGVGAGVPGLGVGAGVPGFGAGADEGVRRSLSPELREGDPSSSQHLPSTPSSPRVPGALAAAKAAKYGAAVPGVLGGLGALGGVGIPGGVVGAGPAAAAAAAKAAAKAAQFGLVGAAGLGGLGVGGLGVPGVGGLGGIPPAAAAKAAKYGAAGLGGVLGGAGQFPLGGVAARPGFGLSPIFPGGACLGKACGRKRK

SEQ ID NO: 99546 - DNA, 2175 bp, Artificial Sequence
  derived and/or modified sequence
atggccggcctgacagctgctgcccccaggcctggggtgctgctgctgctgctgagcatcctgcaccccagcaggcctgggggcgtgcctggggccatccctgggggcgtgcctgggggcgtcttctacccaggggccggcctgggcgccctgggcggcggggccctgggccctgggggcaagcccctgaagcctgtgcctgggggcctggccggggccggcctgggcgccggcctgggcgccttccctgctgtgaccttccctggggccctggtgcctggaggagtggctgatgctgctgctgcctacaaggccgccaaggccggggccggcctgggcggcgtgcctggggtgggcggcctgggcgtgtctgctggagctgtggtgccccagcccggggccggcgtgaagccaggcaaggtgcctggggtgggcctgcccggggtgtacccaggaggagtgctgcccggggcccgcttccctggggtgggcgtgctgcccggggtgcccactggagctggggtgaagcccaaggcccctggggtgggcggggcctttgctggcatccctggggtgggcccctttggaggcccccagcccggggtgcccctgggctaccccatcaaggcccccaagctgcccggcggctacggcctgccctacaccaccgggaagctgccctacggctacggccctgggggcgtggccggggctgctgggaaggccggctaccccaccggcaccggggtgggcccccaggccgctgctgctgctgctgccaaggctgctgccaagtttggagctggagctgctggggtgctgcccggggtgggcggggccggcgtgcctggggtgcctggggccatccctggcatcggcggcattgctggggtgggcaccccagctgctgctgctgctgctgctgctgctgccaaggccgccaagtacggggctgctgctggcctggtgcctgggggccctggctttggacctggggtggtgggcgtgcctggagctggggtgcctggggtgggcgtgcctggagctggcatccctgtggtgcctggagctggcatccctggagctgctgtgcctggggtggtgtccccagaggccgccgccaaggctgctgccaaggccgccaagtatggagcccggcctggggtgggcgtgggcggcatccccacctatggagtgggcgccggcggcttccctggctttggagtgggcgtgggcggcatccctggggtggccggcgtgcctggggtgggcggcgtgcctggggtgggcggcgtgcctggggtgggcatcagccctgaggcccaggccgctgctgctgccaaggccgccaagtatggagtgggcaccccagctgctgctgctgccaaggctgctgccaaggccgcccagtttggcctggtgcctggggtgggcgtggcccctggggtgggcgtggcccctggggtgggcgtggcccctggggtgggcctggcccctggggtgggcgtggcccctggggtgggcgtggcccctggggtgggcgtggcccctggcatcggccctggaggagtggccgctgctgccaagtctgctgccaaggtggccgccaaggcccagctgcgggctgctgctggcctgggcgccggcatccctggcctgggcgtgggcgtgggcgtgcccggcctgggcgtgggcgctggggtgcccggcctgggcgtgggcgccggcgtgcccggctttggagctgtgcctggggccctggccgccgccaaggccgccaagtatggagctgctgtgcctggggtgctgggcggcctgggcgccctgggcggcgtgggcatccctggaggagtggtgggcgccggccctgctgctgctgctgctgctgccaaggctgctgccaaggccgcccagtttggcctggtgggcgctgctggcctgggcggcctgggcgtgggcggcctgggcgtgcctggggtgggcggcctgggcggcatccccccagctgctgctgccaaggccgccaagtatggagctgctggcctgggcggcgtgctgggcggggccggccagttccccctgggcggcgtggccgcccggcccggcttcggcctgagccccatcttccctgggggcgcctgcctgggcaaggcctgtggcaggaagaggaagtag

SEQ ID NO: 99547 - DNA, 2274 bp, Artificial Sequence
  derived and/or modified sequence
atggccggcctgacagctgctgcccccaggcctggggtgctgctgctgctgctgagcatcctgcaccccagcaggcctgggggcgtgcctggggccatccctgggggcgtgcctgggggcgtcttctacccaggggccggcctgggcgccctgggcggcggggccctgggccctgggggcaagcccctgaagcctgtgcctgggggcctggccggggccggcctgggcgccggcctgggcgccttccctgctgtgaccttccctggggccctggtgcctggaggagtggctgatgctgctgctgcctacaaggccgccaaggccggggccggcctgggcggcgtgcctggggtgggcggcctgggcgtgtctgctggagctgtggtgccccagcccggggccggcgtgaagccaggcaaggtgcctggggtgggcctgcccggggtgtacccaggaggagtgctgcccggggcccgcttccctggggtgggcgtgctgcccggggtgcccactggagctggggtgaagcccaaggcccctggggtgggcggggcctttgctggcatccctggggtgggcccctttggaggcccccagcccggggtgcccctgggctaccccatcaaggcccccaagctgcccggcggctacggcctgccctacaccaccgggaagctgccctacggctacggccctgggggcgtggccggggctgctgggaaggccggctaccccaccggcaccggggtgggcccccaggccgctgctgctgctgctgccaaggctgctgccaagtttggagctggagctgctggggtgctgcccggggtgggcggggccggcgtgcctggggtgcctggggccatccctggcatcggcggcattgctggggtgggcaccccagctgctgctgctgctgctgctgctgctgccaaggccgccaagtacggggctgctgctggcctggtgcctgggggccctggctttggacctggggtggtgggcgtgcctggagctggggtgcctggggtgggcgtgcctggagctggcatccctgtggtgcctggagctggcatccctggagctgctgtgcctggggtggtgtccccagaggccgccgccaaggctgctgccaaggccgccaagtatggagcccggcctggggtgggcgtgggcggcatccccacctatggagtgggcgccggcggcttccctggctttggagtgggcgtgggcggcatccctggggtggccggcgtgcctggggtgggcggcgtgcctggggtgggcggcgtgcctggggtgggcatcagccctgaggcccaggccgctgctgctgccaaggccgccaagtatggagtgggcaccccagctgctgctgctgccaaggctgctgccaaggccgcccagtttggcctggtgcctggggtgggcgtggcccctggggtgggcgtggcccctggggtgggcgtggcccctggggtgggcctggcccctggggtgggcgtggcccctggggtgggcgtggcccctggggtgggcgtggcccctggcatcggccctggaggagtggccgctgctgccaagtctgctgccaaggtggccgccaaggcccagctgcgggctgctgctggcctgggcgccggcatccctggcctgggcgtgggcgtgggcgtgcccggcctgggcgtgggcgctggggtgcccggcctgggcgtgggcgccggcgtgcccggctttggagctggagcagatgaaggagtgagaagaagcctgagccctgagctgcgggagggggaccccagcagcagccagcacctgcccagcacccccagcagcccccgggtgcctggggccctggccgccgccaaggccgccaagtacggggctgctgtgcctggggtgctgggcggcctgggcgccctgggcggcgtgggcatccctgggggcgtggtgggcgccggccctgctgctgctgctgctgctgccaaggccgccgccaaggccgcccagtttggcctggtgggcgccgccggcctgggcggcctgggcgtgggcggcctgggcgtgcctggggtgggcggcctgggcggcatccccccagctgctgctgccaaggccgccaagtacggggctgctggcctgggcggcgtgctgggcggggccggccagttccccctgggcggcgtggccgcccggcccggcttcggcctgagccccatcttccctggaggagcctgcctgggcaaggcctgtggcaggaagaggaagtag

SEQ ID NO: 99548 - DNA, 2379 bp, Artificial Sequence
  derived and/or modified sequence
atggccggcctgacagctgctgcccccaggcctggggtgctgctgctgctgctgagcatcctgcaccccagcaggcctgggggcgtgcctggggccatccctgggggcgtgcctgggggcgtcttctacccaggggccggcctgggcgccctgggcggcggggccctgggccctgggggcaagcccctgaagcctgtgcctgggggcctggccggggccggcctgggcgccggcctgggcgccttccctgctgtgaccttccctggggccctggtgcctggaggagtggctgatgctgctgctgcctacaaggccgccaaggccggggccggcctgggcggcgtgcctggggtgggcggcctgggcgtgtctgctggagctgtggtgccccagcccggggccggcgtgaagccaggcaaggtgcctggggtgggcctgcccggggtgtacccaggaggagtgctgcccggggcccgcttccctggggtgggcgtgctgcccggggtgcccactggagctggggtgaagcccaaggcccctggggtgggcggggcctttgctggcatccctggggtgggcccctttggaggcccccagcccggggtgcccctgggctaccccatcaaggcccccaagctgcccggcggctacggcctgccctacaccaccgggaagctgccctacggctacggccctgggggcgtggccggggctgctgggaaggccggctaccccaccggcaccggggtgggcccccaggccgctgctgctgctgctgccaaggctgctgccaagtttggagctggagctgctggggtgctgcccggggtgggcggggccggcgtgcctggggtgcctggggccatccctggcatcggcggcattgctggggtgggcaccccagctgctgctgctgctgctgctgctgctgccaaggccgccaagtacggggctgctgctggcctggtgcctgggggccctggctttggacctggggtggtgggcgtgcctggagctggggtgcctggggtgggcgtgcctggagctggcatccctgtggtgcctggagctggcatccctggagctgctgtgcctggggtggtgtccccagaggccgccgccaaggctgctgccaaggccgccaagtatggagcccggcctggggtgggcgtgggcggcatccccacctatggagtgggcgccggcggcttccctggctttggagtgggcgtgggcggcatccctggggtggccggcgtgcctggggtgggcggcgtgcctggggtgggcggcgtgcctggggtgggcatcagccctgaggcccaggccgctgctgctgccaaggccgccaagtacggggctgctggagctggggtgctgggcggcctggtgcctggggcccctggagctgtgcctggggtgcccggcactggaggagtgcctggggtgggcaccccagctgctgctgctgccaaggccgccgccaaggccgcccagtttgccctgctgaacctggccggcctggtgcctggggtgggcgtggcccctggggtgggcgtggcccctggggtgggcgtggcccctggggtgggcctggcccctggggtgggcgtggcccctggggtgggcgtggcccctggggtgggcgtggcccctggcatcggccctgggggcgtggccgccgccgccaagtctgctgccaaggtggccgccaaggcccagctgcgggctgctgctggcctgggcgccggcatccctggcctgggcgtgggcgtgggcgtgcccggcctgggcgtgggcgccggcgtgcccggcctgggcgtgggcgctggggtgcccggctttggagctggagcagatgagggcgtgcggcgcagcctgagccctgagctgcgggagggggaccccagcagcagccagcacctgcccagcacccccagcagcccccgggtgcctggggccctggccgccgccaaggccgccaagtatggagctgctgtgcctggggtgctgggcggcctgggcgccctgggcggcgtgggcatccctggaggagtggtgggcgccggccctgctgctgctgctgctgctgccaaggctgctgccaaggccgcccagtttggcctggtgggcgctgctggcctgggcggcctgggcgtgggcggcctgggcgtgcctggggtgggcggcctgggcggcatccccccagctgctgctgccaaggccgccaagtatggagctgctggcctgggcggcgtgctgggcggggccggccagttccccctgggcggcgtggccgcccggcccggcttcggcctgagccccatcttccctgggggcgcctgcctgggcaaggcctgtggcaggaagaggaagtag

SEQ ID NO: 99549 - DNA, 2034 bp, Artificial Sequence
  derived and/or modified sequence
atggccggcctgacagctgctgcccccaggcctggggtgctgctgctgctgctgagcatcctgcaccccagcaggcctgggggcgtgcctggggccatccctgggggcgtgcctgggggcgtcttctacccagccctgggccctgggggcaagcccctgaagcctgtgcctgggggcctggccggggccggcctgggcgccggcctgggcgccttccctgctgtgaccttccctggggccctggtgcctggaggagtggctgatgctgctgctgcctacaaggccgccaaggccggggccggcctgggcggcgtgcctggggtgggcggcctgggcgtgtctgctggagctgtggtgccccagcccggggccggcgtgaagccaggcaaggtgcctggggtgggcctgcccggggtgtacccaggaggagtgctgcccggggcccgcttccctggggtgggcgtgctgcccggggtgcccactggagctggggtgaagcccaaggcccctggggtgggcggggcctttgctggcatccctggggtgggcccctttggaggcccccagcccggggtgcccctgggctaccccatcaaggcccccaagctgcccggcggctacggcctgccctacaccaccgggaagctgccctacggctacggccctgggggcgtggccggggctgctgggaaggccggctaccccaccggcaccggggtgggcccccaggccgctgctgctgctgctgccaaggctgctgccaagtttggagctggagctgctggggtgctgcccggggtgggcggggccggcgtgcctggggtgcctggggccatccctggcatcggcggcattgctggggtgggcaccccagctgctgctgctgctgctgctgctgctgccaaggccgccaagtacggggctgctgctggcctggtgcctgggggccctggctttggacctggggtggtgggcgtgcctggagctggggtgcctggggtgggcgtgcctggagctggcatccctgtggtgcctggagctggcatccctggagctgctgtgcctggggtggtgtccccagaggccgccgccaaggctgctgccaaggccgccaagtatggagcccggcctggggtgggcgtgggcggcatccccacctatggagtgggcgccggcggcttccctggctttggagtgggcgtgggcggcatccctggggtggccggcgtgcctggggtgggcggcgtgcctggggtgggcggcgtgcctggggtgggcatcagccctgaggcccaggccgctgctgctgccaaggccgccaagtatggcctggtgcctggggtgggcgtggcccctggggtgggcgtggcccctggggtgggcgtggcccctggggtgggcctggcccctggggtgggcgtggcccctggggtgggcgtggcccctggggtgggcgtggcccctggcatcggccctgggggcgtggccgccgccgccaagtctgctgccaaggtggccgccaaggcccagctgcgggctgctgctggcctgggcgccggcatccctggcctgggcgtgggcgtgggcgtgcccggcctgggcgtgggcgccggcgtgcccggcctgggcgtgggcgctggggtgcccggctttggagctgtgcctggggccctggccgccgccaaggccgccaagtacggggctgctgtgcctggggtgctgggcggcctgggcgccctgggcggcgtgggcatccctgggggcgtggtgggcgccggccctgctgctgctgctgctgctgccaaggccgccgccaaggccgcccagtttggcctggtgggcgccgccggcctgggcggcctgggcgtgggcggcctgggcgtgcctggggtgggcggcctgggcggcatccccccagctgctgctgccaaggccgccaagtatggagtggccgcccggcccggcttcggcctgagccccatcttccctggaggagcctgcctgggcaaggcctgtggcaggaagaggaagtag

SEQ ID NO: 99550 - DNA, 2118 bp, Artificial Sequence
  derived and/or modified sequence
atggccggcctgacagctgctgcccccaggcctggggtgctgctgctgctgctgagcatcctgcaccccagcaggcctgggggcgtgcctggggccatccctgggggcgtgcctgggggcgtcttctacccaggggccggcctgggcgccctgggcggcggggccctgggccctgggggcaagcccctgaagcctgtgcctgggggcctggccggggccggcctgggcgccggcctgggcgccttccctgctgtgaccttccctggggccctggtgcctggaggagtggctgatgctgctgctgcctacaaggccgccaaggccggggccggcctgggcggcgtgcctggggtgggcggcctgggcgtgtctgctggagctgtggtgccccagcccggggccggcgtgaagccaggcaaggtgcctggggtgggcctgcccggggtgtacccaggaggagtgctgcccggggcccgcttccctggggtgggcgtgctgcccggggtgcccactggagctggggtgaagcccaaggcccctggggtgggcggggcctttgctggcatccctggggtgggcccctttggaggcccccagcccggggtgcccctgggctaccccatcaaggcccccaagctgcccggcggctacggcctgccctacaccaccgggaagctgccctacggctacggccctgggggcgtggccggggctgctgggaaggccggctaccccaccggcaccggggtgggcccccaggccgctgctgctgctgctgccaaggctgctgccaagtttggagctggagctgctggggtgctgcccggggtgggcggggccggcgtgcctggggtgcctggggccatccctggcatcggcggcattgctggggtgggcaccccagctgctgctgctgctgctgctgctgctgccaaggccgccaagtacggggctgctgctggcctggtgcctgggggccctggctttggacctggggtggtgggcgtgcctggagctggggtgcctggggtgggcgtgcctggagctggcatccctgtggtgcctggagctggcatccctggagctgctgtgcctggggtggtgtccccagaggccgccgccaaggctgctgccaaggccgccaagtatggagcccggcctggggtgggcgtgggcggcatccccacctatggagtgggcgccggcggcttccctggctttggagtgggcgtgggcggcatccctggggtggccggcgtgcctggggtgggcggcgtgcctggggtgggcggcgtgcctggggtgggcatcagccctgaggcccaggccgctgctgctgccaaggccgccaagtatggcctggtgcctggggtgggcgtggcccctggggtgggcgtggcccctggggtgggcgtggcccctggggtgggcctggcccctggggtgggcgtggcccctggggtgggcgtggcccctggggtgggcgtggcccctggcatcggccctgggggcgtggccgccgccgccaagtctgctgccaaggtggccgccaaggcccagctgcgggctgctgctggcctgggcgccggcatccctggcctgggcgtgggcgtgggcgtgcccggcctgggcgtgggcgccggcgtgcccggcctgggcgtgggcgctggggtgcccggctttggagctgtgcctggggccctggccgccgccaaggccgccaagtacggggctgctgtgcctggggtgctgggcggcctgggcgccctgggcggcgtgggcatccctgggggcgtggtgggcgccggccctgctgctgctgctgctgctgccaaggccgccgccaaggccgcccagtttggcctggtgggcgccgccggcctgggcggcctgggcgtgggcggcctgggcgtgcctggggtgggcggcctgggcggcatccccccagctgctgctgccaaggccgccaagtacggggctgctggcctgggcggcgtgctgggcggggccggccagttccccctgggcggcgtggccgcccggcccggcttcggcctgagccccatcttccctggaggagcctgcctgggcaaggcctgtggcaggaagaggaagtag

SEQ ID NO: 99551 - DNA, 885 bp, Artificial Sequence
  derived and/or modified sequence
atggccggcctgacagctgctgcccccaggcctggggtgctgctgctgctgctgagcatcctgcaccccagcaggcctgggggcgtgcctggggccatccctgggggcgtgcctgggggcgtcttctacccaggggccggcctgggcgccctgggcggcggggccctgggccctgggggcaagcccctgaagccaggcctgggcgccttccctgctgtgaccttccctggggccctggtgcctggaggagtggctgatgctgctgctgcctacaaggccgccaaggccggggccggcctgggcggcgtgcctggggtgggcggcctgggcgtgtctgctggagctgtggtgccccagcccggggccggcgtgaagccaggcaaggtgcctggggtgggcctgcccggggtgtacccaggaggagtgctgcccggggcccgcttccctggggtgggcgtgctgcccggggtgcccactggagctggggtgaagcccaaggcccctggggtgggcccctttggaggcccccagcccggggtgcccctgggctaccccatcaaggcccccaagctgcccggcggctacggcctgccctacaccaccgggaagctgccctacggctacggccctgggggcgtggccggggctgctgggaaggccggctaccccaccggcaccggggtgggcccccaggccgctgctgctgctgctgccaaggctgctgccaagtttggagctggagctgctggggtgctgcccggggtgggcggggccggcgtgcctggggtgcctggggccatccctggcatcggcggcattgctggggtgggcaccccagctgctgctgctgctgctgctgctgctgccaaggccgccaagtactag

SEQ ID NO: 99552 - DNA, 2121 bp, Artificial Sequence
  derived and/or modified sequence
atggccggcctgacagctgctgcccccaggcctggggtgctgctgctgctgctgagcatcctgcaccccagcaggcctgggggcgtgcctggggccatccctgggggcgtgcctgggggcgtcttctacccaggggccggcctgggcgccctgggcggcggggccctgggccctgggggcaagcccctgaagcctgtgcctgggggcctggccggggccggcctgggcgccggcctgggcgccttccctgctgtgaccttccctggggccctggtgcctggaggagtggctgatgctgctgctgcctacaaggccgccaaggccggggccggcctgggcggcgtgcctggggtgggcggcctgggcgtgtctgctggagctgtggtgccccagcccggggccggcgtgaagccaggcaaggtgcctggggtgggcctgcccggggtgtacccaggaggagtgctgcccggggcccgcttccctggggtgggcgtgctgcccggggtgcccactggagctggggtgaagcccaaggcccctggggtgggcggggcctttgctggcatccctggggtgggcccctttggaggcccccagcccggggtgcccctgggctaccccatcaaggcccccaagctgcccggcggctacggcctgccctacaccaccgggaagctgccctacggctacggccctgggggcgtggccggggctgctgggaaggccggctaccccaccggcaccggggtgggcccccaggccgctgctgctgctgctgccaaggctgctgccaagtttggagctggagctgctggggtgctgcccggggtgggcggggccggcgtgcctggggtgcctggggccatccctggcatcggcggcattgctggggtgggcaccccagctgctgctgctgctgctgctgctgctgccaaggccgccaagtacggggctgctgctggcctggtgcctgggggccctggctttggacctggggtggtgggcgtgcctggagctggggtgcctggggtgggcgtgcctggagctggcatccctgtggtgcctggagctggcatccctggagctgctgtgcctggggtggtgtccccagaggccgccgccaaggctgctgccaaggccgccaagtatggagcccggcctggggtgggcgtgggcggcatccccacctatggagtgggcgccggcggcttccctggctttggagtgggcgtgggcggcatccctggggtggccggcgtgcctggggtgggcggcgtgcctggggtgggcggcgtgcctggggtgggcatcagccctgaggcccaggccgctgctgctgccaaggccgccaagtatggagtgggcaccccagctgctgctgctgccaaggctgctgccaaggccgcccagtttggcctggtgcctggggtgggcgtggcccctggggtgggcgtggcccctggggtgggcgtggcccctggggtgggcctggcccctggggtgggcgtggcccctggggtgggcgtggcccctggggtgggcgtggcccctggcatcggccctggaggagtggccgctgctgccaagtctgctgccaaggtggccgccaaggcccagctgcgggctgctgctggcctgggcgccggcatccctggcctgggcgtgggcgtgggcgtgcccggcctgggcgtgggcgctggggtgcccggcctgggcgtgggcgccggcgtgcccggctttggagctgtgcctggggccctggccgccgccaaggccgccaagtatggagctgctgtgcctggggtgctgggcggcctgggcgccctgggcggcgtgggcatccctggaggagtggtgggcgccggccctgctgctgctgctgctgctgccaaggctgctgccaaggccgcccagtttggcctggtgggcgctgctggcctgggcggcctgggcgtgggcggcctgggcgtgcctggggtgggcggcctgggcggcatccccccagctgctgctgccaaggccgccaagtatggagtggccgcccggcccggcttcggcctgagccccatcttccctgggggcgcctgcctgggcaaggcctgtggcaggaagaggaagtag

SEQ ID NO: 99553 - DNA, 2145 bp, Artificial Sequence
  derived and/or modified sequence
atggccggcctgacagctgctgcccccaggcctggggtgctgctgctgctgctgagcatcctgcaccccagcaggcctgggggcgtgcctggggccatccctgggggcgtgcctgggggcgtcttctacccagccctgggccctgggggcaagcccctgaagcctgtgcctgggggcctggccggggccggcctgggcgccggcctgggcgccttccctgctgtgaccttccctggggccctggtgcctggaggagtggctgatgctgctgctgcctacaaggccgccaaggccggggccggcctgggcggcgtgcctggggtgggcggcctgggcgtgtctgctggagctgtggtgccccagcccggggccggcgtgaagccaggcaaggtgcctggggtgggcctgcccggggtgtacccaggaggagtgctgcccggggcccgcttccctggggtgggcgtgctgcccggggtgcccactggagctggggtgaagcccaaggcccctggggtgggcggggcctttgctggcatccctggggtgggcccctttggaggcccccagcccggggtgcccctgggctaccccatcaaggcccccaagctgcccggcggctacggcctgccctacaccaccgggaagctgccctacggctacggccctgggggcgtggccggggctgctgggaaggccggctaccccaccggcaccggggtgggcccccaggccgctgctgctgctgctgccaaggctgctgccaagtttggagctggagctgctggggtgctgcccggggtgggcggggccggcgtgcctggggtgcctggggccatccctggcatcggcggcattgctggggtgggcaccccagctgctgctgctgctgctgctgctgctgccaaggccgccaagtacggggctgctgctggcctggtgcctgggggccctggctttggacctggggtggtgggcgtgcctggagctggggtgcctggggtgggcgtgcctggagctggcatccctgtggtgcctggagctggcatccctggagctgctgtgcctggggtggtgtccccagaggccgccgccaaggctgctgccaaggccgccaagtatggagcccggcctggggtgggcgtgggcggcatccccacctatggagtgggcgccggcggcttccctggctttggagtgggcgtgggcggcatccctggggtggccggcgtgcctggggtgggcggcgtgcctggggtgggcggcgtgcctggggtgggcatcagccctgaggcccaggccgctgctgctgccaaggccgccaagtatggagtgggcaccccagctgctgctgctgccaaggctgctgccaaggccgcccagtttggcctggtgcctggggtgggcgtggcccctggggtgggcgtggcccctggggtgggcgtggcccctggggtgggcctggcccctggggtgggcgtggcccctggggtgggcgtggcccctggggtgggcgtggcccctggcatcggccctggaggagtggccgctgctgccaagtctgctgccaaggtggccgccaaggcccagctgcgggctgctgctggcctgggcgccggcatccctggcctgggcgtgggcgtgggcgtgcccggcctgggcgtgggcgctggggtgcccggcctgggcgtgggcgccggcgtgcccggctttggagctgtgcctggggccctggccgccgccaaggccgccaagtatggagctgctgtgcctggggtgctgggcggcctgggcgccctgggcggcgtgggcatccctggaggagtggtgggcgccggccctgctgctgctgctgctgctgccaaggctgctgccaaggccgcccagtttggcctggtgggcgctgctggcctgggcggcctgggcgtgggcggcctgggcgtgcctggggtgggcggcctgggcggcatccccccagctgctgctgccaaggccgccaagtatggagctgctggcctgggcggcgtgctgggcggggccggccagttccccctgggcggcgtggccgcccggcccggcttcggcctgagccccatcttccctgggggcgcctgcctgggcaaggcctgtggcaggaagaggaagtag

SEQ ID NO: 99554 - protein, 250 aa, Artificial Sequence
  derived and/or modified sequence
MGKAKVPASKRAPSSPVAKPGPVKTLTRKKNKKKKRFWKSKAREVSKKPASGPGAVVRPPKAPEDFSQNWKALQEVPRWTGGRQYLAPRPVEQSTIRKEPRKGQMVILFQNEGTSSIRSGKLRRQPQPHPPREELEVVQKEVAEMLKGRILVGHALHNDLKVLFLDHPKKKIRDTQKYKPFKSQVKSGRPSLRLLSEKILGLQVQQAEHCSIQDAQAAMRLYVMVKKEWESMARDRRPLLTAPDHCSDDA

SEQ ID NO: 99555 - protein, 233 aa, Artificial Sequence
  derived and/or modified sequence
MGKAKVPASKRAPSSPVAKPGPVKTLTRKKNKKKKRFWKSKAREVSKKPASGPGAVVRPPKAPEDFSQNWKALQEVPRWTGGRQYLAPRPVEQSTIRKEPRKGQMVILFQNEGTSSIRSGKLRRQPQPHPPREELEVVQKEVAEMLKGRILVGHALHNDLKVLFLDHPKKKIRDTQKYKPFKSQVKSGRPSLRLLSEKILGLQVQQAEHCSIQDAQAAMRLYVMVKKEWESMA

SEQ ID NO: 99556 - DNA, 753 bp, Artificial Sequence
  derived and/or modified sequence
atggggaaggcaaaggtgcctgcttctaaaagggcaccttcatccccagtggccaagcctggacccgtcaagaccttgacaagaaaaaaaaacaaaaaaaaaaaaaggttttggaaaagcaaggccagagaggtctccaagaaacctgcatccgggccaggcgccgtggttcggcctcctaaagcgccggaagatttctcccagaattggaaagccttgcaggaggtgcctcgctggaccggggggaggcagtaccttgctccacggcctgtggagcagagtacaattcgcaaagagcctcgtaagggtcagatggtgatcctcttccagaatgaaggtaccagctcaattcgctcaggaaaactgcgccggcaaccccaaccccaccctccacgggaagagctagaagtggtgcaaaaagaggtagctgaaatgttgaaggggcgcatccttgtcgggcacgctcttcacaacgaccttaaagtgctcttcctcgaccaccctaagaagaaaattagggatacccagaaatacaaaccttttaagtctcaagtgaaaagcggcaggccctcattgcggctgttatcggagaagattctaggtctgcaggttcagcaggccgagcactgctctatacaggatgctcaggctgcgatgcggctgtacgttatggtgaaaaaagagtgggagagcatggcacgggatcgcagaccacttctgacagccccagatcactgcagcgatgacgcgtag

SEQ ID NO: 99557 - DNA, 702 bp, Artificial Sequence
  derived and/or modified sequence
atggggaaggcaaaggttcctgccagtaaacgggccccctcaagtcccgttgctaagcccggaccagtaaaaaccctgacaaggaagaagaataaaaaaaagaaaaggttttggaagtctaaggcgcgagaagtgtccaagaagccggctagcgggcccggtgccgttgtgagacccccaaaggcccccgaggatttctcccaaaactggaaagctctccaggaggtcccccgatggacaggcggccgacagtacctggccccacgacctgtggaacaatccacaatcaggaaagaaccccggaagggccaaatggtaatcctgtttcagaacgaaggcacttcatctatccgctcgggaaaactcaggagacaaccccagcctcatccaccccgagaggagcttgaggtcgtccagaaggaggtggcagagatgctcaaaggaaggattctggttggacacgccctgcataacgatttgaaggtgttatttctcgaccacccaaaaaagaagatcagagatacacaaaagtataagccctttaaatcccaagtgaagagcgggcggccttctttgcgcctgttaagtgaaaagattctcggtctgcaggtgcaacaagccgagcactgcagcattcaggatgcacaggcggctatgcggctgtacgtcatggtgaaaaaggaatgggagtctatggcctag

SEQ ID NO: 99558 - DNA, 753 bp, Artificial Sequence
  derived and/or modified sequence
atgggcaaggccaaggtgcctgccagcaagagggcccccagcagccctgtggccaagccaggccctgtgaagaccctgaccaggaagaagaacaagaagaagaagcgcttctggaagagcaaggcccgggaggtgtccaagaagccagccagcggccctggagctgtggtgcggccccccaaggcccctgaggacttcagccagaactggaaggccctgcaggaggtgccccgctggacaggaggccggcagtacctggcccccaggcctgtggagcagagcaccatcaggaaggagcccaggaagggccagatggtgatcctcttccagaatgaaggcaccagcagcatccgcagcggcaagctgcggcggcagccccagccccaccccccccgggaggagctggaggtggtgcagaaggaggtggccgagatgctgaagggccgcatcctggtgggccacgccctgcacaatgacctgaaggtgctcttcctggaccaccccaagaagaagatccgggacacccagaagtacaagcccttcaagagccaggtgaagagcggccggcccagcctgcggctgctgtctgagaagatcctgggcctgcaggtgcagcaggccgagcactgcagcatccaggatgcccaggccgccatgaggctgtatgtgatggtgaagaaggagtgggagagcatggcccgggaccggcggcccctgctgacagccccagaccactgcagtgatgatgcctag

SEQ ID NO: 99559 - DNA, 702 bp, Artificial Sequence
  derived and/or modified sequence
atgggcaaggccaaggtgcctgccagcaagagggcccccagcagccctgtggccaagccaggccctgtgaagaccctgaccaggaagaagaacaagaagaagaagcgcttctggaagagcaaggcccgggaggtgtccaagaagccagccagcggccctggagctgtggtgcggccccccaaggcccctgaggacttcagccagaactggaaggccctgcaggaggtgccccgctggacaggaggccggcagtacctggcccccaggcctgtggagcagagcaccatcaggaaggagcccaggaagggccagatggtgatcctcttccagaatgaaggcaccagcagcatccgcagcggcaagctgcggcggcagccccagccccaccccccccgggaggagctggaggtggtgcagaaggaggtggccgagatgctgaagggccgcatcctggtgggccacgccctgcacaatgacctgaaggtgctcttcctggaccaccccaagaagaagatccgggacacccagaagtacaagcccttcaagagccaggtgaagagcggccggcccagcctgcggctgctgtctgagaagatcctgggcctgcaggtgcagcaggccgagcactgcagcatccaggatgcccaggccgccatgaggctgtatgtgatggtgaagaaggagtgggagagcatggcctag

SEQ ID NO: 99560 - DNA, 753 bp, Artificial Sequence
  derived and/or modified sequence
atgggcaaggccaaggtgcccgccagcaagcgggcccccagcagccctgtggccaagcccggtcccgttaaaaccctcactcggaaaaaaaacaagaagaaaaagcgcttttggaaatcaaaggctagggaagtaagcaagaaacccgcctcaggccccggggccgttgtgaggcctcctaaggcccccgaggactttagccagaattggaaggccctacaagaagtgccccggtggaccggcggcaggcagtaccttgctccaaggcccgtggaacagtctacgattcggaaggagcctcgcaagggccagatggtaattctgtttcagaatgagggcaccagctcaattcgcagtggcaagctcaggagacaacctcagccgcacccccctcgagaagagctcgaagtagtccagaaagaagtagctgaaatgttgaaggggcgaatcctggtgggacatgcattgcacaacgatcttaaagtactgttcttagaccacccaaagaagaaaattcgggatacccagaagtacaaaccattcaaatctcaggtgaaatctgggcgcccaagtttgaggctgctgagcgagaagattttgggactacaggtacaacaagcagaacattgctctatacaagatgcccaggcagcaatgagactctacgtgatggtcaagaaggagtgggaatctatggccagggaccgcaggcccctgctgaccgctcctgatcactgcagtgacgacgcttag

SEQ ID NO: 99561 - DNA, 702 bp, Artificial Sequence
  derived and/or modified sequence
atgggcaaggccaaggtgcccgccagcaagcgggcccccagcagccccgtagcgaaacctggccctgtcaagacattgactcggaaaaaaaataaaaaaaaaaagcgattctggaagtctaaggctagagaagtttctaaaaagcctgcctccggtcctggagccgttgtgagaccccctaaagcacccgaagattttagtcagaattggaaggcacttcaagaggttccacggtggacaggcggcagacaatatctggccccccgcccagtcgagcagtctacgattaggaaggagccacgcaaaggccagatggtgatcttattccagaacgagggaacaagctcaattcgcagcgggaagctgcgccgccagccccaaccccacccgccacgtgaggaactcgaagtggttcagaaggaagtcgccgagatgttaaagggacgcatactggtgggccacgccctgcacaatgacctcaaagttctcttcctcgaccatcccaaaaagaagattagggatacacaaaagtacaaaccattcaagagccaggttaagtcaggaaggccatctctgcgcctgctgagtgagaaaatcctcggactacaggtccagcaggctgagcactgctcgattcaggacgcccaggcagcgatgcggctgtacgtgatggtgaagaaggagtgggagtctatggcttag

SEQ ID NO: 99562 - DNA, 753 bp, Artificial Sequence
  derived and/or modified sequence
atgggaaaggctaaggtgcctgctagcaagagggcacctagctcgcccgtcgctaaaccgggaccagtcaaaacactgacacggaagaagaataagaagaagaagaggttctggaagtccaaggccagggaagtgagcaaaaagcccgcttcaggccctggcgctgttgtgagaccgccaaaggcccctgaggactttagccagaactggaaagccctccaggaagttccgcgatggaccgggggacggcagtacctcgcaccccgtccagtggagcaatctactatccgcaaagaacctcggaagggtcagatggtgatcctctttcaaaacgagggaacttcctcaataagatctggcaagctgcgacgtcagccacagcctcatccacctcgcgaggaactggaagtggtgcagaaggaagttgcagagatgttgaaaggacgaattctggttggtcatgccttacataatgacctcaaggtactgttcctggaccaccctaagaagaagattagagatacacagaaatacaagcccttcaaatctcaggtgaagagcggtcgcccttcactcaggctgctttccgaaaagatcttgggtctgcaggtgcagcaggccgagcactgctccatacaggatgcccaggctgccatgcggctctatgtgatggtgaagaaagaatgggaatctatggcaagggaccggagacctctccttaccgcgccagaccattgctctgatgatgcgtag

SEQ ID NO: 99563 - DNA, 702 bp, Artificial Sequence
  derived and/or modified sequence
atggggaaggccaaggtcccagcctccaagcgggctccttccagcccggtcgccaagccaggaccagtgaaaaccttgaccagaaagaaaaacaagaagaaaaagaggttttggaagagcaaagctcgcgaggtgagcaagaagccagcatccggccctggggctgtggtgcgccctcccaaggcaccagaagactttagtcagaattggaaggccctgcaggaggtccccaggtggaccggcggacgtcagtatctggccccacgtccggtggagcagtcgactatacgaaaggaacccaggaaggggcagatggttatactcttccagaacgaaggaacctccagtattaggtctgggaaactgcgaaggcagccacagccacatccccctagggaagagctggaggtcgtgcagaaggaggtggcggagatgctgaaggggagaatcttagtgggccacgccctgcacaatgaccttaaggtgttgttcctggaccatccaaagaaaaagattagagacactcagaaatacaaaccgttcaaaagccaggtcaaatcagggagaccttcgcttaggttactctctgaaaagatcctgggattgcaagtccagcaggccgaacactgctccatacaggatgctcaggccgcaatgaggctgtacgtgatggttaaaaaggaatgggagtccatggcctag

SEQ ID NO: 99564 - DNA, 1753 bp, Artificial Sequence
  derived and/or modified sequence
ggtgggtgtgtttcggcctggcctgggcaggcgcttgtgctgccagggcgccgggcccggggaggccggggtctcgggtggccgccggcccaggcgctggacggcagcaggatggggaaggcgaaggtccccgcctccaagcgcgccccgagcagccccgtggctaagccgggtcctgtcaagacgctcactcggaagaaaaacaagaagaaaaaaaggttttggaaaagcaaggcgcgggaagtaagcaagaagccagcaagcggccccggtgctgtggtgcgacctccaaaggcaccagaagacttttctcaaaactggaaggcgctgcaagaggttccaagatggacaggagggcgccagtacctcgcaccaaggccagtggaacagagcacaataagaaaggaaccaaggaaaggacaaatggtgatattgttccagaacgaggggacatcgagcataagaagcggaaagctaaggaggcagccccagccccacccaccgagagaagagcttgaagttgttcagaaggaagtggcagagatgctgaagggcagaattctagtggggcacgctctgcataatgacctaaaggtactatttcttgatcatccaaaaaagaagattcgggacacacagaaatataaacctttcaagagtcaagtaaagagtggaaggccgtctctgagactactttcagagaagatccttgggctccaggtccagcaggcggagcactgttcaattcaggatgcccaggcagcaatgaggctgtacgtcatggtgaagaaggagtgggagagcatggcccgagacaggcgccccctgctgactgctccagaccactgcagtgacgacgcctagcagtcctgccctgctgctgctgccgccccgctacagaggcaatgtgaccagtcacagggacagatcacatctccccagagtggcaactctggtgaaaccttttcagaatcatggcagaggggcgtggcgtggtgctactgagaaggtcctccttcctcttgactttgtggtctgaaacctggtcttactgtccatgtgtgtttgggcccggatggtcagggtggggagcagggacggccatgggcacgcctggccacgctttaccgactgctgaccccctgggccaggtgaggttggggcctgtgggccgccagtccatacggtgctgtcactgcccatcttcggtgacaccctggggtgaggtgctcagcaccttcctctcgaggagccacattttcctcctttgtgttaggggacataacaagctctgctgggcttgagggacccagaccaggtgtctgcagtcagctcctgagacacagctggccggcacaacaggtgttacatcaggggtttcctgtggccgtttgaactttgagcatttatctaaattaaattggcccagggttggctggtgggtcacccagcagaggcttctccccatagcacgaggatgtgttgcctgggcacggtgactgcggttattcctggaggtcggcagacatgccaaccttgggctatttgagctggagaagctatgtgatgctagccggtggctttctgggctaggccccagtttgaggctcccctgggaactagagccaggaacagccagtggcactgacaaggggacggagtccaaggcgttattgggccacctgacagctggacagaaaaggggcagacacaccgaggatgcgatttaaaataaatgcagatgtttacttgg

SEQ ID NO: 99565 - DNA, 833 bp, Artificial Sequence
  derived and/or modified sequence
ttttcctggacggggtccctgcggtgggtgtgtttcggcctggcctgggcaggcgcttgtgctgccagggcgccgggcccggggaggccggggtctcgggtggccgccggcccaggcgctggacggcagcaggatggggaaggcgaaggtccccgcctccaagcgcgccccgagcagccccgtggctaagccgggtcctgtcaagacgctcactcggaagaaaaacaagaagaaaaaaaggttttggaaaagcaaggcgcgggaagtaagcaagaagccagcaagcggccccggtgctgtggtgcgacctccaaaggcaccagaagacttttctcaaaactggaaggcgctgcaagaggttccaagatggacaggagggcgccagtacctcgcaccaaggccagtggaacagagcacaataagaaaggaaccaaggaaaggacaaatggtgatattgttccagaacgaggggacatcgagcataagaagcggaaagctaaggaggcagccccagccccacccaccgagagaagagcttgaagttgttcagaaggaagtggcagagatgctgaagggcagaattctagtggggcacgctctgcataatgacctaaaggtactatttcttgatcatccaaaaaagaagattcgggacacacagaaatataaacctttcaagagtcaagtaaagagtggaaggccgtctctgagactactttcagagaagatccttgggctccaggtccagcaggcggagcactgttcaattcaggatgcccaggcagcaatgaggctgtacgtcatggtgaagaaggagtgggagagcatggccc

SEQ ID NO: 99566 - DNA, 753 bp, Artificial Sequence
  derived and/or modified sequence
atgggcaaggccaaggtgcccgccagcaagagagcccccagcagccccgtggccaagcccggccccgtgaagaccctgaccagaaagaagaacaagaagaagaagagattctggaagagcaaggccagagaggtgagcaagaagcccgccagcggccccggcgccgtggtgagaccccccaaggcccccgaggacttcagccagaactggaaggccctgcaggaggtgcccagatggaccggcggcagacagtacctggcccccagacccgtggagcagagcaccatcagaaaggagcccagaaagggccagatggtgatcctgttccagaacgagggcaccagcagcatcagaagcggcaagctgagaagacagccccagccccacccccccagagaggagctggaggtggtgcagaaggaggtggccgagatgctgaagggcagaatcctggtgggccacgccctgcacaacgacctgaaggtgctgttcctggaccaccccaagaagaagatcagagacacccagaagtacaagcccttcaagagccaggtgaagagcggcagacccagcctgagactgctgagcgagaagatcctgggcctgcaggtgcagcaggccgagcactgcagcatccaggacgcccaggccgccatgagactgtacgtgatggtgaagaaggagtgggagagcatggccagagacagaagacccctgctgaccgcccccgaccactgcagcgacgacgcctag

SEQ ID NO: 99567 - DNA, 702 bp, Artificial Sequence
  derived and/or modified sequence
atgggcaaggccaaggtgcccgccagcaagagagcccccagcagccccgtggccaagcccggccccgtgaagaccctgaccagaaagaagaacaagaagaagaagagattctggaagagcaaggccagagaggtgagcaagaagcccgccagcggccccggcgccgtggtgagaccccccaaggcccccgaggacttcagccagaactggaaggccctgcaggaggtgcccagatggaccggcggcagacagtacctggcccccagacccgtggagcagagcaccatcagaaaggagcccagaaagggccagatggtgatcctgttccagaacgagggcaccagcagcatcagaagcggcaagctgagaagacagccccagccccacccccccagagaggagctggaggtggtgcagaaggaggtggccgagatgctgaagggcagaatcctggtgggccacgccctgcacaacgacctgaaggtgctgttcctggaccaccccaagaagaagatcagagacacccagaagtacaagcccttcaagagccaggtgaagagcggcagacccagcctgagactgctgagcgagaagatcctgggcctgcaggtgcagcaggccgagcactgcagcatccaggacgcccaggccgccatgagactgtacgtgatggtgaagaaggagtgggagagcatggcctag

SEQ ID NO: 99568 - DNA, 570 bp, Artificial Sequence
  derived and/or modified sequence
atgggctccaagaagaagcctaagataattcagcagaataaaaaggaaacctctccgcaggtgaaaggcgaggagatgcccgccgggaaggaccaagaagccagccggggctccgtgccctcaggtagcaagatggatcggagggcccccgtccctagaacaaaggccagtgggacagagcacaacaaaaagggcactaaagaaagaactaatggcgatatcgtgccagaaagaggcgatattgagcacaagaagcggaaagcaaaggaggccgcacctgcaccacccacagaggaggacatatggtttgacgacgtcgaccccgccgacatcgaagccgcaattggccctgaagctgctaagatcgccaggaaacagctgggtcagagtgagggttccgtcagtctgagtttggtgaaagaacaggcattcggcggtttgacccgtgcactcgcactggactgcgagatggtcggggtgggaccaaagggcgaagaatcaatggccgctcgcgtgtcaatcgttaatcagtacggcaagtgcgtatacgacaagtacgtcaagccttag

SEQ ID NO: 99569 - DNA, 570 bp, Artificial Sequence
  derived and/or modified sequence
atgggcagcaagaagaagcccaagatcatccagcagaacaagaaggagaccagcccccaggtgaagggggaggagatgcctgctgggaaggaccaggaggccagccggggctctgtgcccagcggcagcaagatggacagaagagcccctgtgcccaggaccaaggccagcggcacagagcacaacaagaagggcaccaaggagaggaccaatggagacatcgtgcctgagcggggggacatcgagcacaagaagaggaaggccaaggaggccgccccagccccacccacagaggaggacatctggtttgatgatgtggaccctgctgacattgaagctgccatcggccctgaggccgccaagatcgccaggaagcagctgggccagagcgagggctctgtgtccctgagcctggtgaaggagcaggccttcggcggcctgacccgggccctggccctggactgtgagatggtgggcgtgggccccaagggggaggagagcatggccgcccgggtgtccatcgtgaaccagtatggaaaatgtgtgtatgacaagtatgtgaagccctag

SEQ ID NO: 99570 - DNA, 570 bp, Artificial Sequence
  derived and/or modified sequence
atgggcagcaagaagaagcccaagatcatccagcagaacaagaaggagacaagcccacaggtcaagggagaagagatgcctgctggaaaggaccaagaagccagtcggggctcagttccttctggatcaaaaatggacagaagggcccccgtgcccaggaccaaggcctcaggtactgagcacaataaaaaaggcacaaaagaacggactaacggggacatcgtgcccgagcgtggcgatatcgagcataagaagagaaaggctaaggaggccgcgccggctccacccactgaagaggacatctggtttgacgacgtggacccagctgacattgaagccgccattggaccggaggccgctaagatcgctagaaaacaactggggcagtctgaagggtcagtgagcctgtccctggtcaaagagcaggctttcggcggcctaacgcgggcgctggccttggactgcgagatggtgggggtgggccctaagggcgaagagagcatggctgcccgagtgtcgattgtgaatcagtatggcaagtgcgtgtatgacaagtacgtcaagccctag

SEQ ID NO: 99571 - DNA, 570 bp, Artificial Sequence
  derived and/or modified sequence
atgggctcaaagaagaagcccaagatcattcagcagaataagaaggaaaccagtccccaggtgaagggcgaggagatgccagccggaaaggaccaggaagctagtcggggatccgtgccaagtggctcgaaaatggatagacgcgcacctgtccccaggaccaaggctagtggcactgaacacaacaagaagggaacaaaggagcgcacgaacggagacatcgtgcccgagcgcggagacatcgagcataagaagcgaaaagctaaagaagccgctcccgctccccctacagaggaagatatctggtttgacgatgttgacccagccgatattgaggccgctataggcccagaggctgctaaaattgctcgcaagcagctgggacaaagtgaggggtcagtctcgctgagcctggtcaaggagcaagcctttgggggtctgactagagccctggcgctggactgtgaaatggtgggtgtgggcccaaagggggaagagagcatggccgcacgggtcagcatcgtgaatcaatacggtaagtgtgtctacgataagtacgtgaaaccttag

SEQ ID NO: 99572 - DNA, 570 bp, Artificial Sequence
  derived and/or modified sequence
atgggcagcaagaagaagcccaagatcatccagcagaacaagaaggagaccagcccccaggtgaagggcgaggagatgcccgccggcaaggaccaggaggccagcagaggcagcgtgcccagcggcagcaagatggacagaagagcccccgtgcccagaaccaaggccagcggcaccgagcacaacaagaagggcaccaaggagagaaccaacggcgacatcgtgcccgagagaggcgacatcgagcacaagaagagaaaggccaaggaggccgcccccgccccccccaccgaggaggacatctggttcgacgacgtggaccccgccgacatcgaggccgccatcggccccgaggccgccaagatcgccagaaagcagctgggccagagcgagggcagcgtgagcctgagcctggtgaaggagcaggccttcggcggcctgaccagagccctggccctggactgcgagatggtgggcgtgggccccaagggcgaggagagcatggccgccagagtgagcatcgtgaaccagtacggcaagtgcgtgtacgacaagtacgtgaagccctag

SEQ ID NO: 99573 - protein, 214 aa, Artificial Sequence
  derived and/or modified sequence
MCGNNMSTPLPAIVPAARKATAAVIFLHGLGDTGHGWAEAFAGIRSSHIKYICPHAFDIIGLSPDSQEDESGIKQAAENIKALIDQEVKNGIPSNRIILGGFSQGGALSLYTALTTQQKLAGVTALSCWLPLRASFPQGPIGGANRDISILQCHGDCDPLVPLMFGSLTVEKLKTLVNPANVTFKTYEGMMHSSCQQEMMDVKQFIDKLLPPID

SEQ ID NO: 99574 - DNA, 645 bp, Artificial Sequence
  derived and/or modified sequence
atgtgtggaaacaacatgtccactccacttccagcaattgtacctgcggctcggaaagccactgccgccgtcatctttttgcatggactaggggacacaggccatggatgggccgaggcattcgccggaattagatcatctcacattaagtacatctgtcctcacgcctttgatataatcgggctctctcctgattctcaggaagacgagagcggcattaagcaggctgcggagaatattaaagctttgattgatcaagaggtgaaaaacggcatcccttctaaccggatcatcttgggcggattctctcaagggggtgccctgagcctgtacaccgcactgacaacacagcaaaaactcgcgggcgtcaccgcactgagctgctggctgccactccgggcgtcctttccacagggaccaattggcggggccaatagggacatctcaatcttgcagtgccacggcgactgcgacccactggttccactcatgttcggatctctcactgtggagaaattaaagactttggtcaatcctgcaaatgtgaccttcaagacctacgagggcatgatgcatagcagctgtcaacaggaaatgatggatgtgaagcagtttattgacaagcttctgccgcccatagactag

SEQ ID NO: 99575 - DNA, 645 bp, Artificial Sequence
  derived and/or modified sequence
atgtgtggcaacaacatgagcacccccctgcctgccatcgtgcctgctgccaggaaggccacagctgctgtgatcttcctgcacggcctgggggacaccggccacggctgggccgaggcctttgctggcatccgcagcagccacatcaagtacatctgcccccacgcctttgacatcatcggcctgagcccagacagccaggaggatgaaagtggcatcaagcaggccgctgagaacatcaaggccctgattgaccaggaggtgaagaatggcatccccagcaaccgcatcatcctgggcggcttcagccagggcggggccctgagcctgtacacagccctgaccacccagcagaagctggccggcgtgacagccctgagctgctggctgcccctgcgggccagcttcccccagggccccatcggcggggccaacagagacatcagcatcctgcagtgccacggggactgtgaccccctggtgcccctgatgtttggcagcctgactgtggagaagctgaagaccctggtgaacccagccaacgtgaccttcaagacctatgagggcatgatgcacagcagctgccagcaggagatgatggatgtgaagcagttcatcgacaagctgctgccccccattgattag

SEQ ID NO: 99576 - DNA, 1308 bp, Artificial Sequence
  derived and/or modified sequence
ggtgtatgtgcggcaataacatgtcaaccccgctgcccgccatcgtgcccgccgcccggaaggccaccgctgcggtgattttcctgcatggattgggagatactgggcacggatgggcagaagcctttgcaggtatcagaagttcacatatcaaatatatctgcccgcatgcgtttgatattattgggctttcaccagattcacaggaggatgaatctgggattaaacaggcagcagaaaatataaaagctttgattgatcaagaagtgaagaatggcattccttctaacagaattattttgggagggttttctcagggaggagctttatctttatatactgcccttaccacacagcagaaactggcaggtgtcactgcactcagttgctggcttccacttcgggcttcctttccacagggtcctatcggtggtgctaatagagatatttctattctccagtgccacggggattgtgaccctttggttcccctgatgtttggttctcttacggtggaaaaactaaaaacattggtgaatccagccaatgtgacctttaaaacctatgaaggtatgatgcacagttcgtgtcaacaggaaatgatggatgtcaagcaattcattgataaactcctacctccaattgattgacgtcactaagaggccttgtgtagaagtacaccagcatcattgtagtagagtgtaaaccttttcccatgcccagtcttcaaatttctaatgttttgcagtgttaaaatgttttgcaaatacatgccaataacacagatcaaataatatctcctcatgagaaatttatgatcttttaagtttctatacatgtattcttataagacgacccaggatctactatattagaatagatgaagcaggtagcttcttttttctcaaatgtaattcagcaaaataatacagtactgccaccagattttttattacatcatttgaaaattagcagtatgcttaatgaaaatttgttcaggtataaatgagcagttaagatataaacaatttatgcatgctgtgacttagtctatggatttattccaaaattgcttagtcaccatgcagtgtctgtatttttatatatgtgttcatatatacataatgattataatacataataagaatgaggtggtattacattattcctaataatagggataatgctgtttattgtcaagaaaaagtaaaatcgttctcttcaattaatggcccttttattttgggaccaggcttttattttccctgatattatttctatttaatactcttttctctcaagaaaaaa

SEQ ID NO: 99577 - DNA, 645 bp, Artificial Sequence
  derived and/or modified sequence
atgtgcggcaacaacatgagcacccccctgcccgccatcgtgcccgctgctcggaaggcaaccgccgctgtcatctttctgcacggcctcggagatacaggccatgggtgggccgaagcatttgcagggattcgcagctcacatataaagtacatttgcccccatgcctttgatattatcgggctctctcctgactcccaagaggacgagtctgggatcaagcaagctgccgaaaacattaaggcgctcattgaccaggaggtgaagaacgggatcccctctaaccgcatcattctcgggggatttagccaaggtggggcgctgagcttgtacacggcacttacaactcagcagaaactcgccggcgttacggccttgtcttgttggctgccacttagagcaagttttccccagggtcccattggaggcgccaatagagacatctcaatcctgcagtgccatggtgactgtgacccattggttccactcatgttcgggagtctgaccgtggagaaacttaagaccctggtgaaccctgctaatgtgacattcaaaacatatgagggaatgatgcactcatcatgccagcaggagatgatggacgtcaagcagttcatcgacaaactcctgccacccatcgactag

SEQ ID NO: 99578 - DNA, 645 bp, Artificial Sequence
  derived and/or modified sequence
atgtgcgggaacaatatgtctacaccactgcctgcaatcgttcccgcagcacgcaaggccactgccgcagtgattttcctgcatggcttgggcgacaccgggcacggatgggctgaggccttcgcaggaattagaagctcgcacataaagtatatctgtcctcacgccttcgatatcatcgggctcagcccagattcccaggaggacgagagcggaataaaacaggctgcggaaaacattaaagccctgatcgatcaggaagtgaaaaacggaatcccttctaaccgcattatcctgggaggcttcagtcagggcggagccttgagcctctacaccgcgctgactactcaacagaagctggccggtgtgacagctctgagctgttggctaccgctcagagcctcgtttccgcagggccctatcggtggggctaatcgagatatctcaatccttcagtgtcacggcgattgtgaccccctggtcccccttatgtttggatctctcactgtcgaaaagctcaagacactagtaaaccccgcaaacgtcactttcaaaacgtacgagggcatgatgcattcctcttgtcagcaggagatgatggacgtcaagcagtttatagacaaattgcttcctccgatcgactag

SEQ ID NO: 99579 - DNA, 645 bp, Artificial Sequence
  derived and/or modified sequence
atgtgcggcaacaacatgagcacccccctgcccgccatcgtgcccgccgccagaaaggccaccgccgccgtgatcttcctgcacggcctgggcgacaccggccacggctgggccgaggccttcgccggcatcagaagcagccacatcaagtacatctgcccccacgccttcgacatcatcggcctgagccccgacagccaggaggacgagagcggcatcaagcaggccgccgagaacatcaaggccctgatcgaccaggaggtgaagaacggcatccccagcaacagaatcatcctgggcggcttcagccagggcggcgccctgagcctgtacaccgccctgaccacccagcagaagctggccggcgtgaccgccctgagctgctggctgcccctgagagccagcttcccccagggccccatcggcggcgccaacagagacatcagcatcctgcagtgccacggcgactgcgaccccctggtgcccctgatgttcggcagcctgaccgtggagaagctgaagaccctggtgaaccccgccaacgtgaccttcaagacctacgagggcatgatgcacagcagctgccagcaggagatgatggacgtgaagcagttcatcgacaagctgctgccccccatcgactag

SEQ ID NO: 99580 - protein, 377 aa, Artificial Sequence
  derived and/or modified sequence
SSIIQNRLKKLGDQFYKEAIEHCRSYNSRLCAERSVRLPFLDSQTGVAQNNCYIWMEKRHRGPGLAPGQLYTYPARCWRKKRRLHPPEDPKLRLLEIKPEVELPLKKDGFTSESTTLEALLRGEGVEKKVDAREEESIQEIQRVLENDENVEEGNEEEDLEEDIPKRKNRTRGRARGSAGGRRRHDAASQEDHDKPYVCDICGKRYKNRPGLSYHYAHTHLASEEGDEAQDQETRSPPNHRNENHRPQKGPDGTVIPNNYCDFCLGGSNMNKKSGRPEELVSCADCGRSGHPTCLQFTLNMTEAVKTYKWQCIECKSCILCGTSENDDQLLFCDDCDRGYHMYCLNPPVAEPPEGSWSCHLCWELLKEKASAFGCQA

SEQ ID NO: 99581 - protein, 378 aa, Artificial Sequence
  derived and/or modified sequence
MATVIHNPLKALGDQFYKEAIEHCRSYNSRLCAERSVRLPFLDSQTGVAQNNCYIWMEKRHRGPGLAPGQLYTYPARCWRKKRRLHPPEDPKLRLLEIKPEVELPLKKDGFTSESTTLEALLRGEGVEKKVDAREEESIQEIQRVLENDENVEEGNEEEDLEEDIPKRKNRTRGRARGSAGGRRRHDAASQEDHDKPYVCDICGKRYKNRPGLSYHYAHTHLASEEGDEAQDQETRSPPNHRNENHRPQKGPDGTVIPNNYCDFCLGGSNMNKKSGRPEELVSCADCGRSGHPTCLQFTLNMTEAVKTYKWQCIECKSCILCGTSENDDQLLFCDDCDRGYHMYCLNPPVAEPPEGSWSCHLCWELLKEKASAFGCQA

SEQ ID NO: 99582 - DNA, 1134 bp, Artificial Sequence
  derived and/or modified sequence
tctagtatcatccaaaatagactgaagaagctgggcgatcaattttacaaggaggccattgagcactgtaggagctataattcgcgactgtgtgccgagagatccgtgcggctgcccttcttggactctcaaacgggcgtcgcccagaataattgctacatctggatggagaaaagacatagaggcccagggctcgccccaggacaactttacacctaccccgctaggtgttggcgaaagaagaggagactccacccccccgaagatccaaaattacgcttgctcgaaatcaaaccggaagtcgagctcccacttaagaaggacggtttcacatctgaaagcactaccttagaggctcttctccgcggagagggggtggagaagaaagtggatgccagagaagaagagtcgattcaggagattcaaagggtcctcgagaacgacgaaaacgtggaagagggcaacgaagaggaagacttggaggaggacatcccgaagaggaagaataggacccgaggtagggcccggggatcagccggaggccggcgcagacacgacgctgcgtcgcaggaagatcacgacaagccctatgtatgcgacatctgcgggaaaagatacaagaataggccagggttgtcctatcactatgcccacacccacttggcatctgaagagggagacgaggcccaagaccaggagacacgctccccccctaatcacagaaacgaaaatcataggccccaaaagggccctgacgggactgtgatccccaacaactattgcgacttctgcttgggggggtcaaacatgaacaagaaaagtggcaggcccgaagaactggtgagttgtgctgattgcggaaggagcggccaccccacatgcctgcagtttactctgaacatgacggaggcggtgaaaacatacaaatggcagtgcatcgagtgcaagagctgtattctgtgtggaacctccgagaatgacgatcagcttctgttctgtgacgactgcgaccgcggctatcacatgtattgtttaaaccctccggttgccgagcccccagagggttcctggtcatgtcacctgtgttgggaactgctgaaagaaaaggcctccgcattcggttgccaggcatag

SEQ ID NO: 99583 - DNA, 1137 bp, Artificial Sequence
  derived and/or modified sequence
atggctacagtaattcataatcccctgaaggcccttggcgatcagttctataaggaggccatcgaacactgtcgctcctataacagcagactatgcgctgagcgaagcgtgcgcctccctttcctggactctcagacaggcgtcgcacaaaataattgttacatttggatggaaaaacgccatcgaggcccaggtctggcccctggtcagctctacacataccccgctaggtgctggagaaagaagcgacgattacacccccctgaggatcctaaactgcgtctcctggaaatcaaaccagaagtggaactcccactgaagaaagatggctttacctctgagtcaaccactttagaagccctgctgcgaggggagggggtagaaaaaaaagtcgacgccagagaagaggaatctattcaggagattcagagagtactggagaatgacgagaatgttgaagaaggcaatgaagaggaagacctcgaggaagacataccaaagagaaaaaatcgaacccgaggaagggcaagggggagtgctggcgggcgccgcaggcatgatgcggcatcccaagaggatcatgataagccttatgtctgcgacatttgtgggaagagatacaaaaacaggcctgggctgtcctaccattacgcccatacccatctggcctccgaggagggcgatgaagcccaggatcaggaaacgcgtagccccccaaaccacagaaatgagaaccataggcctcagaagggtcctgacggcaccgttatccccaacaactactgcgatttttgcctgggcgggtcaaacatgaataaaaagtcaggacgacctgaagaattggtcagctgtgcagactgtggacgatctggacaccccacttgtctccagttcacactgaatatgaccgaggcggtgaagacctataagtggcagtgtattgagtgcaagtcgtgtatcctttgtggcacctctgagaacgatgaccaacttctcttctgtgacgattgcgatcgggggtaccacatgtactgtcttaaccccccagtggctgaaccacctgaggggagctggtcctgccacttgtgctgggagctgctgaaagagaaggcgagtgcattcggctgccaggcctag

SEQ ID NO: 99584 - DNA, 1134 bp, Artificial Sequence
  derived and/or modified sequence
agcagcatcatccagaaccggctgaagaagctgggggaccagttctacaaggaggccatcgagcactgccgcagctacaacagccggctgtgtgccgagaggtctgtgcggctgcccttcctggacagccagacaggagtggcccagaacaactgctacatctggatggagaagaggcaccggggccctggcctggcccctggccagctgtacacctacccagcccgctgctggaggaagaagaggcggctgcaccccccagaggaccccaagctgcggctgctggagatcaagccagaggtggagctgcccctgaagaaggatggcttcaccagcgagagcaccaccctggaggccctgctgcggggggagggcgtggagaagaaggtggatgcccgggaggaggagagcatccaggagatccagagggtgctggagaatgatgaaaatgtggaggagggcaatgaggaggaggacctggaggaggacatccccaagaggaagaacagaacccggggccgggcccggggcagcgctgggggcagaagaagacatgatgctgccagccaggaggaccatgacaagccctacgtgtgtgacatctgtgggaagcgctacaagaaccggcccggcctgagctaccactacgcccacacccacctggccagcgaggagggagatgaggcccaggaccaggagaccaggagcccccccaaccacagaaatgaaaaccaccggccccagaagggcccagatggcaccgtcatccccaacaactactgtgacttctgcctgggcggcagcaacatgaacaagaagagcggccggcctgaggagctggtgtcctgtgccgactgtggccgcagcggccaccccacctgcctgcagttcaccctgaacatgacagaggccgtgaagacctacaagtggcagtgcatcgagtgcaagagctgcatcctgtgtggcaccagtgaaaatgatgaccagctgctcttctgtgatgactgtgaccggggctaccacatgtactgcctgaacccccctgtggccgagcccccagagggctcctggagctgccacctgtgctgggagctgctgaaggagaaggccagcgccttcggctgccaggcctag

SEQ ID NO: 99585 - DNA, 1137 bp, Artificial Sequence
  derived and/or modified sequence
atggccaccgtcatccacaaccccctgaaggccctgggggaccagttctacaaggaggccatcgagcactgccgcagctacaacagccggctgtgtgccgagaggtctgtgcggctgcccttcctggacagccagacaggagtggcccagaacaactgctacatctggatggagaagaggcaccggggccctggcctggcccctggccagctgtacacctacccagcccgctgctggaggaagaagaggcggctgcaccccccagaggaccccaagctgcggctgctggagatcaagccagaggtggagctgcccctgaagaaggatggcttcaccagcgagagcaccaccctggaggccctgctgcggggggagggcgtggagaagaaggtggatgcccgggaggaggagagcatccaggagatccagagggtgctggagaatgatgaaaatgtggaggagggcaatgaggaggaggacctggaggaggacatccccaagaggaagaacagaacccggggccgggcccggggcagcgctgggggcagaagaagacatgatgctgccagccaggaggaccatgacaagccctacgtgtgtgacatctgtgggaagcgctacaagaacagacctggcctgagctaccactacgcccacacccacctggccagcgaggagggagatgaggcccaggaccaggagaccaggagcccccccaaccacagaaatgaaaaccaccggccccagaagggcccagatggcaccgtcatccccaacaactactgtgacttctgcctgggcggcagcaacatgaacaagaagagcggccggcctgaggagctggtgtcctgtgccgactgtggccgcagcggccaccccacctgcctgcagttcaccctgaacatgacagaagctgtgaagacctacaagtggcagtgcatcgagtgcaagagctgcatcctgtgtggcaccagtgaaaatgatgaccagctgctcttctgtgatgactgtgaccggggctaccacatgtactgcctgaacccccctgtggccgagcccccagagggctcctggagctgccacctgtgctgggagctgctgaaggagaaggccagcgccttcggctgccaggcctag

SEQ ID NO: 99586 - DNA, 1134 bp, Artificial Sequence
  derived and/or modified sequence
agcagcatcatccagaaccggctgaagaagctgggcgaccagttctacaaggaagcaatcgagcactgcagaagctataactcgcgcctgtgtgcggagcgctccgttcggttaccgtttctggactcccagaccggtgttgcccagaataactgttatatctggatggagaaaaggcaccgggggcccggcttagcccctggtcagctctacacgtatcctgcgcgctgctggcgcaagaagagacgtctgcaccctcccgaagatcccaagctgcgcctgttagagataaagcccgaggtcgaactgccactgaagaaagatggcttcacatcagagagcaccactcttgaagctttgcttagaggagagggggtggagaaaaaggtcgacgcccgggaggaagaatccatccaagagattcagagagtcctcgagaatgacgaaaacgtggaggaaggcaatgaggaggaggacctggaagaagacattcccaagaggaaaaaccggacgagaggacgggctcgcggaagcgccggtggccgcaggcgccacgacgcggcctctcaggaagatcatgacaagccatacgtgtgcgacatttgtggtaagaggtacaaaaacaggccgggactgtcttatcactacgcccacacgcacctcgcctcagaagagggtgatgaggcccaagatcaagaaaccagatccccaccgaatcaccgcaatgagaaccacaggccgcaaaaaggaccggacgggacagttatacccaataactactgcgatttctgcctgggtggctccaatatgaataaaaaatcaggaaggcccgaagagctggtgagctgtgctgattgcgggaggagcggacaccctacatgtctgcaatttaccctgaacatgactgaggccgtcaagacatacaaatggcagtgcattgaatgcaaatcctgtatcctctgcggaaccagtgagaatgatgatcaactgttgttttgcgatgattgcgatcggggttaccacatgtattgtcttaacccgccagtcgctgaacctccggaggggtcctggtcgtgtcacctttgttgggaactgctgaaagagaaagcttcggcatttggatgtcaagcttag

SEQ ID NO: 99587 - DNA, 1137 bp, Artificial Sequence
  derived and/or modified sequence
atggccaccgtgatccacaaccccctgaaggccctgggcgaccagttctacaaagaggctattgagcactgtcgctcttataatagccgtctttgcgctgagcgaagcgtgagactgcctttccttgattcgcagacgggcgtggcacaaaataattgttatatctggatggaaaaaaggcaccgaggccctggactggcccccgggcagctgtatacgtaccctgcacgctgttggcgtaaaaagcgccggctgcaccctcccgaggacccgaagttaagacttctggaaattaaacccgaagtagaactccccctaaaaaaggacgggttcacaagcgaaagtaccactctagaagcccttctgcgaggagagggagtggaaaagaaggtagatgcacgagaggaggaaagtatccaagagatccaacgggtactcgaaaacgacgagaatgtcgaggagggtaatgaggaggaagacctggaagaggacatacctaagcgcaaaaacaggaccagaggccgggcacgggggtccgccggaggtcgccggcgccacgatgctgcctctcaggaagaccatgataagccatatgtgtgtgatatctgcggtaagcggtataagaatcgacctggtctgtcataccactacgctcacactcacctggcctctgaggaaggtgacgaagcccaggatcaagagacacggagtcctccaaatcaccgtaacgagaaccacagaccccaaaagggccccgatggaacagtgatcccaaacaactattgtgacttttgcctgggcggttccaatatgaacaagaagtcagggcggccagaagaacttgtgagctgcgctgactgcggacgcagtggccatcccacctgtctgcagtttaccttgaacatgaccgaggcagttaaaacttataaatggcagtgcattgaatgcaagtcatgtattttgtgtggtacatcggagaacgacgatcagctactgttttgtgacgattgcgatagagggtaccacatgtattgtctgaacccgcctgttgccgaaccgccagagggctcttggagctgtcacctgtgctgggaacttctgaaggaaaaagcctccgcattcgggtgccaggcgtag

SEQ ID NO: 99588 - DNA, 1134 bp, Artificial Sequence
  derived and/or modified sequence
tcatctattattcagaaccggctcaaaaagctcggagaccagttctataaagaggcgatcgagcactgccgctcttacaatagtagactgtgtgctgaaagatcagtgagactgcctttcttggattcacagactggggtggctcagaacaactgctacatctggatggaaaaacgccatcgtggcccagggctcgcacccggacagttatacacttaccccgctagatgttggcggaaaaaacggaggttgcacccgccagaggacccaaagctacgcctactggagatcaagccggaggtcgaacttccattaaaaaaggacggttttacttccgaatcaaccacattggaagccctgctacgaggggaaggggtggagaagaaggtcgatgccagagaagaagaatccatccaggagatccaacgcgttctcgaaaatgatgaaaacgtggaagaaggaaacgaggaagaagatctagaggaagacattccaaaacggaagaacagaacacgcggtcgcgctcgcggttccgccggaggtaggcggagacatgatgcagctagccaagaggaccacgacaaaccctatgtgtgtgacatttgcggaaagaggtacaaaaacaggcccggactgagctaccactatgcccacacccacttagcttccgaggagggagatgaggcgcaagaccaggaaactcggagccccccaaaccaccgaaacgaaaatcatagacctcagaaaggtcctgatggaacggttatacccaataattactgcgatttttgcctgggcggttctaatatgaacaaaaaatcaggccgtcccgaggaactggtctcttgtgccgactgtggccgtagcggccaccctacttgtcttcaattcaccttgaacatgactgaagcagtcaaaacctacaagtggcaatgcattgaatgtaagtcttgtatcctgtgtggcacttctgagaatgacgatcagctgctcttttgcgacgattgcgacagaggataccacatgtactgtctaaatcctcccgtggctgagccacctgagggatcttggtcatgtcatctctgttgggaactgttgaaagagaaggcgtccgcgtttgggtgccaggcttag

SEQ ID NO: 99589 - DNA, 1137 bp, Artificial Sequence
  derived and/or modified sequence
atggcaactgtcattcataacccccttaaggccctgggggatcaattttacaaagaggccattgagcactgtcgatcgtacaatagtcgcctttgcgccgaacggtccgtgcgtctgccatttctggactctcagacaggagtggcccagaataattgctatatctggatggagaaaagacacagagggcctggacttgccccaggccagctgtatacgtaccctgcccgatgttggcggaagaaaaggcgccttcatcctcctgaggaccccaaattgagactcctggagatcaagccggaggtagagcttccactgaaaaaggacgggtttacatccgagtcaacaaccctagaagcattgttacggggtgaaggggtagaaaagaaggtagatgcaagagaggaggagtctattcaggagatccagagagtcctcgaaaacgacgaaaacgtggaagagggaaacgaagaggaggacctggaggaggatattcctaagagaaagaaccggacacgagggcgagcaaggggtagtgcgggaggacgcaggagacacgacgccgcaagccaggaggaccatgacaaaccctatgtgtgtgacatttgcgggaagaggtataaaaatcggccaggactctcgtaccactacgctcatacccacctggcctccgaagagggggatgaggctcaagaccaggagactagatctccaccaaatcacaggaacgaaaaccatagaccacaaaagggaccggacggaaccgtgatcccaaataactattgtgacttttgtttgggtgggagtaacatgaacaagaagagtgggcgaccagaggaactcgtgtcatgtgctgactgcggtcggtctggccaccccacctgcctgcagtttaccctcaatatgaccgaagctgttaagacctacaaatggcagtgtattgaatgcaaatcgtgtattctttgcggcacatctgaaaacgacgaccagttattattttgtgatgactgtgatcgagggtatcacatgtactgcctaaatccccctgtcgcagagccaccagagggcagttggagctgccatctgtgctgggagctgctcaaagagaaagcctctgcttttggatgtcaggcctag

SEQ ID NO: 99590 - DNA, 1135 bp, Artificial Sequence
  derived and/or modified sequence
agcagcattattcagaatagacttaaaaagctcggggaccagttctacaaggaagccattgagcactgccggagttacaactcacggctgtgtgcagagcgcagcgtgcgtcttcccttcctggactcacagactggggtggcccagaacaactgctacatctggatggagaagaggcaccgaggcccaggccttgccccgggccagctgtatacataccctgcccgctgctggcgcaagaagagacgattgcacccacctgaagatccaaaactgcggctgctggagataaaacctgaagtggagcttcccctgaagaaggatgggttcacctcagagagcaccacgctggaagccttgctccgtggcgagggggttgagaagaaggtggatgccagggaggaggaaagcatccaggaaatacagagggttttggaaaatgatgaaaatgtagaagaagggaatgaagaagaggatttggaagaggatattcccaagcgaaagaacaggactagaggacgggctcgcggctctgcagggggcaggaggaggcacgacgccgcctctcaggaagaccacgacaaaccttacgtctgtgacatctgtggcaagcgctacaagaaccgaccggggctcagctaccactatgctcacactcacctggccagcgaggagggggatgaagctcaagaccaggagactcggtccccacccaaccacagaaatgagaaccacaggccccagaaaggaccggatggaacagtcattcccaataactactgtgacttctgcttggggggctccaacatgaacaagaagagtgggcggcctgaagagctggtgtcctgcgcagactgtggacgctctggtcacccaacctgcctgcagtttaccctgaacatgaccgaggctgtcaagacctacaagtggcagtgcatagagtgcaaatcctgtatcctctgtgggacctcagagaatgatgaccagctactcttctgcgatgactgtgaccgaggctatcacatgtactgtttaaatcccccggtggctgagcccccagaaggaagctggagctgccacttatgctgggaactgctcaaagagaaagcctcagcctttggctgccaggcctagg

SEQ ID NO: 99591 - DNA, 1138 bp, Artificial Sequence
  derived and/or modified sequence
atggcgactgtcattcacaaccccctgaaagcgctcggggaccagttctacaaggaagccattgagcactgccggagttacaactcacggctgtgtgcagagcgcagcgtgcgtcttcccttcctggactcacagactggggtggcccagaacaactgctacatctggatggagaagaggcaccgaggcccaggccttgccccgggccagctgtatacataccctgcccgctgctggcgcaagaagagacgattgcacccacctgaagatccaaaactgcggctgctggagataaaacctgaagtggagcttcccctgaagaaggatgggttcacctcagagagcaccacgctggaagccttgctccgtggcgagggggttgagaagaaggtggatgccagggaggaggaaagcatccaggaaatacagagggttttggaaaatgatgaaaatgtagaagaagggaatgaagaagaggatttggaagaggatattcccaagcgaaagaacaggactagaggacgggctcgcggctctgcagggggcaggaggaggcacgacgccgcctctcaggaagaccacgacaaaccttacgtctgtgacatctgtggcaagcgctacaagaaccgaccggggctcagctaccactatgctcacactcacctggccagcgaggagggggatgaagctcaagaccaggagactcggtccccacccaaccacagaaatgagaaccacaggccccagaaaggaccggatggaacagtcattcccaataactactgtgacttctgcttggggggctccaacatgaacaagaagagtgggcggcctgaagagctggtgtcctgcgcagactgtggacgctctggtcacccaacctgcctgcagtttaccctgaacatgaccgaggctgtcaagacctacaagtggcagtgcatagagtgcaaatcctgtatcctctgtgggacctcagagaatgatgaccagctactcttctgcgatgactgtgaccgaggctatcacatgtactgtttaaatcccccggtggctgagcccccagaaggaagctggagctgccacttatgctgggaactgctcaaagagaaagcctcagcctttggctgccaggcctagg

SEQ ID NO: 99592 - DNA, 1134 bp, Artificial Sequence
  derived and/or modified sequence
agcagcatcatccagaacagactgaagaagctgggcgaccagttctacaaggaggccatcgagcactgcagaagctacaacagcagactgtgcgccgagagaagcgtgagactgcccttcctggacagccagaccggcgtggcccagaacaactgctacatctggatggagaagagacacagaggccccggcctggcccccggccagctgtacacctaccccgccagatgctggagaaagaagagaagactgcacccccccgaggaccccaagctgagactgctggagatcaagcccgaggtggagctgcccctgaagaaggacggcttcaccagcgagagcaccaccctggaggccctgctgagaggcgagggcgtggagaagaaggtggacgccagagaggaggagagcatccaggagatccagagagtgctggagaacgacgagaacgtggaggagggcaacgaggaggaggacctggaggaggacatccccaagagaaagaacagaaccagaggcagagccagaggcagcgccggcggcagaagaagacacgacgccgccagccaggaggaccacgacaagccctacgtgtgcgacatctgcggcaagagatacaagaacagacccggcctgagctaccactacgcccacacccacctggccagcgaggagggcgacgaggcccaggaccaggagaccagaagcccccccaaccacagaaacgagaaccacagaccccagaagggccccgacggcaccgtgatccccaacaactactgcgacttctgcctgggcggcagcaacatgaacaagaagagcggcagacccgaggagctggtgagctgcgccgactgcggcagaagcggccaccccacctgcctgcagttcaccctgaacatgaccgaggccgtgaagacctacaagtggcagtgcatcgagtgcaagagctgcatcctgtgcggcaccagcgagaacgacgaccagctgctgttctgcgacgactgcgacagaggctaccacatgtactgcctgaacccccccgtggccgagccccccgagggcagctggagctgccacctgtgctgggagctgctgaaggagaaggccagcgccttcggctgccaggcctag

SEQ ID NO: 99593 - DNA, 1137 bp, Artificial Sequence
  derived and/or modified sequence
atggccaccgtgatccacaaccccctgaaggccctgggcgaccagttctacaaggaggccatcgagcactgcagaagctacaacagcagactgtgcgccgagagaagcgtgagactgcccttcctggacagccagaccggcgtggcccagaacaactgctacatctggatggagaagagacacagaggccccggcctggcccccggccagctgtacacctaccccgccagatgctggagaaagaagagaagactgcacccccccgaggaccccaagctgagactgctggagatcaagcccgaggtggagctgcccctgaagaaggacggcttcaccagcgagagcaccaccctggaggccctgctgagaggcgagggcgtggagaagaaggtggacgccagagaggaggagagcatccaggagatccagagagtgctggagaacgacgagaacgtggaggagggcaacgaggaggaggacctggaggaggacatccccaagagaaagaacagaaccagaggcagagccagaggcagcgccggcggcagaagaagacacgacgccgccagccaggaggaccacgacaagccctacgtgtgcgacatctgcggcaagagatacaagaacagacccggcctgagctaccactacgcccacacccacctggccagcgaggagggcgacgaggcccaggaccaggagaccagaagcccccccaaccacagaaacgagaaccacagaccccagaagggccccgacggcaccgtgatccccaacaactactgcgacttctgcctgggcggcagcaacatgaacaagaagagcggcagacccgaggagctggtgagctgcgccgactgcggcagaagcggccaccccacctgcctgcagttcaccctgaacatgaccgaggccgtgaagacctacaagtggcagtgcatcgagtgcaagagctgcatcctgtgcggcaccagcgagaacgacgaccagctgctgttctgcgacgactgcgacagaggctaccacatgtactgcctgaacccccccgtggccgagccccccgagggcagctggagctgccacctgtgctgggagctgctgaaggagaaggccagcgccttcggctgccaggcctag

SEQ ID NO: 99594 - DNA, 3099 bp, Artificial Sequence
  derived and/or modified sequence
atgttcaatggcattattagcattcgaaataaaaatggggaggaaaaagttaaaatcgagaggcctggaggctcactgtcacctatttggagcatctgttggaaccctagtcgcgaggagcgcaacgatattctcgccgtggctgattggggccagaaagtttcattctatcagctctctggaaagcaaattggcaaggacagggctctcaattttgatccgtgctgcatcagttacttcactaaaggggagtatattttgctgggggggtccgacaaacaggtttcactcttcactaaggacggtgtgaggctggggacagtaggggagcaaaactcctgggtgtggacctgccaggccaagcctgattcaaactatgtcgtcgtcggctgccaggacggaaccatcagtttctatcagctcatcttctccacagtacatggtctctataaagaccgctacgcctaccgcgacagcatgactgatgtgatagtccagcatctcatcactgaacagaaggtgcgtataaagtgtaaagaactggttaaaaagatcgcgatctaccggaaccgattggctattcagttgcctgagaaaattctgatctacgagctttactcagaagacctttctgacatgcattatagggtaaaagaaaagatcatcaaaaagtttgaatgcaacctgctcgtggtgtgcgcgaaccacatcatcctatgtcaagaaaagcgactgcaatgtctgtcattctcaggtgttaaggaaagggaatggcagatggagagtcttatccgatacattaaggttattggcgggccccctggtagagagggactcctagttggcctcaagaacggccaaatattgaagatatttgtcgacaacttgttcgctatcgtactgctgaagcaggccaccgccgtacggtgcctggacatgagcgctagcagaaagaagctggccgtggtcgacgagaacgacacatgccttgtgtatgacatagacaccaaagaactcctgttccaggagcctaatgccaactctgtcgcttggaacacccagtgcgaggacatgctgtgcttctctggaggcggctacctgaacatcaaagcttctactttccccgtgcaccgccagaagctgcaaggctttgtcgtaggctataatggttccaagatcttttgcctgcacgtgttctctatttctgctgtggaggttccgcaatctgcccctatgtaccaatatcttgatcgcaagctcttcaaggaggcctatcaaatcgcttgcctcggggttacagatactgattggagagagctggccatggaagccctggaggggctcgactttgagacggccaagaaagcgttcataagggtgcaggacctccgctaccttgagctgatatcatcgatcgaagagaggaagaaacgcggagagaccaacaacgacctctttctagcagacgtgttctcataccagggaaagttccatgaagctgctaagctgtataaaaggtccggccatgagaacctggccctcgagatgtacacagatctgtgtatgtttgaatatgccaaagacttccttggatcaggtgacccaaaagagacaaagatgctaattactaagcaggccgattgggccaggaatatcaaagagcccaaggctgccgtggaaatgtacataagcgccggagaacatgttaaggctatagagatctgcggtgatcacggttgggtggacatgctgattgacatcgcacgtaagttagataaggcagaacgggagcctttgcttctttgtgctacctatttgaaaaagttggatagtccagggtatgcggccgagacatatctcaaaatgggcgaccttaagagcttggtgcagctgcatgttgaaacccaacggtgggacgaagccttcgccctgggggagaagcacccggaatttaaggacgacatttacatgccctacgcccaatggctggctgagaatgacaggttcgaggaagctcagaaagctttccataaggcagggaggcagagagaggccgtccaagtgctcgaacagttaaccaataatgctgtggcagagtctagatttaacgacgccgcttactactactggatgctttctatgcagtgcttggacatcgctcaagaccctgcccagaaggatactatgctaggtaagttctatcatttccagcgccttgcggaattatatcatggataccacgcaatccaccggcacactgaggatccattctcagttcatcgtccagagaccctgttcaatatttcgaggtttctactgcattctctcccaaaggatacacctagcggtatatcaaaggttaaaatcctgttcacgcttgcaaaacaatcgaaagccctcggtgcttaccggttggcccggcatgcctacgataagctgcggggcctttatatccctgcccgatttcaaaaatctatcgaactgggaaccctgaccattcgcgctaaaccattccacgattctgaggagctcgtgcccctctgctaccggtgctccaccaacaaccccctcctcaataacctggggaatgtgtgtataaattgcagacagccattcattttctccgcaagctcttatgacgtattacatcttgtggaattttacctcgaggaagggatcaccgacgaagaggctatcagtctgattgatcttgaggtcctgcgacccaagagagatgaccgccaattagagattgctaataacagttcccagattttgcgtctggtcgaaaccaaagacagcattggtgacgaggatcccttcaccgccaaattaagctttgaacagggcggatccgaatttgtacctgtggtcgtatcccgacttgttctgaggtctatgagtaggcgggatgtcctgataaaaagatggcctcctccccttcggtggcaatactttcgcagccttctgcctgatgccagtatcacaatgtgcccatcatgtttccagatgtttcactccgaagattatgagctgttggtgttgcaacacgggtgctgtccctattgccgtcgatgtaaggatgatccgggcccgtag

SEQ ID NO: 99595 - DNA, 3099 bp, Artificial Sequence
  derived and/or modified sequence
atgtttaatggcatcatcagcatccggaacaagaatggagaggagaaggtgaagattgaaagacctgggggcagcctgagccccatctggagcatctgctggaaccccagccgggaggagagaaatgacatcctggccgtggccgactggggccagaaggtgtccttctaccagctgagcggcaagcagatcggcaaggaccgggccctgaactttgacccctgctgcatctcctacttcaccaagggggagtacatcctgctgggcggcagtgacaagcaggtgtccctcttcaccaaggatggagtgcggctgggcaccgtgggggagcagaacagctgggtgtggacctgccaggccaagccagacagcaactacgtggtggtgggctgccaggacggcaccatctccttctaccagctgatcttcagcacagtgcacggcctgtacaaggacagatatgcctacagagacagcatgacagatgtgattgtgcagcacctgatcacagagcagaaggtgcgcatcaagtgcaaggagctggtgaagaagatcgccatctacagaaaccggctggccatccagctgcctgagaagatcctgatctatgagctgtacagcgaggacctgagtgacatgcactacagagtgaaggagaagatcatcaagaagtttgagtgcaacctgctggtggtgtgtgccaaccacatcatcctgtgccaggagaagaggctgcagtgcctgtccttctctggagtgaaggagcgggagtggcagatggagagcctcatccgctacatcaaggtgattggaggccccccaggccgggagggcctgctggtgggcctgaagaatggccagatcctgaagatctttgtggacaacctgtttgccatcgtgctgctgaagcaggccacagctgtgcgctgcctggacatgtctgccagcaggaagaagctggccgtggtggatgaaaatgacacctgcctggtgtatgacatcgacaccaaggagctgctcttccaggagcccaatgccaacagcgtggcctggaacacccagtgtgaggacatgctgtgcttcagcggcggcggctacctgaacatcaaggccagcaccttccctgtgcaccggcagaagctgcagggctttgtggtgggctacaacggcagcaagatcttctgcctgcacgtgttcagcatctctgctgtggaggtgccccagagcgcccccatgtaccagtacctggacaggaagctgttcaaggaggcctaccagatcgcctgcctgggcgtgacagacacagactggagggagctggccatggaggccctggagggcctggactttgaaacagccaagaaggccttcatccgggtgcaggacctgcgctacctggagctgatcagcagcattgaggagaggaagaagagaggagagaccaacaatgacctcttcctggctgatgtgttctcctaccagggcaagttccacgaggccgccaagctgtacaagaggagcggccacgagaacctggccctggagatgtacacagacctgtgcatgtttgaatatgccaaggacttcctgggcagcggggaccccaaggagaccaagatgctgatcaccaagcaggccgactgggccaggaacatcaaggagcccaaggctgctgtggagatgtacatctctgctggggagcacgtgaaggccatcgagatctgtggggaccacggctgggtggacatgctgattgatattgccaggaagctggacaaggccgagcgggagcccctgctgctgtgtgccacctacctgaagaagctggacagccctggctatgctgctgagacctacctgaagatgggagacctgaagagcctggtgcagctgcacgtggagacccagcgctgggatgaggcctttgccctgggggagaagcaccctgagttcaaggatgacatctacatgccctatgcccagtggctggctgaaaatgacagatttgaggaggcccagaaggccttccacaaggccggccggcagcgggaggccgtgcaggtgctggagcagctgaccaacaatgctgtggccgagagccgcttcaatgatgctgcctactactactggatgctgtccatgcagtgcctggacatcgcccaggaccctgcccagaaggacaccatgctgggcaagttctaccacttccagaggctggccgagctgtaccacggctaccacgccatccaccgccacacagaggaccccttctctgtgcacaggcctgagaccctcttcaacatcagccgcttcctgctgcacagcctgcccaaggacacccccagcggcatcagcaaggtgaagatcctcttcaccctggccaagcagagcaaggccctgggcgcctaccgcctggcccggcatgcctatgacaagctgcggggcctgtacatcccagcccgcttccagaagagcattgagctgggcaccctgaccatccgggccaagcccttccatgattctgaggagctggtgcccctgtgctaccgctgcagcaccaacaaccccctgctgaacaacctgggcaatgtgtgcatcaactgccggcagcccttcatcttcagcgccagcagctatgatgtgctgcacctggtggagttctacctggaggagggcatcacagatgaggaggccatcagcctgattgacctggaggtgctgcggcccaagagagatgaccggcagctggagatcgccaacaacagcagccagatcctgcggctggtggagaccaaggacagcattggagatgaggaccccttcaccgccaagctgagctttgagcagggcggcagcgagtttgtgcctgtggtggtgtcccggctggtgctgcgctccatgagcagaagagatgtgctgatcaagcgctggcccccacccctgcgctggcagtacttccgcagcctgctgcctgatgccagcatcaccatgtgccccagctgcttccagatgttccacagcgaggactatgagctgctggtgctgcagcacggctgctgcccctactgccgccgctgcaaggatgaccccggcccctag

SEQ ID NO: 99596 - DNA, 3099 bp, Artificial Sequence
  derived and/or modified sequence
atgttcaacggcatcatcagcatccggaacaagaacggcgaggagaaggtcaaaatcgagaggccggggggctccctttcacctatctggtcgatttgctggaatccaagtagggaggaacggaatgatatcctagctgtggctgactggggacagaaagtttcattctatcagttgagcggcaagcagatcggtaaggaccgcgcattgaatttcgatccgtgctgcatctcatactttaccaaaggggagtacattttgctgggcgggtccgacaaacaggtgagcctgtttacaaaggacggagttaggctcggcactgtcggggagcagaattcgtgggtgtggacatgccaggcaaaaccagatagcaattacgtggtagttggatgtcaagacgggaccatttccttctatcaactgatcttctccacagtgcatggattatacaaagaccgctatgcctatagagactcgatgaccgacgttattgtgcaacacctgattaccgaacagaaggtcagaattaaatgcaaggagctggtgaagaagattgctatttacagaaacagactcgcgattcagctgcctgaaaaaattctaatctacgagctgtactctgaagacctgagtgatatgcactaccgtgtgaaagagaagataattaagaagttcgagtgcaatctactggtggtgtgcgcaaatcacattatcttgtgccaggagaaacgcctacaatgtctgtccttctctggagttaaggaacgagagtggcaaatggagtccttaatacgctacattaaagtcataggcggtccccctggcagagagggtctcctagtggggctgaaaaatgggcaaatcctcaagatttttgtggataatctctttgcgattgtgctgctgaagcaggcaacagctgttaggtgcctggacatgagcgcctcacgcaaaaagctggccgttgtagacgaaaacgatacttgtttagtatacgacatcgacactaaggagctgctctttcaggagcccaacgccaattcggttgcatggaacacacagtgtgaggatatgctctgtttctctggtggcggctacctgaacatcaaagcctctacttttcccgtgcaccggcagaaacttcagggtttcgttgttggctataatggttcaaagatcttttgcctgcacgtgttctccattagcgccgtagaagttcctcaatctgcccccatgtatcagtatctagataggaagctgttcaaggaagcataccagattgcttgtctgggtgtcactgatactgattggcgggagttggccatggaagctctggaaggacttgatttcgagaccgccaagaaggcattcattagagtacaagacttgcggtatctggagctcatctctagtattgaagagcgcaagaaacggggggagacaaataacgatttatttcttgcagatgtgttttcctatcagggcaagtttcatgaggccgccaaactgtataaacgcagcggacatgagaacttggccctggagatgtacactgacctttgcatgttcgagtatgccaaggacttcctgggctcaggtgatcctaaggaaacaaagatgttgatcaccaaacaagccgactgggctcgcaacattaaggagccaaaggcggcagtggagatgtatatttccgccggtgagcatgttaaggcaatcgaaatttgtggcgaccatgggtgggtagacatgctgatcgacatagcccgcaaactggataaggccgagcgcgagcctctgttgttgtgtgcaacctacttaaagaaactggacagccctgggtatgccgcggagacatacttaaagatgggagacctcaagtctctggtccagctgcatgtggagacacagagatgggacgaagcgttcgcgctaggagagaagcacccagaatttaaggatgatatttatatgccatatgcccaatggttagctgaaaatgaccggttcgaagaagctcagaaggccttccataaggcgggtcggcaaagggaagctgtgcaagtgctcgaacaacttaccaacaatgctgtcgcagagagtagattcaacgacgccgcttattattattggatgctgagcatgcagtgtctggacattgcccaggatccagcacagaaggacactatgctggggaaattttatcatttccagcgcctcgccgaactgtaccatggctatcacgccattcacaggcatactgaagatcccttctctgttcataggccagagactctctttaatataagtcggtttctactacatagcctccccaaggacacacctagcggtattagtaaggttaagatcttgttcacactggctaagcaaagtaaggccctcggagcctacagacttgcaagacatgcctacgataagcttagagggttgtacatccccgcgagatttcagaagagcatcgagctgggaaccttaacaatccgcgccaagccattccatgactcagaggaactggttccgctctgctaccggtgttccaccaataatccacttttaaacaatctgggcaacgtttgcattaattgtcgccagccattcatctttagcgcatcttcatacgatgtgctgcatctggtcgagttctatctggaagaaggcatcaccgatgaggaggccatcagcctcattgatcttgaggtgctcaggcctaaacgcgatgaccgccaattagaaattgccaataactcaagtcagatcttgcgactggtggaaaccaaagacagtatcggagacgaggatccttttactgccaagctctccttcgagcaaggaggctcagagtttgtccctgtggtggtaagtcgcctcgtattacgctcaatgtctagaagggatgtgctaattaaacgctggccccctccactgcggtggcagtattttaggtccttactgccggacgcctccatcaccatgtgtccgtcttgctttcagatgtttcattccgaagactatgaactgctggtactgcagcacgggtgctgcccatattgcaggcgctgtaaggatgatccgggaccctag

SEQ ID NO: 99597 - DNA, 3099 bp, Artificial Sequence
  derived and/or modified sequence
atgttcaacggtatcattagtatcagaaacaagaacggcgaggagaaagttaaaattgagcggccaggcggaagtctgtcacccatatggagtatttgttggaatccgtccagagaggaacgtaatgacatcctggcagtcgcagattgggggcagaaagtgagtttctaccagctatcaggcaaacagattggtaaggatagagcccttaatttcgatccttgttgcatctcttactttaccaagggagaatacattttacttggaggcagcgataagcaggtctctttgttcaccaaagacggggtgcgcctgggcaccgtcggggagcagaacagctgggtttggacttgtcaggccaaaccagattctaattatgttgtagttggatgccaagacgggactataagtttttatcaactaatcttttctaccgtccacggcttgtacaaagaccgctacgcctacagggacagcatgacggatgtgatagtccagcacctgatcaccgagcagaaagttcggattaagtgcaaggaattagtcaagaaaattgccatttaccgtaataggctggctattcaactccctgagaaaatcctgatctacgaattatattctgaggatctgtccgatatgcattaccgagtaaaggaaaaaatcataaaaaaattcgaatgcaatctgttagtagtgtgtgcaaatcacatcatactgtgccaggaaaaacgtctccagtgtttgtctttcagtggggtgaaagagcgcgagtggcagatggagagtctgatccgttacattaaagtcatagggggtcctccgggtcgcgaaggcctgctcgtaggcctgaagaacggccagatcttaaaaatttttgtggacaatttgtttgccattgtgctgttaaagcaggcaaccgctgtgagatgcctggacatgagcgccagcaggaagaaactggccgtggtagacgagaacgacacttgtctcgtatacgacatcgatactaaggaacttttatttcaagaacccaacgcaaacagcgtcgcttggaatacccaatgcgaagatatgctctgcttctctggtggtggatacctcaacattaaagcttcgacattccctgtgcaccggcaaaagctgcagggttttgtggttggttataatggatcgaagatattctgcctgcacgtgttttctatttccgctgtcgaggttcctcagtccgcacccatgtaccagtatctggataggaagctctttaaagaggcgtaccagattgcatgtctgggtgtcactgacactgattggagggaactggccatggaggccctggaaggtctagatttcgagacagctaaaaaagcattcattcgcgtgcaggatctgaggtacctggaactaatatcatccatcgaggaacggaagaagagaggggagactaacaacgatctcttcctggcagacgttttcagctatcagggcaaatttcacgaggctgctaagctctataaaaggtcaggtcacgaaaatcttgctctcgaaatgtacacagatctatgcatgtttgaatatgctaaggattttcttgggtcaggcgacccaaaggaaacaaagatgctgattactaaacaggctgattgggcaagaaacatcaaggagcctaaagcagcagtggagatgtacattagcgcaggggagcacgtgaaagccattgagatatgcggcgaccacggatgggttgatatgctaatagacattgctcgaaagctggacaaggccgaaagggagccgctgctcttatgtgcgacgtatctcaagaaattggattctcccggatacgccgctgaaacctacttgaaaatgggggacctgaagtccctggtccagctacacgtagagacccaacgctgggatgaggcctttgctctcggcgaaaaacacccggagttcaaggacgacatatatatgccttatgctcagtggctggcagaaaacgatagatttgaggaggcacaaaaggccttccataaagctggtcgccagcgggaagccgtgcaggtcctggagcagctcacaaacaacgcagttgctgaatccagattcaacgatgctgcctattactactggatgttgtctatgcagtgcctcgatattgctcaggatcccgctcagaaggacaccatgctgggcaaattttaccatttccagcgcctcgccgaactataccatggctatcacgctatccatcggcacactgaagatccattttctgtgcataggcctgagactctctttaacattagccgcttccttctccatagtctgcccaaagataccccaagtggaatttccaaagtaaagattctttttaccctcgcaaaacagagtaaagcattgggagcctacagactagctaggcacgcatatgacaaattgaggggcctctatattccggctagatttcaaaagtctattgagttaggcacacttacaattcgagccaaaccattccatgactccgaggaactggtgcccctgtgctatcgttgtagtacaaacaaccctcttttgaataatctgggtaacgtatgtatcaattgtcgacagcctttcattttctccgcatctagctacgatgtgttgcatctagtggagttctacctggaggaaggcattacagacgaggaggccatctctctgattgacttagaggtgttgaggcctaagcgcgacgataggcagcttgagatagctaataattcttcacagatactgagactggtcgagaccaaagactctattggcgacgaagaccctttcaccgccaagctcagttttgagcaaggagggagcgagttcgttcctgtggttgtttcccggctagtgttacggtccatgagtagacgcgatgttctgattaagagatggccaccacctttgcgctggcagtattttcggagcttgcttcccgacgcctctatcacaatgtgcccgtcatgctttcagatgtttcatagtgaagactatgaactccttgtgctgcagcatgggtgctgtccctattgtagaagatgtaaagacgaccccggtccgtag

SEQ ID NO: 99598 - DNA, 3099 bp, Artificial Sequence
  derived and/or modified sequence
atgttcaacggcatcatcagcatcagaaacaagaacggcgaggagaaggtgaagatcgagagacccggcggcagcctgagccccatctggagcatctgctggaaccccagcagagaggagagaaacgacatcctggccgtggccgactggggccagaaggtgagcttctaccagctgagcggcaagcagatcggcaaggacagagccctgaacttcgacccctgctgcatcagctacttcaccaagggcgagtacatcctgctgggcggcagcgacaagcaggtgagcctgttcaccaaggacggcgtgagactgggcaccgtgggcgagcagaacagctgggtgtggacctgccaggccaagcccgacagcaactacgtggtggtgggctgccaggacggcaccatcagcttctaccagctgatcttcagcaccgtgcacggcctgtacaaggacagatacgcctacagagacagcatgaccgacgtgatcgtgcagcacctgatcaccgagcagaaggtgagaatcaagtgcaaggagctggtgaagaagatcgccatctacagaaacagactggccatccagctgcccgagaagatcctgatctacgagctgtacagcgaggacctgagcgacatgcactacagagtgaaggagaagatcatcaagaagttcgagtgcaacctgctggtggtgtgcgccaaccacatcatcctgtgccaggagaagagactgcagtgcctgagcttcagcggcgtgaaggagagagagtggcagatggagagcctgatcagatacatcaaggtgatcggcggcccccccggcagagagggcctgctggtgggcctgaagaacggccagatcctgaagatcttcgtggacaacctgttcgccatcgtgctgctgaagcaggccaccgccgtgagatgcctggacatgagcgccagcagaaagaagctggccgtggtggacgagaacgacacctgcctggtgtacgacatcgacaccaaggagctgctgttccaggagcccaacgccaacagcgtggcctggaacacccagtgcgaggacatgctgtgcttcagcggcggcggctacctgaacatcaaggccagcaccttccccgtgcacagacagaagctgcagggcttcgtggtgggctacaacggcagcaagatcttctgcctgcacgtgttcagcatcagcgccgtggaggtgccccagagcgcccccatgtaccagtacctggacagaaagctgttcaaggaggcctaccagatcgcctgcctgggcgtgaccgacaccgactggagagagctggccatggaggccctggagggcctggacttcgagaccgccaagaaggccttcatcagagtgcaggacctgagatacctggagctgatcagcagcatcgaggagagaaagaagagaggcgagaccaacaacgacctgttcctggccgacgtgttcagctaccagggcaagttccacgaggccgccaagctgtacaagagaagcggccacgagaacctggccctggagatgtacaccgacctgtgcatgttcgagtacgccaaggacttcctgggcagcggcgaccccaaggagaccaagatgctgatcaccaagcaggccgactgggccagaaacatcaaggagcccaaggccgccgtggagatgtacatcagcgccggcgagcacgtgaaggccatcgagatctgcggcgaccacggctgggtggacatgctgatcgacatcgccagaaagctggacaaggccgagagagagcccctgctgctgtgcgccacctacctgaagaagctggacagccccggctacgccgccgagacctacctgaagatgggcgacctgaagagcctggtgcagctgcacgtggagacccagagatgggacgaggccttcgccctgggcgagaagcaccccgagttcaaggacgacatctacatgccctacgcccagtggctggccgagaacgacagattcgaggaggcccagaaggccttccacaaggccggcagacagagagaggccgtgcaggtgctggagcagctgaccaacaacgccgtggccgagagcagattcaacgacgccgcctactactactggatgctgagcatgcagtgcctggacatcgcccaggaccccgcccagaaggacaccatgctgggcaagttctaccacttccagagactggccgagctgtaccacggctaccacgccatccacagacacaccgaggaccccttcagcgtgcacagacccgagaccctgttcaacatcagcagattcctgctgcacagcctgcccaaggacacccccagcggcatcagcaaggtgaagatcctgttcaccctggccaagcagagcaaggccctgggcgcctacagactggccagacacgcctacgacaagctgagaggcctgtacatccccgccagattccagaagagcatcgagctgggcaccctgaccatcagagccaagcccttccacgacagcgaggagctggtgcccctgtgctacagatgcagcaccaacaaccccctgctgaacaacctgggcaacgtgtgcatcaactgcagacagcccttcatcttcagcgccagcagctacgacgtgctgcacctggtggagttctacctggaggagggcatcaccgacgaggaggccatcagcctgatcgacctggaggtgctgagacccaagagagacgacagacagctggagatcgccaacaacagcagccagatcctgagactggtggagaccaaggacagcatcggcgacgaggaccccttcaccgccaagctgagcttcgagcagggcggcagcgagttcgtgcccgtggtggtgagcagactggtgctgagaagcatgagcagaagagacgtgctgatcaagagatggcccccccccctgagatggcagtacttcagaagcctgctgcccgacgccagcatcaccatgtgccccagctgcttccagatgttccacagcgaggactacgagctgctggtgctgcagcacggctgctgcccctactgcagaagatgcaaggacgaccccggcccctag

SEQ ID NO: 99599 - protein, 357 aa, Artificial Sequence
  derived and/or modified sequence
MDLEKNYPTPRTSRTGHGGVNQLGGVFVNGRPLPDVVRQRIVELAHQGVRPCDISRQLRVSHGCVSKILGRYYETGSIKPGVIGGSKPKVATPKVVEKIAEYKRQNPTMFAWEIRDRLLAERVCDNDTVPSVSSINRIIRTKVQQPPNQPVPASSHSIVSTGSVTQVSSVSTDSAGSSYSISGILGITSPSADTNKRKRDEGIQESPVPNGHSLPGRDFLRKQMRGDLFTQQQLEVLDRVFERQHYSDIFTTTEPIKPEQTTEYSAMASLAGGLDDMKANLASPTPADIGSSVPGPQSYPIVTGSEFSGSPYSHPQYSSYNDSWRFPNPGLLGSPYYYSAAARGAAPPAAATAYDRH

SEQ ID NO: 99600 - DNA, 1074 bp, Artificial Sequence
  derived and/or modified sequence
atggacctggagaagaactaccccacccccagaaccagcagaaccggccacggcggcgtgaaccagctgggcggcgtgttcgtgaacggcagacccctgcccgacgtggtgagacagagaatcgtggagctggcccaccagggcgtgagaccctgcgacatcagcagacagctgagagtgagccacggctgcgtgagcaagatcctgggcagatactacgagaccggcagcatcaagcccggcgtgatcggcggcagcaagcccaaggtggccacccccaaggtggtggagaagatcgccgagtacaagagacagaaccccaccatgttcgcctgggagatcagagacagactgctggccgagagagtgtgcgacaacgacaccgtgcccagcgtgagcagcatcaacagaatcatcagaaccaaggtgcagcagccccccaaccagcccgtgcccgccagcagccacagcatcgtgagcaccggcagcgtgacccaggtgagcagcgtgagcaccgacagcgccggcagcagctacagcatcagcggcatcctgggcatcaccagccccagcgccgacaccaacaagagaaagagagacgagggcatccaggagagccccgtgcccaacggccacagcctgcccggcagagacttcctgagaaagcagatgagaggcgacctgttcacccagcagcagctggaggtgctggacagagtgttcgagagacagcactacagcgacatcttcaccaccaccgagcccatcaagcccgagcagaccaccgagtacagcgccatggccagcctggccggcggcctggacgacatgaaggccaacctggccagccccacccccgccgacatcggcagcagcgtgcccggcccccagagctaccccatcgtgaccggcagcgagttcagcggcagcccctacagccacccccagtacagcagctacaacgacagctggagattccccaaccccggcctgctgggcagcccctactactacagcgccgccgccagaggcgccgccccccccgccgccgccaccgcctacgacagacactag

SEQ ID NO: 99601 - DNA, 1074 bp, Artificial Sequence
  derived and/or modified sequence
atggatcttgagaagaactatccaaccccgcgcacgtcaagaactggacacggcggcgtaaaccaacttggcggagtgtttgtaaacggacgaccactccctgacgtggttaggcaacggattgtcgaactcgctcaccagggggttcgcccatgtgacatcagccgtcagctgagggtgtcccacggatgtgtgtctaagatattagggcgatactatgaaacagggtccattaagcccggcgtaatcggggggtctaagccaaaggtcgcaacacctaaggtggtagagaaaatagcagagtacaaacggcaaaaccccactatgttcgcatgggaaattcgggaccgcctgttagcagagcgtgtgtgtgataatgacacggtaccatctgtgagcagcatcaacaggattatccggacaaaggtgcagcaaccgcctaatcaacctgtaccagctagttcgcactctatagtatcgactggatcagttacacaagttagttccgtctccactgattctgccggaagctcatatagcattagtggtatcttgggcattacctctccttctgcagacacaaacaaaaggaaaagagatgaggggatccaggagtccccagtgcccaatggtcattctttacctggccgggactttttgagaaagcaaatgcggggtgacctctttacacagcagcagctcgaagtcctggatagagtgttcgaaagacagcattattcagatatcttcacaactacggagccaattaagccagagcagactactgagtattccgccatggctagcttggcgggcggtctggatgatatgaaggccaacctagcctctccgacacccgcggacattgggagcagcgtccctgggcctcagtcctacccaatcgtgacagggagtgaattttctggatcaccgtactcacacccacagtacagctcctataatgatagctggcggtttcccaacccgggcctgctcggctcaccctattactattccgccgcggcacgcggcgctgcgccccccgctgcggccactgcatacgaccgacactag

SEQ ID NO: 99602 - DNA, 1074 bp, Artificial Sequence
  derived and/or modified sequence
atggacctggagaagaactaccccacccccaggaccagcaggactggacatggaggagtgaaccagctgggcggcgtgtttgtgaatggccggcccctgcctgatgtggtgcggcagagaattgtggagctggcccaccagggcgtgcggccctgtgacatcagccggcagctgcgggtgagccacggctgtgtgtccaagatcctgggccgctactatgaaacaggcagcatcaagccaggagtgattggaggcagcaagcccaaggtggccacccccaaggtggtggagaagattgctgagtacaagaggcagaaccccaccatgtttgcctgggagatccgggaccggctgctggccgagcgggtgtgtgacaatgacacagtgcccagcgtgagcagcatcaaccgcatcatccgcaccaaggtgcagcagccccccaaccagcctgtgcctgccagcagccacagcatcgtgtccactggatctgtgacccaggtgtcctctgtgtccacagacagcgctggcagcagctacagcatcagcggcatcctgggcatcaccagccccagcgctgacaccaacaagaggaagagagatgagggcatccaggagagccctgtgcccaacggccacagcctgcccggccgggacttcctgaggaagcagatgagaggagacctcttcacccagcagcagctggaggtgctggacagagtgtttgagcggcagcactacagcgacatcttcaccaccacagagcccatcaagccagagcagaccacagagtacagcgccatggccagcctggccggcggcctggatgacatgaaggccaacctggccagccccaccccagctgacatcggcagctctgtgcccggcccccagagctaccccatcgtgactggaagtgagttcagcggcagcccctacagccacccccagtacagcagctacaatgacagctggaggttccccaaccctggcctgctgggcagcccctactactacagcgctgctgcccggggagctgcccctcctgctgctgccacagcctatgacagacactag

SEQ ID NO: 99603 - DNA, 1074 bp, Artificial Sequence
  derived and/or modified sequence
atggacctggagaagaactaccccaccccccggaccagccggaccggtcacggcggtgtgaaccagcttgggggcgtatttgtcaacggccgccctctgccagacgtggtgcgccagaggatcgtcgaactcgcccaccagggggtccggccctgcgatattagcagacagcttcgcgtgagccatgggtgcgtgtctaagattctggggaggtattatgaaacaggaagcattaagcccggagtcattggcggttccaagcccaaggtggccacccctaaggtggtggagaaaatcgctgagtataagaggcagaatccaacaatgtttgcatgggaaatccgagatcggcttctggcagaacgggtctgtgataatgacactgtgccatcagttagctccattaatagaatcattaggaccaaggtgcagcagcctccaaaccagccagtcccagcatcctcccactccatcgtgtctacagggtctgtgactcaggtctcttccgttagtacagactccgctggaagttcctactcaatcagcggaatcctgggcatcaccagccccagtgcagacactaataaaaggaagagagatgaaggcatccaggagagcccagtgcccaacggccattccctgccagggagggacttcctgcggaagcagatgcgaggcgacctgttcacacagcaacagttagaagttctggaccgggtcttcgaaaggcagcattattcagacatttttaccactaccgagcccattaagcccgaacaaactaccgaatactccgctatggcctcgctggctgggggactagacgatatgaaggcaaatctggcctcaccgactcctgccgacataggaagcagcgtgcctggtccacagagttaccctatagttactggtagcgagttcagcgggtcgccctatagccacccccagtactcttcatataacgactcttggcggttcccaaaccccgggctgctggggtccccgtattattattccgcagccgctcgcggagctgctccccctgcagctgccacggcctacgatcgccattag

SEQ ID NO: 99604 - DNA, 1472 bp, Artificial Sequence
  derived and/or modified sequence
aaaaatcaaaatggatttagagaaaaattatccgactcctcggaccagcaggacaggacatggaggagtgaatcagcttgggggggtttttgtgaatggacggccactcccggatgtagtccgccagaggatagtggaacttgctcatcaaggtgtcaggccctgcgacatctccaggcagcttcgggtcagccatggttgtgtcagcaaaattcttggcaggtattatgagacaggaagcatcaagcctggggtaattggaggatccaaaccaaaggtcgccacacccaaagtggtggaaaaaatcgctgaatataaacgccaaaatcccaccatgtttgcctgggagatcagggaccggctgctggcagagcgggtgtgtgacaatgacaccgtgcctagcgtcagttccatcaacaggatcatccggacaaaagtacagcagccacccaaccaaccagtcccagcttccagtcacagcatagtgtccactggctccgtgacgcaggtgtcctcggtgagcacggattcggccggctcgtcgtactccatcagcggcatcctgggcatcacgtcccccagcgccgacaccaacaagcgcaagagagacgaaggtattcaggagtctccggtgccgaacggccactcgcttccgggcagagacttcctccggaagcagatgcggggagacttgttcacacagcagcagctggaggtgctggaccgcgtgtttgagaggcagcactactcagacatcttcaccaccacagagcccatcaagcccgagcagaccacagagtattcagccatggcctcgctggctggtgggctggacgacatgaaggccaatctggccagccccacccctgctgacatcgggagcagtgtgccaggcccgcagtcctaccccattgtgacagggagtgagttttccgggagtccctacagccaccctcagtattcctcgtacaacgactcctggaggttccccaacccggggctgcttggctccccctactattatagcgctgccgcccgaggagccgccccacctgcagccgccactgcctatgaccgtcactgacccttggagccaggcgggcaccaaacactgatggcacctattgagggtgacagccacccagccctcctgaagatagccagagagcccatgagaccgtcccccagcatcccccacttgcctgaagctcccctcttcctctcttcctccagggactctggggccctttggtggggccgttggacttctggatgcttgtctatttctaaaagccaatctatgagcttctcccgatggccactgggtctctgcaaaccaatagactgtcctgcaaataaccgcagccccagcccagcctgcctgtcctccagctgtctgactatccatccatcataaccaccccagcctgggaaggagagcttgcttttgttgcttcagcagcacccatgta

SEQ ID NO: 99605 - DNA, 1074 bp, Artificial Sequence
  derived and/or modified sequence
atggatttggagaagaactaccccacaccgcgaacgtctagaactggacacggcggtgtcaaccaactcggcggagtgtttgtaaatgggagacccttacccgatgtggtgaggcagcgaatcgtcgagctggctcaccaaggggtgcgcccatgcgacattagccgacagctgagagtctcacatgggtgcgtgtcaaagattcttggacggtattacgagacgggatccatcaagccaggggtaattgggggttccaagccaaaagtggccaccccaaaggttgttgagaagatcgctgaatacaaaaggcaaaaccctaccatgtttgcttgggagatccgggacagattactggctgagcgggtctgcgataatgataccgtgccgagcgtgagttccataaacaggatcatacgtacaaaggtgcagcagcctccgaaccagcccgtgccagccagcagccatagcatcgtgagtactggaagtgtgactcaggtgtcgagcgtgtctacggactctgccggaagctcttattctatcagcgggatactgggtatcacctcaccctctgcggacactaataaaaggaagagagacgagggaatccaggagtcacctgtaccaaacggtcatagcctacctggcagggattttctaagaaaacaaatgcgcggtgatctgttcacccagcagcagctcgaagttctggatcgcgtttttgagcgtcaacactattccgatatcttcacaacgacagaacccatcaaacctgaacagacgacagaatattctgcaatggcctcccttgccggaggcttagacgacatgaaagccaatctggctagcccaacaccagcggacattgggtcaagtgttcctggccctcagtcgtaccctattgtcacgggcagtgagttctcaggctccccctactctcatcctcagtattcgtcatacaacgactcgtggaggttccctaaccccggattgttaggaagtccttactattactcagccgctgccagaggcgcagctccaccggcagcagcgaccgcatatgataggcactag

SEQ ID NO: 99606 - protein, 362 aa, Artificial Sequence
  derived and/or modified sequence
MDLEKNYPTPRTSRTGHGGVNQLGGVFVNGRPLPDVVRQRIVELAHQGVRPCDISRQLRVSHGCVSKILGRYYETGSIKPGVIGGSKPKVATPKVVEKIAEYKRQNPTMFAWEIRDRLLAERVCDNDTVPSVSSINRIIRTKVQQPPNQPVPASSHSIVSTGSVTQVSSVSTDSAGSSYSISGILGITSPSADTNKRKRDEGIQESPVPNGHSLPGRDFLRKQMRGDLFTQQQLEVLDRVFERQHYSDIFTTTEPIKPEQTTEYSAMASLAGGLDDMKANLASPTPADIGSSVPGPQSYPIVTGRDLASTTLPGYPPHVPPAGQGSYSAPTLTGMVPGSPYYYSAAARGAAPPAAATAYDRH

SEQ ID NO: 99607 - DNA, 1089 bp, Artificial Sequence
  derived and/or modified sequence
atggacctggagaagaactaccccacccccagaaccagcagaaccggccacggcggcgtgaaccagctgggcggcgtgttcgtgaacggcagacccctgcccgacgtggtgagacagagaatcgtggagctggcccaccagggcgtgagaccctgcgacatcagcagacagctgagagtgagccacggctgcgtgagcaagatcctgggcagatactacgagaccggcagcatcaagcccggcgtgatcggcggcagcaagcccaaggtggccacccccaaggtggtggagaagatcgccgagtacaagagacagaaccccaccatgttcgcctgggagatcagagacagactgctggccgagagagtgtgcgacaacgacaccgtgcccagcgtgagcagcatcaacagaatcatcagaaccaaggtgcagcagccccccaaccagcccgtgcccgccagcagccacagcatcgtgagcaccggcagcgtgacccaggtgagcagcgtgagcaccgacagcgccggcagcagctacagcatcagcggcatcctgggcatcaccagccccagcgccgacaccaacaagagaaagagagacgagggcatccaggagagccccgtgcccaacggccacagcctgcccggcagagacttcctgagaaagcagatgagaggcgacctgttcacccagcagcagctggaggtgctggacagagtgttcgagagacagcactacagcgacatcttcaccaccaccgagcccatcaagcccgagcagaccaccgagtacagcgccatggccagcctggccggcggcctggacgacatgaaggccaacctggccagccccacccccgccgacatcggcagcagcgtgcccggcccccagagctaccccatcgtgaccggcagagacctggccagcaccaccctgcccggctaccccccccacgtgccccccgccggccagggcagctacagcgcccccaccctgaccggcatggtgcccggcagcccctactactacagcgccgccgccagaggcgccgccccccccgccgccgccaccgcctacgacagacactag

SEQ ID NO: 99608 - DNA, 1089 bp, Artificial Sequence
  derived and/or modified sequence
atggatttagaaaaaaactaccccacgcctcgaacatcacgcaccggtcatggtggcgtcaatcaacttggcggagtgtttgtaaacggacgccccttgcccgatgttgtgcgtcaacggatcgtcgagctcgcccatcagggcgtgcggccatgtgatattagccgacagctacgagtatcgcacgggtgtgtgagtaaaatcctgggcagatactatgaaacaggttccattaagcccggagtcatcggcggatccaagccaaaagtcgccactccaaaggtggttgaaaaaatagccgagtataagagacagaatccgacaatgttcgcgtgggagattcgagatcgcctgctggccgaacgtgtgtgtgacaatgatactgtgcccagcgtcagcagcatcaaccgaattatccgcaccaaagtgcagcagccccccaatcagccagttcctgctagctcccatagcatcgtctctaccggcagcgtgacacaagtgtctagcgtcagtacagactccgctggctcctcatattcgatctccggaattctgggcatcacaagcccctctgcagacacaaataaaaggaaacgggatgaggggattcaggaatctccagtcccaaacggccactccctgcccggacgggactttctaaggaagcagatgcggggcgaccttttcacccaacagcagctggaggtgctcgatagagttttcgagcggcaacactactcagatatcttcacaacaactgaacctattaagcctgagcagactacagagtacagcgctatggcttccttggctgggggtctagatgacatgaaagcaaacctggcctcgcccacacccgctgacatcggaagcagcgtacccgggccccagagctatcccattgtcacaggaagggaccttgcaagcacaacgttgccaggttaccctccacacgtgccccccgccggtcagggcagctatagcgcccccacactcacgggaatggtgcctggcagcccttactactattcggccgccgcgagaggggccgcgccacccgcggcggccaccgcctacgacagacactag

SEQ ID NO: 99609 - DNA, 1089 bp, Artificial Sequence
  derived and/or modified sequence
atggacctggagaagaactaccccacccccaggaccagcaggactggacatggaggagtgaaccagctgggcggcgtgtttgtgaatggccggcccctgcctgatgtggtgcggcagagaattgtggagctggcccaccagggcgtgcggccctgtgacatcagccggcagctgcgggtgagccacggctgtgtgtccaagatcctgggccgctactatgaaacaggcagcatcaagccaggagtgattggaggcagcaagcccaaggtggccacccccaaggtggtggagaagattgctgagtacaagaggcagaaccccaccatgtttgcctgggagatccgggaccggctgctggccgagcgggtgtgtgacaatgacacagtgcccagcgtgagcagcatcaaccgcatcatccgcaccaaggtgcagcagccccccaaccagcctgtgcctgccagcagccacagcatcgtgtccactggatctgtgacccaggtgtcctctgtgtccacagacagcgctggcagcagctacagcatcagcggcatcctgggcatcaccagccccagcgctgacaccaacaagaggaagagagatgagggcatccaggagagccctgtgcccaacggccacagcctgcccggccgggacttcctgaggaagcagatgagaggagacctcttcacccagcagcagctggaggtgctggacagagtgtttgagcggcagcactacagcgacatcttcaccaccacagagcccatcaagccagagcagaccacagagtacagcgccatggccagcctggccggcggcctggatgacatgaaggccaacctggccagccccaccccagctgacatcggcagctctgtgcccggcccccagagctaccccatcgtgacaggccgggacctggccagcaccaccctgcccggctacccaccccacgtgcccccagctggccagggcagctacagcgcccccaccctgaccggcatggtgcccggcagcccctactactacagcgctgctgcccggggggccgcccccccagctgctgccacagcctatgacagacactag

SEQ ID NO: 99610 - DNA, 1089 bp, Artificial Sequence
  derived and/or modified sequence
atggacctggagaagaactaccccaccccccggaccagccggaccggacacggcggtgtgaatcagctcggcggagttttcgtcaacggccgccctttaccggatgtggtgcgtcaacggatagtggaattggctcaccagggggtgcgaccgtgtgacatcagtcgtcagttacgagtgtcccatgggtgcgtctcgaagattcttggccgctattatgagaccggaagcatcaagccgggggtgatcggcgggtctaaacccaaggtcgccacgccaaaggtcgtcgagaaaattgctgagtacaagcggcagaaccctacaatgtttgcctgggagatccgagatcgcttgctggccgagcgcgtctgcgataacgacactgtgcccagcgtctccagcattaatagaatcatacgaacaaaggtgcagcagcctcctaaccagccagtacctgccagctctcactctattgtctctacgggatctgtgacccaggtgagttcagtctcaaccgatagcgctggatccagttatagcatatccggaattctgggcattaccagcccatctgcagataccaataagcgtaaacgcgacgaaggtatccaggagtctcctgtccctaacgggcactccctgccaggaagagacttccttaggaagcaaatgagaggggatctgttcacccagcaacagctggaagtcctggaccgggtctttgagagacagcactactctgacatctttacaacaaccgaacctattaaacctgaacagactacagagtactccgcaatggctagcctggcaggggggctggacgatatgaaagctaatctggcttcacctacgccagccgatatcggctcttctgttccaggacctcaatcttaccctatcgtcaccggtagggatcttgcatccacgactttgccgggttatccaccccacgtacctcccgcgggccaagggagctacagcgcgccaacattgactgggatggtccctggatctccttattactattccgcagccgcaagaggtgcagcccctcccgctgccgccactgcttatgacagacactag

SEQ ID NO: 99611 - DNA, 1487 bp, Artificial Sequence
  derived and/or modified sequence
aaaaatcaaaatggatttagagaaaaattatccgactcctcggaccagcaggacaggacatggaggagtgaatcagcttgggggggtttttgtgaatggacggccactcccggatgtagtccgccagaggatagtggaacttgctcatcaaggtgtcaggccctgcgacatctccaggcagcttcgggtcagccatggttgtgtcagcaaaattcttggcaggtattatgagacaggaagcatcaagcctggggtaattggaggatccaaaccaaaggtcgccacacccaaagtggtggaaaaaatcgctgaatataaacgccaaaatcccaccatgtttgcctgggagatcagggaccggctgctggcagagcgggtgtgtgacaatgacaccgtgcctagcgtcagttccatcaacaggatcatccggacaaaagtacagcagccacccaaccaaccagtcccagcttccagtcacagcatagtgtccactggctccgtgacgcaggtgtcctcggtgagcacggattcggccggctcgtcgtactccatcagcggcatcctgggcatcacgtcccccagcgccgacaccaacaagcgcaagagagacgaaggtattcaggagtctccggtgccgaacggccactcgcttccgggcagagacttcctccggaagcagatgcggggagacttgttcacacagcagcagctggaggtgctggaccgcgtgtttgagaggcagcactactcagacatcttcaccaccacagagcccatcaagcccgagcagaccacagagtattcagccatggcctcgctggctggtgggctggacgacatgaaggccaatctggccagccccacccctgctgacatcgggagcagtgtgccaggcccgcagtcctaccccattgtgacaggccgtgacttggcgagcacgaccctccccgggtaccctccacacgtcccccccgctggacagggcagctactcagcaccgacgctgacagggatggtgcctggctccccctactattatagcgctgccgcccgaggagccgccccacctgcagccgccactgcctatgaccgtcactgacccttggagccaggcgggcaccaaacactgatggcacctattgagggtgacagccacccagccctcctgaagatagccagagagcccatgagaccgtcccccagcatcccccacttgcctgaagctcccctcttcctctcttcctccagggactctggggccctttggtggggccgttggacttctggatgcttgtctatttctaaaagccaatctatgagcttctcccgatggccactgggtctctgcaaaccaatagactgtcctgcaaataaccgcagccccagcccagcctgcctgtcctccagctgtctgactatccatccatcataaccaccccagcctgggaaggagagcttgcttttgttgcttcagcagcacccatgta

SEQ ID NO: 99612 - DNA, 1089 bp, Artificial Sequence
  derived and/or modified sequence
atggatctcgagaagaattatcctaccccacgaacctcacgaactggccatggcggagtgaaccagcttgggggtgtttttgtaaatgggagacccctgcccgatgtggtgcggcagagaattgtggaactggctcaccagggagttcgcccatgtgacattagtagacagctacgagtgtcacacggatgcgtgtccaaaattctgggcaggtattatgagactggctctataaaacccggtgtaatcgggggaagcaagcccaaggttgcgactcctaaggtcgtggaaaagatagccgagtacaaacggcaaaacccaaccatgttcgcttgggaaatcagagaccgccttctggcagagcgagtgtgtgataacgacaccgtcccttccgtgtcttccataaacaggataatcaggactaaagtccaacagcctcccaaccagccagttcccgcttctagtcactctattgtgagtactggatcagttactcaagtcagctctgtctccacagatagcgccggatcttcatactctatctcaggtatacttggtataacaagtccctcagccgacacaaacaagaggaagcgcgacgaagggatccaagagagcccggtgcccaacgggcactccctgccgggaagagacttcctccgcaaacagatgaggggcgatctcttcacgcagcagcaactggaggtgttggaccgggtctttgaaagacagcattatagcgacatctttacaactaccgagcctatcaagccggagcagaccacagagtacagcgctatggcctctctagcagggggactggacgatatgaaggccaacctggcttcgcctacaccggcagacatcgggagcagcgtgcctgggccacagtcatacccaattgtgacggggagagatctggcttctactacactgcctggttatcctccgcacgtacccccagcaggtcagggcagctattcagcgccaactttaacggggatggtgcccggaagtccttactattacagtgcggctgctaggggggctgcaccacccgctgccgcaacagcatatgatagacactag

SEQ ID NO: 99613 - DNA, 1444 bp, Artificial Sequence
  derived and/or modified sequence
aaaaatcaaaatggatttagagaaaaattatccgactcctcggaccagcaggacaggacatggaggagtgaatcagcttgggggggtttttgtgaatggacggccactcccggatgtagtccgccagaggatagtggaacttgctcatcaaggtgtcaggccctgcgacatctccaggcagcttcgggtcagccatggttgtgtcagcaaaattcttggcaggtattatgagacaggaagcatcaagcctggggtaattggaggatccaaaccaaaggtcgccacacccaaagtggtggaaaaaatcgctgaatataaacgccaaaatcccaccatgtttgcctgggagatcagggaccggctgctggcagagcgggtgtgtgacaatgacaccgtgcctagcgtcagttccatcaacaggatcatccggacaaaagtacagcagccacccaaccaaccagtcccagcttccagtcacagcatagtgtccactggctccgtgacgcaggtgtcctcggtgagcacggattcggccggctcgtcgtactccatcagcggcatcctgggcatcacgtcccccagcgccgacaccaacaagcgcaagagagacgaaggtattcaggagtctccggtgccgaacggccactcgcttccgggcagagacttcctccggaagcagatgcggggagacttgttcacacagcagcagctggaggtgctggaccgcgtgtttgagaggcagcactactcagacatcttcaccaccacagagcccatcaagcccgagcaggccgtgacttggcgagcacgaccctccccgggtaccctccacacgtcccccccgctggacagggcagctactcagcaccgacgctgacagggatggtgcctgggagtgagttttccgggagtccctacagccaccctcagtattcctcgtacaacgactcctggaggttccccaacccggggctgcttggctccccctactattatagcgctgccgcccgaggagccgccccacctgcagccgccactgcctatgaccgtcactgacccttggagccaggcgggcaccaaacactgatggcacctattgagggtgacagccacccagccctcctgaagatagccagagagcccatgagaccgtcccccagcatcccccacttgcctgaagctcccctcttcctctcttcctccagggactctggggccctttggtggggccgttggacttctggatgcttgtctatttctaaaagccaatctatgagcttctcccgatggccactgggtctctgcaaaccaatagactgtcctgcaaataaccgcagccccagcccagcctgcctgtcctccagctgtctgactatccatccatcataaccaccccagcctgggaaggagagcttgcttttgttgcttcagcagcacccatgta

SEQ ID NO: 99614 - DNA, 867 bp, Artificial Sequence
  derived and/or modified sequence
atggacctggagaagaactaccccacccccagaaccagcagaaccggccacggcggcgtgaaccagctgggcggcgtgttcgtgaacggcagacccctgcccgacgtggtgagacagagaatcgtggagctggcccaccagggcgtgagaccctgcgacatcagcagacagctgagagtgagccacggctgcgtgagcaagatcctgggcagatactacgagaccggcagcatcaagcccggcgtgatcggcggcagcaagcccaaggtggccacccccaaggtggtggagaagatcgccgagtacaagagacagaaccccaccatgttcgcctgggagatcagagacagactgctggccgagagagtgtgcgacaacgacaccgtgcccagcgtgagcagcatcaacagaatcatcagaaccaaggtgcagcagccccccaaccagcccgtgcccgccagcagccacagcatcgtgagcaccggcagcgtgacccaggtgagcagcgtgagcaccgacagcgccggcagcagctacagcatcagcggcatcctgggcatcaccagccccagcgccgacaccaacaagagaaagagagacgagggcatccaggagagccccgtgcccaacggccacagcctgcccggcagagacttcctgagaaagcagatgagaggcgacctgttcacccagcagcagctggaggtgctggacagagtgttcgagagacagcactacagcgacatcttcaccaccaccgagcccatcaagcccgagcaggccgtgacctggagagccagacccagccccggcaccctgcacaccagcccccccctggacagagccgccacccagcacagaagatag

SEQ ID NO: 99615 - DNA, 867 bp, Artificial Sequence
  derived and/or modified sequence
atggacttagaaaagaactatccaacaccgcgaacttcgaggaccggacatggcggagtgaaccaactcgggggggtgtttgtcaatggtcgacccctccctgacgtggtgcgccagaggattgtggaactggcacatcaaggggtaaggccgtgcgacatttcccgccaattgagagtgtcacacggttgtgtcagcaagattttagggaggtattacgagaccggcagcattaagcccggggtgatcggcggctctaaacccaaagtggccactcctaaggttgtcgagaaaatcgcggaatataaacgccagaacccgacgatgttcgcttgggagattagggacaggcttttagccgaacgagtgtgtgataatgacaccgtcccctccgttagttcaattaatcgtatcatacgaacgaaagtccagcagccacctaaccagcccgttcctgcctcatcccatagtatagtgtctactggctcggtcacccaggttagctcggtcagcaccgacagcgcgggctcttcttactctatttcgggcattctcggcatcacttcaccctctgctgatacaaacaaacggaagcgggacgaggggattcaagagtcgccagttccaaatggacatagtcttcctggtagagacttcctcaggaagcaaatgcgaggcgatctgttcacccagcaacaacttgaagttctcgacagggtcttcgaaaggcagcactattctgacatattcaccaccaccgagcccatcaagccggaacaggccgtaacatggcgcgcacgtcccagccccggaactctgcatacctcccccccccttgacagggccgcaacgcagcaccggcggtag

SEQ ID NO: 99616 - DNA, 867 bp, Artificial Sequence
  derived and/or modified sequence
atggacctggagaagaactaccccacccccaggaccagcaggactggacatggaggagtgaaccagctgggcggcgtgtttgtgaatggccggcccctgcctgatgtggtgcggcagagaattgtggagctggcccaccagggcgtgcggccctgtgacatcagccggcagctgcgggtgagccacggctgtgtgtccaagatcctgggccgctactatgaaacaggcagcatcaagccaggagtgattggaggcagcaagcccaaggtggccacccccaaggtggtggagaagattgctgagtacaagaggcagaaccccaccatgtttgcctgggagatccgggaccggctgctggccgagcgggtgtgtgacaatgacacagtgcccagcgtgagcagcatcaaccgcatcatccgcaccaaggtgcagcagccccccaaccagcctgtgcctgccagcagccacagcatcgtgtccactggatctgtgacccaggtgtcctctgtgtccacagacagcgctggcagcagctacagcatcagcggcatcctgggcatcaccagccccagcgctgacaccaacaagaggaagagagatgagggcatccaggagagccctgtgcccaacggccacagcctgcccggccgggacttcctgaggaagcagatgagaggagacctcttcacccagcagcagctggaggtgctggacagagtgtttgagcggcagcactacagcgacatcttcaccaccacagagcccatcaagccagagcaggccgtgacctggagggcccggcccagccctggcaccctgcacaccagcccccccctggaccgggccgccacccagcacagaagatag

SEQ ID NO: 99617 - DNA, 867 bp, Artificial Sequence
  derived and/or modified sequence
atggacctggagaagaactaccccaccccccggaccagccggaccggccacggcggcgtcaaccagctcggcggtgtttttgttaatgggagaccactgccagacgtcgtgcggcagagaattgtcgaactggcacatcagggtgtgagaccgtgtgacatcagcagacagctcagagtgagccacggttgtgtgagtaaaatcctggggaggtactacgagaccggcagtattaaacccggtgttatcggggggagcaagcccaaggtggccacccctaaggtcgtggaaaagatcgccgagtacaaaagacagaatcccaccatgttcgcctgggaaatccgcgatcgactgttagctgaacgggtgtgcgacaacgataccgtgccctcagtgtcaagtatcaatcgcatcatccggaccaaagtgcagcagcctccgaatcagcctgttccagcgagcagccattctattgtaagcactgggtctgtaacccaagtatcctccgtgtccaccgatagcgccgggtcatcctactctatcagtggcatcctggggataacttctccgtcagccgatacaaacaagagaaaacgggacgagggaatacaggaatctcctgttccaaatggacactcactccctggccgagacttcctgaggaaacagatgcgcggagacttgtttacacaacagcagctggaggtcctggatcgggtcttcgaacgccagcactatagcgatatctttaccacaaccgaacctattaagcccgagcaggcggtgacatggagagcacgtccctccccggggaccctgcataccagcccccctcttgaccgcgctgctacccagcatcgccggtag

SEQ ID NO: 99618 - DNA, 867 bp, Artificial Sequence
  derived and/or modified sequence
atggacctcgagaagaactatccaacacccagaacatcaaggaccggccatggaggagtgaaccaacttggcggagtttttgtaaacgggagaccgctcccagatgtggtgcgacagaggatagtcgagttagcccaccaaggtgtgcgaccttgcgacatctcccgacaacttcgtgtcagccacggttgcgtgagcaagattctggggagatattatgagactggatcaatcaagcctggagtcatcggaggctctaagcccaaggtcgcaactccaaaagtagtggaaaagatagccgagtataagcggcagaaccctacaatgttcgcttgggaaattcgcgatcggctgctcgccgagagggtttgtgataatgacactgtgcctagtgtgagcagcattaatcgcattatcagaacaaaggtgcagcagccccctaaccagcctgttcccgcttcctctcactccatcgtctcaactgggagtgtgacccaagttagttccgtgagcaccgactctgcgggaagctcctattcaatttccggtatccttgggattacttccccctccgcagacacaaataaacgcaagagggatgaaggcatccaagagagccccgtgccaaacgggcacagccttccagggcgtgattttttacgcaagcagatgagaggggatctatttacccagcagcagcttgaagtcctggatcgtgtttttgaaagacagcattattccgatattttcacgaccacagaaccaattaaacccgagcaagctgtaacttggcgcgctagaccttctccaggaacattacatactagcccaccgcttgacagagccgcaacacagcatagaaggtag

SEQ ID NO: 99619 - protein, 288 aa, Artificial Sequence
  derived and/or modified sequence
MDLEKNYPTPRTSRTGHGGVNQLGGVFVNGRPLPDVVRQRIVELAHQGVRPCDISRQLRVSHGCVSKILGRYYETGSIKPGVIGGSKPKVATPKVVEKIAEYKRQNPTMFAWEIRDRLLAERVCDNDTVPSVSSINRIIRTKVQQPPNQPVPASSHSIVSTGSVTQVSSVSTDSAGSSYSISGILGITSPSADTNKRKRDEGIQESPVPNGHSLPGRDFLRKQMRGDLFTQQQLEVLDRVFERQHYSDIFTTTEPIKPEQAVTWRARPSPGTLHTSPPLDRAATQHRR

SEQ ID NO: 99620 - protein, 328 aa, Artificial Sequence
  derived and/or modified sequence
MDLEKNYPTPRTSRTGHGGVNQLGGVFVNGRPLPDVVRQRIVELAHQGVRPCDISRQLRVSHGCVSKILGRYYETGSIKPGVIGGSKPKVATPKVVEKIAEYKRQNPTMFAWEIRDRLLAERVCDNDTVPSVSSINRIIRTKVQQPPNQPVPASSHSIVSTGSVTQVSSVSTDSAGSSYSISGILGITSPSADTNKRKRDEGIQESPVPNGHSLPGRDFLRKQMRGDLFTQQQLEVLDRVFERQHYSDIFTTTEPIKPEQTTEYSAMASLAGGLDDMKANLASPTPADIGSSVPGPQSYPIVTGSPYYYSAAARGAAPPAAATAYDRH

SEQ ID NO: 99621 - DNA, 987 bp, Artificial Sequence
  derived and/or modified sequence
atggacctggagaagaactaccccacccccagaaccagcagaaccggccacggcggcgtgaaccagctgggcggcgtgttcgtgaacggcagacccctgcccgacgtggtgagacagagaatcgtggagctggcccaccagggcgtgagaccctgcgacatcagcagacagctgagagtgagccacggctgcgtgagcaagatcctgggcagatactacgagaccggcagcatcaagcccggcgtgatcggcggcagcaagcccaaggtggccacccccaaggtggtggagaagatcgccgagtacaagagacagaaccccaccatgttcgcctgggagatcagagacagactgctggccgagagagtgtgcgacaacgacaccgtgcccagcgtgagcagcatcaacagaatcatcagaaccaaggtgcagcagccccccaaccagcccgtgcccgccagcagccacagcatcgtgagcaccggcagcgtgacccaggtgagcagcgtgagcaccgacagcgccggcagcagctacagcatcagcggcatcctgggcatcaccagccccagcgccgacaccaacaagagaaagagagacgagggcatccaggagagccccgtgcccaacggccacagcctgcccggcagagacttcctgagaaagcagatgagaggcgacctgttcacccagcagcagctggaggtgctggacagagtgttcgagagacagcactacagcgacatcttcaccaccaccgagcccatcaagcccgagcagaccaccgagtacagcgccatggccagcctggccggcggcctggacgacatgaaggccaacctggccagccccacccccgccgacatcggcagcagcgtgcccggcccccagagctaccccatcgtgaccggcagcccctactactacagcgccgccgccagaggcgccgccccccccgccgccgccaccgcctacgacagacactag

SEQ ID NO: 99622 - DNA, 987 bp, Artificial Sequence
  derived and/or modified sequence
atggatctggaaaagaactacccgactccacggacctcccgaacgggccatgggggggtgaaccagcttggcggcgtgttcgtgaatggacgcccccttcctgatgtcgtcagacagcgaatagtggagctcgcgcaccaaggagtgcggccgtgcgatattagtcgtcaactccgcgtgtcgcatgggtgtgtgtcaaagatcctgggcagatattatgagactggctctatcaaacctggcgtgatagggggcagcaagcctaaggtcgccacgccaaaggtcgtggagaagatagccgagtacaaaaggcagaaccctaccatgttcgcatgggagatccgagaccggttgctggccgaaagggtctgcgacaacgatactgtgccttccgtgagcagcattaaccgaattattcgaaccaaagtgcaacagccccccaaccagccggtgccggcaagttcacactccattgtcagcacaggctctgtcacacaggtgtcatctgtgtccactgatagtgctggaagctcttacagtatctcaggcattcttggcattactagcccaagtgccgatacaaacaagcgtaaacgcgacgaaggcattcaggagtccccagtacctaatggccacagtcttccaggccgggatttccttagaaagcagatgcgcggcgacctctttacacaacagcagctagaggtactggatagggtcttcgagcggcagcactattccgatattttcactaccactgagcctatcaagccagagcagaccacagagtattctgccatggcgagcttagctggaggcctggacgacatgaaggcaaatctggccagtcctacccctgccgatataggaagcagtgtgccaggcccacagtcttaccctattgtcacgggcagcccctattactattctgccgccgcccgaggagccgccccccccgccgcggccactgcttacgatcggcactag

SEQ ID NO: 99623 - DNA, 987 bp, Artificial Sequence
  derived and/or modified sequence
atggacctggagaagaactaccccacccccaggaccagcaggactggacatggaggagtgaaccagctgggcggcgtgtttgtgaatggccggcccctgcctgatgtggtgcggcagagaattgtggagctggcccaccagggcgtgcggccctgtgacatcagccggcagctgcgggtgagccacggctgtgtgtccaagatcctgggccgctactatgaaacaggcagcatcaagccaggagtgattggaggcagcaagcccaaggtggccacccccaaggtggtggagaagattgctgagtacaagaggcagaaccccaccatgtttgcctgggagatccgggaccggctgctggccgagcgggtgtgtgacaatgacacagtgcccagcgtgagcagcatcaaccgcatcatccgcaccaaggtgcagcagccccccaaccagcctgtgcctgccagcagccacagcatcgtgtccactggatctgtgacccaggtgtcctctgtgtccacagacagcgctggcagcagctacagcatcagcggcatcctgggcatcaccagccccagcgctgacaccaacaagaggaagagagatgagggcatccaggagagccctgtgcccaacggccacagcctgcccggccgggacttcctgaggaagcagatgagaggagacctcttcacccagcagcagctggaggtgctggacagagtgtttgagcggcagcactacagcgacatcttcaccaccacagagcccatcaagccagagcagaccacagagtacagcgccatggccagcctggccggcggcctggatgacatgaaggccaacctggccagccccaccccagctgacatcggcagctctgtgcccggcccccagagctaccccatcgtgacaggcagcccctactactacagcgctgctgcccggggggccgcccccccagctgctgccacagcctatgacagacactag

SEQ ID NO: 99624 - DNA, 987 bp, Artificial Sequence
  derived and/or modified sequence
atggacctggagaagaactaccccaccccccggaccagccggaccggtcacggtggagtaaaccagcttggtggcgtctttgtaaatggcagaccactcccagacgtggttaggcagcgcattgtcgagcttgcccaccaaggggtcagaccttgtgatatcagtcgtcagctccgggtcagccatggatgcgtgagcaaaattcttggacgttattacgaaacaggctcgatcaagcccggagttatagggggcagtaaacctaaggttgctacgcctaaggtcgtcgagaagatcgccgagtacaagcgacagaatccaaccatgtttgcgtgggagattcgtgatcgattgctggcagagcgagtttgtgataacgacactgtgccaagcgtgtcttccattaatcggatcattcgaacaaaggtccagcagcccccaaaccagcctgttcccgcttcatcacactcaatcgtgtctactggcagcgtaacccaagtaagttccgttagtaccgattctgccggcagttcctactccatcagcggtatcctgggaataaccagccccagtgccgacaccaataaacgaaaacgggatgagggaatccaagaatcaccagtacccaacggccattctctgcccggccgagactttttgagaaagcaaatgagaggggatctattcactcagcagcaattagaggtccttgaccgcgtgttcgagcgacaacattattctgatatctttactaccacggaacctatcaaacccgaacagaccaccgagtactccgcaatggcttcactggctggtggactcgacgacatgaaggcgaatcttgcaagcccaacacctgcagacatagggagctccgtgccggggccccagagctaccctattgtgaccgggtccccctattattacagcgccgccgcccgcggagcagcccctccagccgctgctacagcgtacgacagacattag

SEQ ID NO: 99625 - DNA, 996 bp, Artificial Sequence
  derived and/or modified sequence
atggatttagagaaaaattatccgactcctcggaccagcaggacaggacatggaggagtgaatcagcttgggggggtttttgtgaatggacggccactcccggatgtagtccgccagaggatagtggaacttgctcatcaaggtgtcaggccctgcgacatctccaggcagcttcgggtcagccatggttgtgtcagcaaaattcttggcaggtattatgagacaggaagcatcaagcctggggtaattggaggatccaaaccaaaggtcgccacacccaaagtggtggaaaaaatcgctgaatataaacgccaaaatcccaccatgtttgcctgggagatcagggaccggctgctggcagagcgggtgtgtgacaatgacaccgtgcctagcgtcagttccatcaacaggatcatccggacaaaagtacagcagccacccaaccaaccagtcccagcttccagtcacagcatagtgtccactggctccgtgacgcaggtgtcctcggtgagcacggattcggccggctcgtcgtactccatcagcggcatcctgggcatcacgtcccccagcgccgacaccaacaagcgcaagagagacgaaggtattcaggagtctccggtgccgaacggccactcgcttccgggcagagacttcctccggaagcagatgcggggagacttgttcacacagcagcagctggaggtgctggaccgcgtgtttgagaggcagcactactcagacatcttcaccaccacagagcccatcaagcccgagcagaccacagagtattcagccatggcctcgctggctggtgggctggacgacatgaaggccaatctggccagccccacccctgctgacatcgggagcagtgtgccaggcccgcagtcctaccccattgtgacaggctccccctactattatagcgctgccgcccgaggagccgccccacctgcagccgccactgcctatgaccgtcactgacccttggag

SEQ ID NO: 99626 - DNA, 987 bp, Artificial Sequence
  derived and/or modified sequence
atggatctggaaaaaaactatcctacccctagaacctcgcgaacagggcacggtggcgtcaatcagctgggaggtgttttcgtcaacggaaggccactcccagatgtggtgcgtcagcggatcgtggagcttgcgcaccagggggttaggccttgcgacatatcgagacagttgcgagtcagccacggttgtgtgagcaagatccttgggaggtattacgagactgggtcaataaagcccggagtgatcggcggtagcaagcctaaggtggccacgcccaaggtggtcgagaagatcgctgagtataaacgccagaatcctacgatgttcgcctgggagataagagacaggctactcgccgagcgcgtttgcgacaatgatacagttccatcggtgtccagcatcaatcgaatcatacggactaaggtgcagcagccaccgaaccagccagtccctgcctcttcccactctatcgtgtccacgggttccgtgacccaggtaagttctgtatcaaccgactcggctggatccagctatagcattagcggcattctgggaatcacgtcaccaagcgccgataccaataaaagaaagcgtgacgagggaatccaagaatcccccgttccgaacggccactcactgcctggcagagactttttgagaaagcagatgagaggagacttgtttacacagcagcagctcgaggtattagatcgcgtctttgagcgacaacactacagtgatattttcacaaccactgagccaatcaagccagagcagaccacagaatacagtgccatggccagtcttgccggagggctggatgatatgaaagccaacctggcatcaccaactcccgcagacattggttcgagtgttcccggaccacagagctatcctatcgtcacggggagcccctactactatagtgccgctgcccgaggcgctgcccctccagctgccgcaaccgcatatgaccgtcattag

SEQ ID NO: 99627 - protein, 319 aa, Artificial Sequence
  derived and/or modified sequence
MDLEKNYPTPRTSRTGHGGVNQLGGVFVNGRPLPDVVRQRIVELAHQGVRPCDISRQLRVSHGCVSKILGRYYETGSIKPGVIGGSKPKVATPKVVEKIAEYKRQNPTMFAWEIRDRLLAERVCDNDTVPSVSSINRIIRTKVQQPPNQPVPASSHSIGIQESPVPNGHSLPGRDFLRKQMRGDLFTQQQLEVLDRVFERQHYSDIFTTTEPIKPEQTTEYSAMASLAGGLDDMKANLASPTPADIGSSVPGPQSYPIVTGRDLASTTLPGYPPHVPPAGQGSYSAPTLTGMVPGSPYYYSAAARGAAPPAAATAYDRH

SEQ ID NO: 99628 - DNA, 960 bp, Artificial Sequence
  derived and/or modified sequence
atggacctggagaagaactaccccacccccagaaccagcagaaccggccacggcggcgtgaaccagctgggcggcgtgttcgtgaacggcagacccctgcccgacgtggtgagacagagaatcgtggagctggcccaccagggcgtgagaccctgcgacatcagcagacagctgagagtgagccacggctgcgtgagcaagatcctgggcagatactacgagaccggcagcatcaagcccggcgtgatcggcggcagcaagcccaaggtggccacccccaaggtggtggagaagatcgccgagtacaagagacagaaccccaccatgttcgcctgggagatcagagacagactgctggccgagagagtgtgcgacaacgacaccgtgcccagcgtgagcagcatcaacagaatcatcagaaccaaggtgcagcagccccccaaccagcccgtgcccgccagcagccacagcatcggcatccaggagagccccgtgcccaacggccacagcctgcccggcagagacttcctgagaaagcagatgagaggcgacctgttcacccagcagcagctggaggtgctggacagagtgttcgagagacagcactacagcgacatcttcaccaccaccgagcccatcaagcccgagcagaccaccgagtacagcgccatggccagcctggccggcggcctggacgacatgaaggccaacctggccagccccacccccgccgacatcggcagcagcgtgcccggcccccagagctaccccatcgtgaccggcagagacctggccagcaccaccctgcccggctaccccccccacgtgccccccgccggccagggcagctacagcgcccccaccctgaccggcatggtgcccggcagcccctactactacagcgccgccgccagaggcgccgccccccccgccgccgccaccgcctacgacagacactag

SEQ ID NO: 99629 - DNA, 960 bp, Artificial Sequence
  derived and/or modified sequence
atggacttggaaaagaattaccccacaccccggacatccaggactggccacggcggtgtaaatcagctcgggggtgtgttcgttaatggcagacccctgccagatgtcgttaggcagcggatcgtggagctggcacaccaaggagtgagaccttgcgacatcagccggcagttgagggtcagtcacggctgtgtgtcaaaaattctcgggcggtattatgagaccgggagtataaaacctggggttattggagggtctaagccaaaagttgccacgccaaaggtggtcgagaagatcgctgagtacaagcgacaaaaccccaccatgtttgcgtgggaaatacgcgataggctactggcagaacgtgtctgcgacaatgacacggtgcccagtgtttccagtatcaaccgaattatcaggactaaagtgcagcagccacccaatcaaccagtgcccgcctcatcccattctatcggcatccaagaatccccagtcccgaacgggcactccctgcccggcagggacttcctaagaaaacaaatgagaggcgatctcttcacccagcagcagctggaggtcttggatcgcgtattcgagagacagcactattcagacatcttcactacaacagagccaatcaaaccagagcagacaactgaatacagcgccatggcttctttagcagggggtctggacgatatgaaggctaatctggctagtcccacacccgccgacatcggaagcagcgtgccgggaccacaatcatacccaatcgtgaccgggagagacctggcctcaactacactcccaggctatccaccgcacgtcccgccagcaggtcaggggagctattcggcgcctacactaaccgggatggtaccaggtagcccgtattattactctgcagcagcaagaggggctgcgccaccagctgcagcgaccgcatacgatcggcactag

SEQ ID NO: 99630 - DNA, 960 bp, Artificial Sequence
  derived and/or modified sequence
atggacctggagaagaactaccccacccccaggaccagcaggactggacatggaggagtgaaccagctgggcggcgtgtttgtgaatggccggcccctgcctgatgtggtgcggcagagaattgtggagctggcccaccagggcgtgcggccctgtgacatcagccggcagctgcgggtgagccacggctgtgtgtccaagatcctgggccgctactatgaaacaggcagcatcaagccaggagtgattggaggcagcaagcccaaggtggccacccccaaggtggtggagaagattgctgagtacaagaggcagaaccccaccatgtttgcctgggagatccgggaccggctgctggccgagcgggtgtgtgacaatgacacagtgcccagcgtgagcagcatcaaccgcatcatccgcaccaaggtgcagcagccccccaaccagcctgtgcctgccagcagccacagcatcggcatccaggagagccctgtgcccaacggccacagcctgcccggccgggacttcctgaggaagcagatgagaggagacctcttcacccagcagcagctggaggtgctggacagagtgtttgagcggcagcactacagcgacatcttcaccaccacagagcccatcaagccagagcagaccacagagtacagcgccatggccagcctggccggcggcctggatgacatgaaggccaacctggccagccccaccccagctgacatcggcagctctgtgcccggcccccagagctaccccatcgtgacaggccgggacctggccagcaccaccctgcccggctacccacctcatgtgcccccagctggccagggcagctacagcgcccccaccctgaccggcatggtgcccggcagcccctactactacagcgctgctgcccggggagctgcccctcctgctgctgccacagcctatgacagacactag

SEQ ID NO: 99631 - DNA, 960 bp, Artificial Sequence
  derived and/or modified sequence
atggacctggagaagaactaccccaccccccggaccagccggaccggccatgggggtgtgaatcaactgggaggggtgttcgtcaacggacgtcccctgcccgatgtcgtgcggcagcgaatagtggagcttgcccatcagggggttcggccctgcgatatctcccggcagctgcgggtgagtcatgggtgtgtgagcaagatcctggggcgctattatgaaacagggagtatcaagccaggcgtaattggcggttcgaagcctaaggtcgccacgccgaaggtggtcgagaagatcgccgaatacaaaagacagaacccaactatgtttgcctgggagatccgagaccggttgctggctgagcgcgtttgcgacaacgacactgtcccttccgtatcctctataaaccgcattattcgcaccaaggtacaacagccgcctaatcagccggttcccgccagtagccactccattggcatccaggagtcgcctgttccaaatgggcatagcttacctgggcgggattttctgagaaagcaaatgagaggcgatttgttcacccaacagcagttggaggtgctggacagggtctttgagaggcaacactactccgacatattcacgacgacagaacctataaaacctgaacagacaactgagtactccgctatggcctccctcgcaggaggactggatgatatgaaggccaatttggcctctcctacgccggcagacatcggctcttccgtaccaggacctcaatcttaccctattgtgaccggacgagacctcgccagcactacacttcccggctacccacctcatgtgccccccgctgggcagggaagctactcagcacctaccctgactggcatggtcccagggagcccctattattactcggccgcggccagaggcgctgctccacccgcagctgctactgcctatgatcggcattag

SEQ ID NO: 99632 - DNA, 969 bp, Artificial Sequence
  derived and/or modified sequence
atggatttagagaaaaattatccgactcctcggaccagcaggacaggacatggaggagtgaatcagcttgggggggtttttgtgaatggacggccactcccggatgtagtccgccagaggatagtggaacttgctcatcaaggtgtcaggccctgcgacatctccaggcagcttcgggtcagccatggttgtgtcagcaaaattcttggcaggtattatgagacaggaagcatcaagcctggggtaattggaggatccaaaccaaaggtcgccacacccaaagtggtggaaaaaatcgctgaatataaacgccaaaatcccaccatgtttgcctgggagatcagggaccggctgctggcagagcgggtgtgtgacaatgacaccgtgcctagcgtcagttccatcaacaggatcatccggacaaaagtacagcagccacccaaccaaccagtcccagcttccagtcacagcataggtattcaggagtctccggtgccgaacggccactcgcttccgggcagagacttcctccggaagcagatgcggggagacttgttcacacagcagcagctggaggtgctggaccgcgtgtttgagaggcagcactactcagacatcttcaccaccacagagcccatcaagcccgagcagaccacagagtattcagccatggcctcgctggctggtgggctggacgacatgaaggccaatctggccagccccacccctgctgacatcgggagcagtgtgccaggcccgcagtcctaccccattgtgacaggccgtgacttggcgagcacgaccctccccgggtaccctccacacgtcccccccgctggacagggcagctactcagcaccgacgctgacagggatggtgcctggctccccctactattatagcgctgccgcccgaggagccgccccacctgcagccgccactgcctatgaccgtcactgacccttggag

SEQ ID NO: 99633 - DNA, 960 bp, Artificial Sequence
  derived and/or modified sequence
atggacctggagaagaattatcccacccctaggacatcccgcacgggacacggcggagtgaatcagcttggaggtgtttttgtgaatggcaggccacttcccgatgtagtgcggcagaggatcgtggaactcgcccatcaaggagtacggccatgcgacataagtcgccaactccgcgtgtcccacgggtgtgtgagcaagattctcggaaggtactacgagaccggctccatcaaaccaggcgttatcggtgggagcaaacctaaggtggcaactccgaaagtcgtcgaaaaaatagccgaatataaacgtcagaaccccacaatgtttgcctgggagatcagagaccgtctcctggctgaacgggtttgcgacaacgatacggtgccctctgtgtcctcaataaatcgaatcatccgaacgaaggttcaacagcccccaaatcagcctgtgcctgcaagctcccattctattggcatccaggagtcccccgtaccaaatggacattcattgccagggagggactttttgaggaaacaaatgaggggcgacctctttacccaacagcagctggaggtgctcgacagagtgtttgaacgacaacattactccgacatctttacaactacagagccaattaagccggaacagacaaccgaatactcagccatggctagtctcgccggaggattggacgatatgaaggccaatctggcatctcctacacctgccgacataggctcctccgtgcctgggccacaatcctacccaatcgtcactggtcgtgaccttgcttccactaccctcccaggataccctccccatgtgccacctgccggacaaggctcatactctgcacctactctcacaggaatggtgccgggaagcccatattattattccgcagcagcgaggggagccgctccaccagcagccgcaacagcctatgatcggcattag

SEQ ID NO: 99634 - protein, 348 aa, Artificial Sequence
  derived and/or modified sequence
MDLEKNYPTPRTSRTGHGGVNQLGGVFVNGRPLPDVVRQRIVELAHQGVRPCDISRQLRVSHGCVSKILGRYYETGSIKPGVIGGSKPKVATPKVVEKIAEYKRQNPTMFAWEIRDRLLAERVCDNDTVPSVSSINRIIRTKVQQPPNQPVPASSHSIGIQESPVPNGHSLPGRDFLRKQMRGDLFTQQQLEVLDRVFERQHYSDIFTTTEPIKPEQTTEYSAMASLAGGLDDMKANLASPTPADIGSSVPGPQSYPIVTGRDLASTTLPGYPPHVPPAGQGSYSAPTLTGMVPGSEFSGSPYSHPQYSSYNDSWRFPNPGLLGSPYYYSAAARGAAPPAAATAYDRH

SEQ ID NO: 99635 - DNA, 1047 bp, Artificial Sequence
  derived and/or modified sequence
atggacctggagaagaactaccccacccccagaaccagcagaaccggccacggcggcgtgaaccagctgggcggcgtgttcgtgaacggcagacccctgcccgacgtggtgagacagagaatcgtggagctggcccaccagggcgtgagaccctgcgacatcagcagacagctgagagtgagccacggctgcgtgagcaagatcctgggcagatactacgagaccggcagcatcaagcccggcgtgatcggcggcagcaagcccaaggtggccacccccaaggtggtggagaagatcgccgagtacaagagacagaaccccaccatgttcgcctgggagatcagagacagactgctggccgagagagtgtgcgacaacgacaccgtgcccagcgtgagcagcatcaacagaatcatcagaaccaaggtgcagcagccccccaaccagcccgtgcccgccagcagccacagcatcggcatccaggagagccccgtgcccaacggccacagcctgcccggcagagacttcctgagaaagcagatgagaggcgacctgttcacccagcagcagctggaggtgctggacagagtgttcgagagacagcactacagcgacatcttcaccaccaccgagcccatcaagcccgagcagaccaccgagtacagcgccatggccagcctggccggcggcctggacgacatgaaggccaacctggccagccccacccccgccgacatcggcagcagcgtgcccggcccccagagctaccccatcgtgaccggcagagacctggccagcaccaccctgcccggctaccccccccacgtgccccccgccggccagggcagctacagcgcccccaccctgaccggcatggtgcccggcagcgagttcagcggcagcccctacagccacccccagtacagcagctacaacgacagctggagattccccaaccccggcctgctgggcagcccctactactacagcgccgccgccagaggcgccgccccccccgccgccgccaccgcctacgacagacactag

SEQ ID NO: 99636 - DNA, 1047 bp, Artificial Sequence
  derived and/or modified sequence
atggacctggagaaaaactaccctacccccagaacatcaagaactggacacggcggcgtgaaccagctaggaggagtattcgtgaatggtcgcccgctgcccgacgtcgtgcggcagagaattgtggaactggcccaccaaggcgttcgcccttgtgacatttcccggcagttgcgtgtcagccacggctgcgtgtctaaaatcctggggagatattacgagaccggctccattaagcctggagtcattggcggctccaagcctaaggtcgctacacctaaagtggtggagaagatcgcagaatacaaacgtcagaaccccaccatgttcgcatgggagatccgcgacagattacttgctgagagggtgtgtgacaacgacaccgtgccatccgtcagttcaattaatcgcatcattagaaccaaagtgcagcaacccccaaaccaacccgtacccgcttctagtcattcaattggtattcaagagtctccagtccccaatggacattctctccccggacgtgacttcttaagaaagcagatgagaggtgacctgttcacgcagcagcagctggaagtgcttgatagggtcttcgaaagacaacactatagcgacattttcacaacaacggagccaattaaaccagagcagacgaccgaatactcagccatggcaagcctcgcgggtggactggatgatatgaaggcgaatttagcctcacccactcctgcagatataggttcgtctgtacccggccctcagtcttaccctatcgtgacaggtagggatctggcctccacgactctgccaggctatccaccacacgtcccgcccgccggacaaggctcttacagtgcccccaccttaactggaatggtgccagggagtgagttctctggttcaccttacagtcatccacagtattcctcatacaacgattcctggagatttccaaaccccggtctgctgggtagtccctattactatagcgcagcggcaagaggagccgctcccccagccgccgctacggcctatgatcgacattag

SEQ ID NO: 99637 - DNA, 1047 bp, Artificial Sequence
  derived and/or modified sequence
atggacctggagaagaactaccccacccccaggaccagcaggactggacatggaggagtgaaccagctgggcggcgtgtttgtgaatggccggcccctgcctgatgtggtgcggcagagaattgtggagctggcccaccagggcgtgcggccctgtgacatcagccggcagctgcgggtgagccacggctgtgtgtccaagatcctgggccgctactatgaaacaggcagcatcaagccaggagtgattggaggcagcaagcccaaggtggccacccccaaggtggtggagaagattgctgagtacaagaggcagaaccccaccatgtttgcctgggagatccgggaccggctgctggccgagcgggtgtgtgacaatgacacagtgcccagcgtgagcagcatcaaccgcatcatccgcaccaaggtgcagcagccccccaaccagcctgtgcctgccagcagccacagcatcggcatccaggagagccctgtgcccaacggccacagcctgcccggccgggacttcctgaggaagcagatgagaggagacctcttcacccagcagcagctggaggtgctggacagagtgtttgagcggcagcactacagcgacatcttcaccaccacagagcccatcaagccagagcagaccacagagtacagcgccatggccagcctggccggcggcctggatgacatgaaggccaacctggccagccccaccccagctgacatcggcagctctgtgcccggcccccagagctaccccatcgtgacaggccgggacctggccagcaccaccctgcccggctacccacctcatgtgcccccagctggccagggcagctacagcgcccccaccctgaccggcatggtgcccggcagcgagttcagcggcagcccctacagccacccccagtacagcagctacaatgacagctggaggttccccaaccctggcctgctgggcagcccctactactacagcgctgctgcccggggggccgcccccccagctgctgccacagcctatgacagacactag

SEQ ID NO: 99638 - DNA, 1047 bp, Artificial Sequence
  derived and/or modified sequence
atggacctggagaagaactaccccaccccccggaccagccggaccggccatgggggtgtcaatcagttggggggggtgttcgtcaacggccgccctctgcccgatgtggtgaggcagagaatcgttgagctggcccatcagggggtgaggccgtgcgatatctcgcgccagttgagggtgagtcacgggtgcgtgtctaaaattctaggtcgctactacgagacgggtagcatcaagccaggagtgataggaggaagtaagcccaaggtcgccaccccgaaggtggtagaaaaaattgccgagtacaaacgccagaaccccacaatgttcgcctgggagattagagataggctgctggcagaaagggtttgtgataatgacacagtgccttcagtctcgtcgatcaacaggatcattcggacaaaggttcagcagcctccgaatcagccagttccggcatcctcccattccattggaatccaggaaagccccgtgccaaacggccatagcctacccggccgggactttctacgtaaacagatgcggggcgatctgtttactcagcagcaactcgaagtgttggatcgcgtttttgagcgacagcactactctgatattttcacgacaacagaaccgatcaagcccgagcagacaacagagtattccgccatggcaagcctcgccggtggattggatgacatgaaagctaatctggcttcaccaacaccggcagacatcggcagcagtgtgcctggcccccagtcttatccaattgttaccgggcgggacctggcatcaacgacccttccgggatacccaccacacgtgccgccagcagggcagggaagctactcggctcccaccctgactgggatggttccgggttccgagttttctggttcgccatattctcacccccagtattcctcctacaatgattcttggagattccccaatcccggtctgctaggcagtccttattattattctgccgcggctagaggcgccgcgccaccagcagcagcaactgcgtatgaccgacactag

SEQ ID NO: 99639 - DNA, 1056 bp, Artificial Sequence
  derived and/or modified sequence
atggatttagagaaaaattatccgactcctcggaccagcaggacaggacatggaggagtgaatcagcttgggggggtttttgtgaatggacggccactcccggatgtagtccgccagaggatagtggaacttgctcatcaaggtgtcaggccctgcgacatctccaggcagcttcgggtcagccatggttgtgtcagcaaaattcttggcaggtattatgagacaggaagcatcaagcctggggtaattggaggatccaaaccaaaggtcgccacacccaaagtggtggaaaaaatcgctgaatataaacgccaaaatcccaccatgtttgcctgggagatcagggaccggctgctggcagagcgggtgtgtgacaatgacaccgtgcctagcgtcagttccatcaacaggatcatccggacaaaagtacagcagccacccaaccaaccagtcccagcttccagtcacagcataggtattcaggagtctccggtgccgaacggccactcgcttccgggcagagacttcctccggaagcagatgcggggagacttgttcacacagcagcagctggaggtgctggaccgcgtgtttgagaggcagcactactcagacatcttcaccaccacagagcccatcaagcccgagcagaccacagagtattcagccatggcctcgctggctggtgggctggacgacatgaaggccaatctggccagccccacccctgctgacatcgggagcagtgtgccaggcccgcagtcctaccccattgtgacaggccgtgacttggcgagcacgaccctccccgggtaccctccacacgtcccccccgctggacagggcagctactcagcaccgacgctgacagggatggtgcctgggagtgagttttccgggagtccctacagccaccctcagtattcctcgtacaacgactcctggaggttccccaacccggggctgcttggctccccctactattatagcgctgccgcccgaggagccgccccacctgcagccgccactgcctatgaccgtcactgacccttggag

SEQ ID NO: 99640 - DNA, 1047 bp, Artificial Sequence
  derived and/or modified sequence
atggatctggaaaagaactaccccacaccacggacaagccggactgggcacgggggtgttaaccagctgggaggtgtgtttgtaaacggacggcctctacctgatgtggtgaggcaaaggattgtagagcttgcacaccaaggggtgcgcccttgtgacatcagccggcaactgcgcgtgtcccacgggtgcgttagtaagatcctgggcaggtactacgagactggtagtatcaagcccggagtgattggcggatctaagcctaaagtagccacaccaaaggtggtggaaaagatcgcggagtacaagcgccagaatccgaccatgtttgcgtgggaaatcagagaccggttactggctgagcgagtttgcgacaatgatacagtcccctctgtgtccagcattaataggattattcgtacgaaagtgcaacaacctcctaatcagccagtcccagccagctctcattccatcggcatccaggaaagccccgtccctaatggccacagtttacccggacgggatttcttgcggaaacaaatgagaggcgacctgttcacacaacagcaactggaagtgctagatagggtattcgaacggcagcactatagtgacatcttcacgactacagagcctattaagccggagcagaccacagagtactcagcaatggccagcctggcaggcggtctggacgacatgaaagcaaatcttgcctccccaacacctgcagatatcggctcctcggttccaggtccacaatcatatcccattgtgacagggcgagacctcgcttccaccactctgcccggttaccccccacacgtgccgccagctggccagggttcatatagcgcacccacactaacagggatggttcccggatcagagttctctggctccccatatagtcacccgcagtacagctcctataatgactcgtggcggtttcccaatcctggattactggggtctccctattattactctgccgctgccaggggtgcagcacctcctgctgcggcaaccgcatatgaccgacattag

SEQ ID NO: 99641 - protein, 291 aa, Artificial Sequence
  derived and/or modified sequence
MDLEKNYPTPRTSRTGHGGVNQLGGVFVNGRPLPDVVRQRIVELAHQGVRPCDISRQLRVSHGCVSKILGRIIRTKVQQPPNQPVPASSHSIVSTGSVTQVSSVSTDSAGSSYSISGILGITSPSADTNKRKRDEGIQESPVPNGHSLPGRDFLRKQMRGDLFTQQQLEVLDRVFERQHYSDIFTTTEPIKPEQTTEYSAMASLAGGLDDMKANLASPTPADIGSSVPGPQSYPIVTGSEFSGSPYSHPQYSSYNDSWRFPNPGLLGSPYYYSAAARGAAPPAAATAYDRH

SEQ ID NO: 99642 - DNA, 876 bp, Artificial Sequence
  derived and/or modified sequence
atggacctggagaagaactaccccacccccagaaccagcagaaccggccacggcggcgtgaaccagctgggcggcgtgttcgtgaacggcagacccctgcccgacgtggtgagacagagaatcgtggagctggcccaccagggcgtgagaccctgcgacatcagcagacagctgagagtgagccacggctgcgtgagcaagatcctgggcagaatcatcagaaccaaggtgcagcagccccccaaccagcccgtgcccgccagcagccacagcatcgtgagcaccggcagcgtgacccaggtgagcagcgtgagcaccgacagcgccggcagcagctacagcatcagcggcatcctgggcatcaccagccccagcgccgacaccaacaagagaaagagagacgagggcatccaggagagccccgtgcccaacggccacagcctgcccggcagagacttcctgagaaagcagatgagaggcgacctgttcacccagcagcagctggaggtgctggacagagtgttcgagagacagcactacagcgacatcttcaccaccaccgagcccatcaagcccgagcagaccaccgagtacagcgccatggccagcctggccggcggcctggacgacatgaaggccaacctggccagccccacccccgccgacatcggcagcagcgtgcccggcccccagagctaccccatcgtgaccggcagcgagttcagcggcagcccctacagccacccccagtacagcagctacaacgacagctggagattccccaaccccggcctgctgggcagcccctactactacagcgccgccgccagaggcgccgccccccccgccgccgccaccgcctacgacagacactag

SEQ ID NO: 99643 - DNA, 876 bp, Artificial Sequence
  derived and/or modified sequence
atggatcttgagaagaattatccaacaccgcggacttcacggaccggtcacggtggagtcaaccagctagggggagtgtttgtgaacggccgtccactgccagacgtggtacggcagcgcatcgtggagcttgctcatcaaggagtgagaccatgcgacatcagtagacaactccgtgttagccacggttgcgtctccaaaattcttggaagaatcatccgaacaaaagtccagcaaccccccaaccagcccgtaccggcatcatcccacagcatagtgagcacaggctcagtgacgcaggtcagctcagtatccaccgatagcgctggttcatcctattccatctccggcatcttgggcattacgtcaccaagtgctgataccaacaaaaggaagcgcgacgagggaatccaggagtcccccgtccctaacggacatagtttgccggggagagactttctgagaaaacagatgagaggggatctcttcacacaacagcagctcgaggtgctagacagagtgtttgagcgacaacactactccgatatctttactaccaccgagccaatcaagcccgaacagaccacggaatactcagctatggcttcccttgcgggaggccttgacgatatgaaggccaacttggccagcccaactccagcagacatcgggtcttccgtccctgggcctcagtcttaccccatcgtcactggatcagagttctcgggttccccctactcccacccccagtattcctcctataacgacagttggcggttccctaatcccggattactcggcagcccctactattactctgccgcggcgcggggagcagcgccaccagctgccgctactgcctacgatcgccattag

SEQ ID NO: 99644 - DNA, 876 bp, Artificial Sequence
  derived and/or modified sequence
atggacctggagaagaactaccccacccccaggaccagcaggactggacatggaggagtgaaccagctgggcggcgtgtttgtgaatggccggcccctgcctgatgtggtgcggcagagaattgtggagctggcccaccagggcgtgcggccctgtgacatcagccggcagctgcgggtgagccacggctgtgtgtccaagatcctgggccgcatcatccgcaccaaggtgcagcagccccccaaccagcctgtgcctgccagcagccacagcatcgtgtccactggatctgtgacccaggtgtcctctgtgtccacagacagcgctggcagcagctacagcatcagcggcatcctgggcatcaccagccccagcgctgacaccaacaagaggaagagagatgagggcatccaggagagccctgtgcccaacggccacagcctgcccggccgggacttcctgaggaagcagatgagaggagacctcttcacccagcagcagctggaggtgctggacagagtgtttgagcggcagcactacagcgacatcttcaccaccacagagcccatcaagccagagcagaccacagagtacagcgccatggccagcctggccggcggcctggatgacatgaaggccaacctggccagccccaccccagctgacatcggcagctctgtgcccggcccccagagctaccccatcgtgactggaagtgagttcagcggcagcccctacagccacccccagtacagcagctacaatgacagctggaggttccccaaccctggcctgctgggcagcccctactactacagcgctgctgcccggggagctgcccctcctgctgctgccacagcctatgacagacactag

SEQ ID NO: 99645 - DNA, 876 bp, Artificial Sequence
  derived and/or modified sequence
atggacctggagaagaactaccccaccccccggaccagccggaccggccatgggggcgtgaatcaactgggaggggtgttcgtgaatggccgtccactgcctgacgtcgtacgacaacgtattgtagagctggctcaccagggcgtcagaccctgcgacatttcgagacagttgcgcgtatcacacgggtgcgtgtctaaaatactcggtaggatcatcaggacgaaagtgcaacagccacctaaccaacctgtccccgcatccagccactccattgtctccaccgggagtgtgacgcaggttagttctgtctccacggacagcgctgggagctcatattccatcagcggaatcctcggcatcacgtccccttcagcagataccaataagaggaagcgagatgaagggatccaagaaagccccgtccccaatggccattccctcccgggtcgcgatttcttaagaaagcaaatgcgcggcgatctctttactcagcagcagctcgaggtcttggaccgtgtctttgagaggcagcattactcagatatctttacaaccaccgagccaatcaagccagagcaaactacggaatactccgctatggctagtttggctggtggtctcgacgatatgaaagccaacttagcaagtcctacccccgccgacattggctctagcgtacctggtcctcagagctaccctatcgttacggggagtgagttttcggggtccccatactcacacccacagtactcatcttataacgacagttggaggttcccaaacccaggacttctgggatccccttactactattccgcagccgctaggggtgcagctcccccagctgctgctaccgcatacgaccggcactag

SEQ ID NO: 99646 - DNA, 885 bp, Artificial Sequence
  derived and/or modified sequence
atggatttagagaaaaattatccgactcctcggaccagcaggacaggacatggaggagtgaatcagcttgggggggtttttgtgaatggacggccactcccggatgtagtccgccagaggatagtggaacttgctcatcaaggtgtcaggccctgcgacatctccaggcagcttcgggtcagccatggttgtgtcagcaaaattcttggcaggatcatccggacaaaagtacagcagccacccaaccaaccagtcccagcttccagtcacagcatagtgtccactggctccgtgacgcaggtgtcctcggtgagcacggattcggccggctcgtcgtactccatcagcggcatcctgggcatcacgtcccccagcgccgacaccaacaagcgcaagagagacgaaggtattcaggagtctccggtgccgaacggccactcgcttccgggcagagacttcctccggaagcagatgcggggagacttgttcacacagcagcagctggaggtgctggaccgcgtgtttgagaggcagcactactcagacatcttcaccaccacagagcccatcaagcccgagcagaccacagagtattcagccatggcctcgctggctggtgggctggacgacatgaaggccaatctggccagccccacccctgctgacatcgggagcagtgtgccaggcccgcagtcctaccccattgtgacagggagtgagttttccgggagtccctacagccaccctcagtattcctcgtacaacgactcctggaggttccccaacccggggctgcttggctccccctactattatagcgctgccgcccgaggagccgccccacctgcagccgccactgcctatgaccgtcactgacccttggag

SEQ ID NO: 99647 - DNA, 876 bp, Artificial Sequence
  derived and/or modified sequence
atggatcttgagaagaactaccctacaccgcgaactagccgcactggccacggcggtgtgaaccaactagggggagttttcgtcaatgggaggccgcttccagatgtggtacgccagagaatcgtcgaactagcccatcagggggtccgaccctgcgacatatccagacagctcagagtgtctcacggctgcgttagcaagatcttggggaggattattcgaaccaaagtacagcagccccctaaccagccagtgccagcctcatctcattcaattgtgtctaccggtagtgtcactcaagtgagcagcgtttctacggacagtgcaggaagttcatactcaatcagcggaattctgggcatcacatccccgtcggccgatactaacaagcgtaagcgcgatgagggaatccaggagagtcccgtaccaaatggtcacagtctgcctgggagggacttcctgcgtaagcagatgcgtggcgacctgttcacacaacagcaactggaagtgctagaccgtgttttcgagaggcagcactactccgatatatttactacaaccgaaccaatcaagccagagcagacaaccgaatactctgcaatggccagcctggccggtggtctcgatgatatgaaagctaatctggcctctccaacccccgcagacataggatcatccgtgcctgggcctcagtcctaccccatcgtcacaggctcggagttttccgggtccccttactcccatcctcagtattcaagttacaatgatagttggaggttccccaaccctggcctcctggggtctccctattactactcagccgcagcgcgaggagccgcacccccagcagctgcgacagcttatgatcgccactag

SEQ ID NO: 99648 - DNA, 852 bp, Artificial Sequence
  derived and/or modified sequence
atgttcgcctgggagatcagagacagactgctggccgagagagtgtgcgacaacgacaccgtgcccagcgtgagcagcatcaacagaatcatcagaaccaaggtgcagcagccccccaaccagcccgtgcccgccagcagccacagcatcgtgagcaccggcagcgtgacccaggtgagcagcgtgagcaccgacagcgccggcagcagctacagcatcagcggcatcctgggcatcaccagccccagcgccgacaccaacaagagaaagagagacgagggcatccaggagagccccgtgcccaacggccacagcctgcccggcagagacttcctgagaaagcagatgagaggcgacctgttcacccagcagcagctggaggtgctggacagagtgttcgagagacagcactacagcgacatcttcaccaccaccgagcccatcaagcccgagcagaccaccgagtacagcgccatggccagcctggccggcggcctggacgacatgaaggccaacctggccagccccacccccgccgacatcggcagcagcgtgcccggcccccagagctaccccatcgtgaccggcagagacctggccagcaccaccctgcccggctaccccccccacgtgccccccgccggccagggcagctacagcgcccccaccctgaccggcatggtgcccggcagcgagttcagcggcagcccctacagccacccccagtacagcagctacaacgacagctggagattccccaaccccggcctgctgggcagcccctactactacagcgccgccgccagaggcgccgccccccccgccgccgccaccgcctacgacagacactag

SEQ ID NO: 99649 - DNA, 852 bp, Artificial Sequence
  derived and/or modified sequence
atgttcgcctgggagatcagagaccgactgctggcagagcgcgtctgcgacaacgacaccgtccccagtgtatcctcgatcaaccgtatcatccggacaaaggtgcagcagccgcctaatcagcccgtacccgcctccagccacagcattgtgagcacgggttcagtcacacaagtcagctctgtgtcaactgattccgccggctctagctattccatttcaggaattctgggaatcacctccccatcggcggacacaaataagcgaaaacgcgatgagggaatacaggagtcacccgtgcccaacggacactccttacccgggagagattttttgaggaagcagatgcgcggtgacctgtttacacagcagcaactcgaagttttagatagggtttttgagcggcaacattactcggacatttttacaaccacagagcccattaagcccgagcagaccacagagtattcagctatggcatccttggcaggaggcctggatgacatgaaggccaatttagcctctccgactcctgctgatatcggaagttccgtgccgggcccccagagttatccaatcgtaactgggagagatctcgcatctaccacactccctggttatccgcctcatgtcccgccagcaggccagggcagctattcagctcccacactgaccggaatggtcccaggcagtgagttttcgggaagcccctatagtcacccacagtactcttcttataacgactcctggcgattccccaatccagggctgctgggatctccttattactattctgctgcagcacgtggggctgctccacccgctgctgctacggcatatgataggcattag

SEQ ID NO: 99650 - DNA, 852 bp, Artificial Sequence
  derived and/or modified sequence
atgtttgcctgggagatccgggaccggctgctggccgagcgggtgtgtgacaatgacacagtgcccagcgtgagcagcatcaaccgcatcatccgcaccaaggtgcagcagccccccaaccagcctgtgcctgccagcagccacagcatcgtgtccactggatctgtgacccaggtgtcctctgtgtccacagacagcgctggcagcagctacagcatcagcggcatcctgggcatcaccagccccagcgctgacaccaacaagaggaagagagatgagggcatccaggagagccctgtgcccaacggccacagcctgcccggccgggacttcctgaggaagcagatgagaggagacctcttcacccagcagcagctggaggtgctggacagagtgtttgagcggcagcactacagcgacatcttcaccaccacagagcccatcaagccagagcagaccacagagtacagcgccatggccagcctggccggcggcctggatgacatgaaggccaacctggccagccccaccccagctgacatcggcagctctgtgcccggcccccagagctaccccatcgtgacaggccgggacctggccagcaccaccctgcccggctacccaccccacgtgcccccagctggccagggcagctacagcgcccccaccctgaccggcatggtgcccggcagcgagttcagcggcagcccctacagccacccccagtacagcagctacaatgacagctggaggttccccaaccctggcctgctgggcagcccctactactacagcgctgctgcccggggagctgcccctcctgctgctgccacagcctatgacagacactag

SEQ ID NO: 99651 - DNA, 852 bp, Artificial Sequence
  derived and/or modified sequence
atgttcgcctgggagatccgggaccggctgctggccgagcgggtgtgcgacaacgatactgtgccctctgtgtcctcaatcaatcgcatcatccggaccaaggtgcaacagccacccaatcaacctgtgcccgccagcagccactctattgtgagcacaggttcggtaacccaggtttccagcgtatccactgatagcgctggatcctcttactctatttctggaattttaggcattaccagcccgtccgctgatacaaataagcgcaagcgggacgagggtatccaggaaagccccgtgcccaatggccactccctgcccggtcgcgactttctgcgaaaacagatgaggggagacctgtttacccagcaacaattggaggtcttggaccgggtgttcgagaggcagcattattctgacatctttactacaacagaaccaatcaaaccagagcaaaccaccgagtattctgccatggccagtctcgcaggtggtcttgacgacatgaaggccaacctggcctcacccacaccagccgatataggctcctctgtgccaggcccccagagttaccctattgtgacagggcgcgacctggccagcactaccctgccaggataccccccgcacgttccacctgctggacagggttcctactcggctcccacactaactggcatggtgccgggatctgaattctccggaagtccctattcccatccgcagtatagctcttacaatgattcctggaggtttccgaaccccgggcttctcggcagcccttattactattccgccgccgcccggggggcagccccgccggccgctgccactgcatacgatcggcactag

SEQ ID NO: 99652 - DNA, 852 bp, Artificial Sequence
  derived and/or modified sequence
atgtttgcttgggagatcagagatagactacttgcggaacgcgtctgcgataatgatactgtgccatccgtgagcagtatcaaccggataatccgaactaaggtgcagcagccacccaaccagccagtgcccgcatcctcgcactctatcgtgtccaccggcagtgttacccaggtcagcagtgtgtcaactgacagcgcgggatcaagttattccatcagcggcatcctcggcatcacctcacctagtgcggatactaataagcgcaaacgggacgagggaattcaagaatcccccgtaccaaacggccactcgctccccggtagggactttctccgaaagcagatgcgcggagacctctttactcagcagcaactggaggtgctcgacagagtgtttgaacgtcagcactactctgacatttttaccacaactgagccaataaaaccggaacaaacgacagaatattcagccatggccagcttggcaggcggacttgatgatatgaaagcgaacctcgcctcgcccacaccggctgatatcggttcctcagttccgggaccccagtcataccccattgttacaggccgagatcttgcatctaccacccttcccggatatccgccacatgtccccccagccggacagggtagctacagtgcccctaccctgaccggtatggtacctgggtctgagttttccggatccccctactcccatccgcagtattctagttataacgacagctggagattcccaaacccaggtcttctggggtctccttattactacagtgctgccgctaggggcgcagctccacctgctgctgccaccgcgtatgatagacactag

SEQ ID NO: 99653 - DNA, 567 bp, Artificial Sequence
  derived and/or modified sequence
atgggccagaacgacctgatgggcaccgccgaggacttcgccgaccagttcctgagagtgaccaagcagtacctgccccacgtggccagactgtgcctgatcagcaccttcctggaggacggcatcagaatgtggttccagtggagcgagcagagagactacatcgacaccacctggaactgcggctacctgctggccagcagcttcgtgttcctgaacctgctgggccagctgaccggctgcgtgctggtgctgagcagaaacttcgtgcagtacgcctgcttcggcctgttcggcatcatcgccctgcagaccatcgcctacagcatcctgtgggacctgaagttcctgatgagaaacctggccctgggcggcggcctgctgctgctgctggccgagagcagaagcgagggcaagagcatgttcgccggcgtgcccaccatgagagagagcagccccaagcacacctgcctggccaagaccagaggcagacagggcctggtgagaggcggcttcaacaagaccgccagcttctacgtgagcagcagcctgcccctgccctggtag

SEQ ID NO: 99654 - DNA, 567 bp, Artificial Sequence
  derived and/or modified sequence
atggggcagaacgacctgatgggtacagctgaggactttgctgaccaattcctgagggtgactaagcagtatctgcctcacgttgcgcggttatgcctcatctccaccttcctagaagatggaatccgtatgtggttccagtggtctgagcaacgggattacattgacaccacttggaattgtggctacttgctcgcttcttcttttgttttccttaaccttctggggcagttaactggatgtgttctggtgctttcccgcaacttcgtgcagtatgcatgtttcggactattcggcatcatcgcactgcagaccatcgcttactccatactttgggatctcaagttccttatgaggaatttggccctgggcggaggcctgttattgctgctagccgaaagccggtcagaggggaaaagtatgtttgcaggcgtaccaaccatgcgagagtcatcccctaaacatacctgtctcgccaagacaagagggaggcagggccttgtgcggggcggcttcaataaaacagcaagtttttatgtttcaagctctcttccccttccatggtag

SEQ ID NO: 99655 - DNA, 567 bp, Artificial Sequence
  derived and/or modified sequence
atgggccagaatgacctgatgggcacagcagaagattttgctgaccagttcctgcgggtgaccaagcagtacctgccccacgtggcccggctgtgcctgatcagcaccttcctggaggatggcatccgcatgtggttccagtggagcgagcagagggactacatcgacaccacctggaactgtggctacctgctggccagcagctttgtgttcctgaacctgctgggccagctgaccggctgtgtgctggtgctgagcaggaactttgtgcagtatgcctgcttcggcctgtttggcatcatcgccctgcagaccatcgcctacagcatcctgtgggacctgaagttcctgatgaggaacctggccctgggcggcggcctgctgctgctgctggccgagagccgctctgagggcaagtccatgtttgctggggtgcccaccatgagggagagcagccccaagcacacctgcctggccaagacccggggccggcagggcctggtgcggggcggcttcaacaagacagccagcttctacgtgagcagcagcctgcccctgccctggtag

SEQ ID NO: 99656 - DNA, 567 bp, Artificial Sequence
  derived and/or modified sequence
atgggccagaacgacctgatgggcaccgccgaggacttcgccgaccagtttcttcgagtcactaaacagtatctgccacacgtcgccaggctgtgcctcatctccacctttttagaagacggtatccgaatgtggtttcagtggtctgaacagagggattacatagacaccacctggaactgtgggtatctgctggccagctcatttgtcttcttaaacctgctaggccaattgactgggtgcgtgctcgtcctgtcccggaacttcgttcagtatgcgtgttttgggctgttcggaattatagccttacagacaattgcatatagtattctgtgggatctgaaatttctcatgcggaatttggccctgggggggggtttacttttgctactggccgaaagccgatcagaaggtaagtcaatgtttgccggtgtcccaaccatgcgggaaagttcaccaaaacacacatgcctggcgaagacacggggcaggcagggcctggtgcgaggaggcttcaataaaacagcctccttctacgtctctagctccctacctctgccttggtag

SEQ ID NO: 99657 - DNA, 567 bp, Artificial Sequence
  derived and/or modified sequence
atgggccaaaatgatctcatgggcactgctgaagattttgctgatcaattcctacgcgtcactaagcaatacctgccacacgtcgctaggctgtgccttatcagtacctttctcgaggacggtatccgtatgtggtttcagtggagcgaacagagggattacatcgacactacatggaactgcggctatctacttgcgtcatctttcgttttcctgaacctgctcggtcagctgacgggctgtgtccttgtgcttagcagaaacttcgttcagtatgcttgctttggtctattcggaattatagcattacaaactatcgcatatagcatcctgtgggatcttaaattccttatgcgcaatttagccctgggcggtggtctgctgttgttactggccgaaagccgtagtgaaggaaaatccatgttcgccggagtgcctaccatgagggagagctctcccaaacatacctgtctcgcaaaaaccagaggtaggcagggtctggtacgcggaggattcaacaagactgcctccttttatgtctcttcttccttgccccttccttggtag

SEQ ID NO: 99658 - DNA, 2624 bp, Artificial Sequence
  derived and/or modified sequence
ggagccgcagccgacgcggagcgaggccggccgccgggcacttcctgtggaggccgcagcgggtgcgggcgccgacgggcgagagccagcgagcgagcgagcgagccgagccgagcctcccgccgtcgccatgggccagaacgacctgatgggcacggccgaggacttcgccgaccagttcctccgtgtcacaaagcagtacctgccccacgtggcgcgcctctgtctgatcagcaccttcctggaggacggcatccgtatgtggttccagtggagcgagcagcgcgactacatcgacaccacctggaactgcggctacctgctggcctcgtccttcgtcttcctcaacttgctgggacagctgactggctgcgtcctggtgttgagcaggaacttcgtgcagtacgcctgcttcgggctctttggaatcatagctctgcagacgattgcctacagcattttatgggacttgaagtttttgatgaggaacctggccctgggaggaggcctgttgctgctcctagcagaatcccgttctgaagggaagagcatgtttgcgggcgtccccaccatgcgtgagagctcccccaaacatacctgcctggctaagacccgtggccgtcaaggactggttcggggtggattcaacaaaactgccagcttttatgtatcctcttcccttcccctcccttggtaaaggcacagatgttttgagaactttatttgcagagacacctgagaatcgatggctcagtctgctctggagccacagtctggcgtctgacccttcagtgcaggccagcctggcagctggaagcctcccccacgccgaggctttggagtgaacagcccgcttggctgtggcatctcagtcctatttttgagtttttttgtgggggtacaggagggggccttcaagctgtactgtgagcagacgcattggtattatcattcaaagcagtctccctcttatttgtaagtttacatttttagcggaaactactaaattattttgggtggttcagccaaacctcaaaacagttaatctccctggtttaaaatcacaccagtggctttgatgttgtttctgccccgcattgtattttataggaatagtgaaaacatttagggacacccaaagaatgatgcagtattaaaggggtggtagaagctgctgtttatgataaaagtcatcggtcagaaaatcagcttggattggtgccaagtgttttattgggtaacaccctgggagttttagtagcttgaggcaaggtggaggggcaagaagtccttggggaagctgctggtctgggtgctgctggcctccaagctggcagtgggaagggctagtgagaccacacaggggtagccccagcagcagcaccctgcaagccagcctggccagctgctcagaccagcttgcagagccgcagccgctgtgggcagggggtgtggcaggagctcccagcactggagacccacggactcaacccagttacctcacatggggccttttctgagcaaggtctcgaaagcgcaggccgccctggctgagcagcaccgccctttcccagctgcactcgccctgtggacagccccgacacaccactttcctgaggctgtcgctcactcagattgtccgtttgctatgccgaatgcagccaaaattcctttttacaatttgtgatgccttaccgatttgatcttaatcctgtatttaaagttttctaacactgccttatactgtgtttctctttttgggggagcttaactgcttgttgctccctgtcgtctgcaccatagtaaatgccacaagggtagtcgaacacctctctggcccctagacctatctggggacaggctggctcagcctgtctccagggctgctgcggcccagccccgagcctgcctccctcttggcctctcatccattggctctgcagggcaggggtgaggcaggtttctgctcataagtgcttttggaagtcacctacctttttaacacagccgaactagtcccaacgcgtttgcaaatattcccctggtagcctacttccttacccccgaatattggtaagatcgagcaatggcttcaggacatgggttctcttctcctgtgatcattcaagtgctcactgcatgaagactggcttgtctcagtgtttcaacctcaccagggctgtctcttggtccacacctcgctccctgttagtgccgtatgacagcccccatcaaatgaccttggccaagtcacggtttctctgtggtcaaggttggttggctgattggtggaaagtagggtggaccaaaggaggccacgtgagcagtcagcaccagttctgcaccagcagcgcctccgtcctagtgggtgttcctgtttctcctggccctgggtgggctagggcctgattcgggaagatgcctttgcagggaggggaggataagtgggatctaccaattgattctggcaaaacaatttctaagatttttttgctttatgtgggaaacagatctaaatctcattttatgctgtattttatatcttagttgtgtttgaaaacgttttgatttttggaaacacatcaaaataaataatggcgtttgttgtatgcagtgtgatccta

SEQ ID NO: 99659 - protein, 128 aa, Artificial Sequence
  derived and/or modified sequence
MGQNDLMGTAEDFADQFLRVTKQYLPHVARLCLISTFLEDGIRMWFQWSEQRDYIDTTWNCGYLLASSFVFLNLLGQLTGCVLVLSRNFVQYACFGLFGIIALQTIAYSILWDLKFLMRLSRTSWAQL

SEQ ID NO: 99660 - DNA, 387 bp, Artificial Sequence
  derived and/or modified sequence
atgggccagaacgacctgatgggcaccgccgaggacttcgccgaccagttcctgagagtgaccaagcagtacctgccccacgtggccagactgtgcctgatcagcaccttcctggaggacggcatcagaatgtggttccagtggagcgagcagagagactacatcgacaccacctggaactgcggctacctgctggccagcagcttcgtgttcctgaacctgctgggccagctgaccggctgcgtgctggtgctgagcagaaacttcgtgcagtacgcctgcttcggcctgttcggcatcatcgccctgcagaccatcgcctacagcatcctgtgggacctgaagttcctgatgagactgagcagaaccagctgggcccagctgtag

SEQ ID NO: 99661 - DNA, 387 bp, Artificial Sequence
  derived and/or modified sequence
atgggtcagaatgatctcatggggaccgcagaggacttcgcagatcagttcctcagggtgaccaaacagtacttgcctcacgtggcaagactctgccttatctcaacatttttggaggatggaatccgcatgtggttccagtggtcggagcagcgcgactatattgacaccacctggaactgcgggtatttgctggctagttcattcgtttttctgaatcttctcggccagctgactgggtgtgtgctcgttctcagtagaaacttcgtacagtacgcctgtttcgggctctttggaatcattgcacttcagactatcgcctattctatactctgggacctgaaattcctgatgcgactgagtcgcaccagctgggcgcagctctag

SEQ ID NO: 99662 - DNA, 387 bp, Artificial Sequence
  derived and/or modified sequence
atgggccagaatgacctgatgggcacagcagaagattttgctgaccagttcctgcgggtgaccaagcagtacctgccccacgtggcccggctgtgcctgatcagcaccttcctggaggatggcatccgcatgtggttccagtggagcgagcagagggactacatcgacaccacctggaactgtggctacctgctggccagcagctttgtgttcctgaacctgctgggccagctgaccggctgtgtgctggtgctgagcaggaactttgtgcagtatgcctgcttcggcctgtttggcatcatcgccctgcagaccatcgcctacagcatcctgtgggacctgaagttcctgatgaggctgagcaggacctcctgggcccagctgtag

SEQ ID NO: 99663 - DNA, 387 bp, Artificial Sequence
  derived and/or modified sequence
atgggccagaacgacctgatgggcaccgccgaggacttcgccgaccagttccttcgcgtaactaagcagtatctgccccacgtggcaaggttgtgcttgatctctacttttcttgaggatggtattcggatgtggtttcaatggtccgagcagagagattatattgacacaacctggaactgtggatacctcctggcatcctccttcgtgttcctgaacctcctgggccagctgaccggatgcgtactggtactgtccaggaactttgtgcagtatgcatgttttggcctttttggaatcatagcactgcaaactatcgcctatagtattctgtgggacctgaagttcttgatgcggctctcccgcacttcatgggcacagttatag

SEQ ID NO: 99664 - DNA, 387 bp, Artificial Sequence
  derived and/or modified sequence
atgggccagaatgacttgatgggaaccgcagaggactttgccgatcagttccttcgcgttacgaaacagtacctcccacatgttgctcggctgtgtctgattagcacctttttggaagatgggattagaatgtggttccaatggtctgaacaacgcgattacatcgacactacctggaactgcgggtaccttctggccagttcctttgtattcttgaatctcttagggcaactcaccggttgcgtgctcgtcctgagtcggaattttgttcaatacgcctgctttggactgttcggaattatcgccttacaaacaatagcttatagtatcctctgggaccttaagttcctgatgcggctgtctagaacaagctgggcacaactttag

SEQ ID NO: 99665 - protein, 744 aa, Artificial Sequence
  derived and/or modified sequence
MATEGAAQLGNRVAGMVSVGGCRCQPGYQPARGDKACQACPRGLYKSSAGNAPCSPCPARSHAPNPAAPVCPCLEGFYRASSDPPEAPCTGPPSAPQELWFEVQGSALMLHWRLPRELGGRGDLLFNVVCKECEGRQEPASGGGGTCHRCRDEVHFDPRQRGLTESRVLVGGLRAHVPYILEVQAVNGVSELSPDPPQAAAINVSTSHEVPSAVPVVHQVSRASNSITVSWPQPDQTNGNILDYQLRYYDQAEDESHSFTLTSETNTATVTQLSPGHIYGFQVRARTAAGHGPYGGKVYFQTLPQGELSSQLPERLSLVIGSILGALAFLLLAAITVLAVVFQRKRRGTGYTEQLQQYSSPGLGVKYYIDPSTYEDPCQAIRELAREVDPAYIKIEEVIGTGSFGEVRQGRLQPRGRREQTVAIQALWAGGAESLQMTFLGRAAVLGQFQHPNILRLEGVVTKSRPLMVLTEFMELGPLDSFLRQREGQFSSLQLVAMQRGVAAAMQYLSSFAFVHRSLSAHSVLVNSHLVCKVARLGHSPQGPSCLLRWAAPEVIAHGKHTTSSDVWSFGILMWEVMSYGERPYWDMSEQEVLNAIEQEFRLPPPPGCPPGLHLLMLDTWQKDRARRPHFDQLVAAFDKMIRKPDTLQAGGDPGERPSQALLTPVALDFPCLDSPQAWLSAIGLECYQDNFSKFGLCTFSDVAQLSLEDLPALGITLAGHQKKLLHHIQLLQQHLRQQGSVEV

SEQ ID NO: 99666 - DNA, 321 bp, Artificial Sequence
  derived and/or modified sequence
atggcccaagtcgccatgagtactctccctgtagaggacgaggagtcctctgagagcaggatggtggtcacctttctgatgtccgctttggagtcgatgtgtaaggaactggccaagagtaaggccgaagtggcctgcatcgctgtctatgagacggatgtttttgttgtgggcaccgaacggggaagggcctttgtcaacacacgtaaagatttccagaaagattttgtcaagtattgtgtagaggaagaggaaaaagctgccgagatgcataagatgaaatccactactcaggccaatcggatgagtgtggatgcatag

SEQ ID NO: 99667 - DNA, 825 bp, Artificial Sequence
  derived and/or modified sequence
atggcccaagttgctatgagtacacttcctgtggaggacgaggagtccagtgaatccaggatggtggtgacgttcctgatgagtgccctggaatcaatgtgtaaagagctcgcgaaatcaaaagccgaagtagcttgtattgcggtgtacgagactgatgtgttcgtcgtaggaaccgaacgggggcgcgctttcgttaatacccgcaaagactttcagaaggatttcgttaaatattgcgttgaagaagaagagaaggccgcagaaatgcataaaatgaaatccaccacccaggccaaccggatgtccgtggatgcagtggaaatcgagactctccgcaagaccgtcgaagactacttctgtttctgctacgggaaagctctcggtaagtccactgtggtgccggtgccttacgagaagatgctgcgggaccagagcgcagtggtggtccagggcctgcccgagggcgtagccttcaaacatccagaaaactacgatctggcaaccttgaagtggatccttgagaataaagccggcattagctttattattaaacgcccctttctggagcctaagaagcacgtgggcggccgcgtgatggtcaccgatgcagaccgatctattctgagccctggcggctcctgtggaccgattaaggtaaaaaccgagcccacagaagacagcggcatctcgctcgaaatggctgcggtaactgtcaaagaggaatcggaggatccggactactaccagtacaacatccagggctctcatcatagtagtgagggaaatgaagggacagaaatggaggtgccagctgagggatag

SEQ ID NO: 99668 - DNA, 572 bp, Artificial Sequence
  derived and/or modified sequence
atttccagagagcaggaagcacagagaaggcccgtgggtcgcccttggggtgctttccatcctgcagggctcgctgcctgccctgaaagttctgataaagacataggaccttcatcaccaggggcgccccgtgggctgttgctgtagcgtctgtcccccatttcttacacacattgagtgtgattgttaccagtggagggtgtccaatggaagaagcaccaaaagccgagatttattgaaagtggaagggatcatggcccaagttgcaatgtccaccctccccgttgaagatgaggagtcctcggagagcaggatggtggtgacattcctcatgtcagctctcgagtccatgtgtaaagaactggccaagtccaaagccgaagtggcctgcattgcagtgtatgaaacagacgtgtttgtcgtcggaactgaaagaggacgtgcttttgtcaataccagaaaggattttcaaaaagattttgtaaaatattgtgttgaagaagaagaaaaagctgcagagatgcataaaatgaaatctacaacccaggcaaatcggatgagtgtagatgctg

SEQ ID NO: 99669 - DNA, 979 bp, Artificial Sequence
  derived and/or modified sequence
ccccggccccggagctgcctggaggcggccgcactcggggatcatggcccaagttgcaatgtccaccctccccgttgaagatgaggagtcctcggagagcaggatggtggtgacattcctcatgtcagctctcgagtccatgtgtaaagaactggccaagtccaaagccgaagtggcctgcattgcagtgtatgaaacagacgtgtttgtcgtcggaactgaaagaggacgtgcttttgtcaataccagaaaggattttcaaaaagattttgtaaaatattgtgttgaagaagaagaaaaagctgcagagatgcataaaatgaaatctacaacccaggcaaatcggatgagtgtagatgctgtagaaattgaaacactcagaaaaacagttgaggactatttctgcttttgctatgggaaagctttaggcaaatccacagtggtacctgtaccatatgagaagatgctgcgagaccagtcggctgtggtagtgcaggggcttccggaaggtgttgcctttaaacaccccgagaactatgatcttgcaaccctgaaatggattttggagaacaaagcagggatttcattcatcattaagagaccttttttagagccaaagaagcatgtaggtggtcgtgtgatggtaacagatgctgacaggtcaatactatctccaggtggaagttgtggccccatcaaagtgaaaactgaacccacagaagattctggcatttccctggaaatggcagctgtgacagtaaaggaagaatcagaagatcctgattattatcaatataacattcaaggaagccaccattcttcagagggcaatgaaggcacagaaatggaagtaccagcagaaggttaggagaaaaagagattgcatattttccactatttgttgtatgtttattctattttatagattctattatccttaaaacaccttatttggaaataaaaggtgattcccttggta

SEQ ID NO: 99670 - DNA, 321 bp, Artificial Sequence
  derived and/or modified sequence
atggcccaggtggccatgagcaccctgcctgtggaggatgaggagagcagcgagagcaggatggtggtgaccttcctgatgtctgccctggagagcatgtgcaaggagctggccaagagcaaggccgaggtggcctgcatcgctgtgtatgaaacagatgtgtttgtggtgggcacagagcggggccgggcctttgtgaacaccaggaaggacttccagaaggactttgtgaagtactgtgtggaggaggaggagaaggctgctgagatgcacaagatgaagagcaccacccaggccaacaggatgtctgtggatgcctag

SEQ ID NO: 99671 - DNA, 825 bp, Artificial Sequence
  derived and/or modified sequence
atggcccaggtggccatgagcaccctgcctgtggaggatgaggagagcagcgagagcaggatggtggtgaccttcctgatgtctgccctggagagcatgtgcaaggagctggccaagagcaaggccgaggtggcctgcatcgctgtgtatgaaacagatgtgtttgtggtgggcacagagcggggccgggcctttgtgaacaccaggaaggacttccagaaggactttgtgaagtactgtgtggaggaggaggagaaggctgctgagatgcacaagatgaagagcaccacccaggccaacaggatgtctgtggatgctgtggagattgagaccctgaggaagacagtggaggactacttctgcttctgctacggcaaggccctgggcaagagcacagtggtgcctgtgccctatgagaagatgctgcgggaccagagcgctgtggtggtgcagggcctgcctgagggcgtggccttcaagcacccagaaaattatgacctggccaccctgaagtggatcctggagaacaaggccggcatctccttcatcatcaagaggcccttcctggagcccaagaagcacgtgggcggccgggtgatggtgacagatgctgacaggagcatcctgagccctgggggcagctgtggccccatcaaggtgaagacagagcccacagaggacagcggcatcagcctggagatggctgctgtgacagtgaaggaggagagcgaggaccctgactactaccagtacaacatccagggcagccaccacagcagcgagggcaatgaaggaacagagatggaggtgcctgctgagggctag

SEQ ID NO: 99672 - DNA, 321 bp, Artificial Sequence
  derived and/or modified sequence
atggcccaggtggccatgagcaccctgcccgtggaggacgaggagtcatcggagtcacggatggtcgtgactttcctgatgtctgccctcgagtctatgtgcaaggagttggcgaagtcaaaagcggaggtcgcttgcatcgctgtctacgagaccgacgtgtttgtcgtggggacagagagaggcagagcatttgtgaacacaaggaaggacttccagaaggactttgtgaagtattgcgtggaggaagaagaaaaggcggccgaaatgcataaaatgaaatctaccacccaggccaaccgtatgagcgttgatgcatag

SEQ ID NO: 99673 - DNA, 825 bp, Artificial Sequence
  derived and/or modified sequence
atggcccaggtggccatgagcaccctgcccgtggaggacgaggagagcagtgagagccggatggtggtgaccttcctcatgagtgctctcgagtctatgtgcaaggaattagcaaagtctaaggccgaagtcgcatgtatcgcagtgtatgagactgatgtctttgtggttggcactgagcggggcagggcttttgtgaacacccgcaaggattttcagaaagactttgtgaaatactgtgtggaggaagaagaaaaggcggctgagatgcacaagatgaagtcaaccacccaagctaacagaatgtccgtagacgctgtggaaatagagaccttaaggaaaacagtggaggactacttttgcttttgttacggcaaggccctcgggaagtccacagttgtccccgtgccttatgagaagatgctccgcgaccagtcagcagtggtcgtacaaggtctaccggagggggtggcttttaaacacccggagaactacgatctggctactctcaagtggatccttgaaaataaagctggtatcagcttcatcattaagaggccttttctcgaaccgaagaagcacgtgggaggaagggtgatggtcaccgatgcagacaggtccatcctatcaccaggaggctcttgcggccccatcaaggtgaagactgaacccaccgaagacagtggtatatccttggaaatggccgccgtcacagtcaaagaggagtccgaggatcccgattattaccagtacaatattcagggttcgcaccatagctccgagggcaacgaggggacagagatggaagtgccagccgagggatag

SEQ ID NO: 99674 - DNA, 321 bp, Artificial Sequence
  derived and/or modified sequence
atggctcaggttgcaatgtcaacattgcctgttgaggatgaagaaagctcagaatctcggatggtggtgaccttcctaatgtcagccctcgagtctatgtgcaaagagttggctaagagcaaagcggaggtggcttgcatcgccgtttatgaaaccgacgtctttgtcgtgggcaccgaacggggacgcgctttcgtgaacacccgtaaggatttccagaaagattttgtgaaatactgtgtggaggaggaagagaaagctgcagagatgcacaaaatgaaaagcacaacacaggctaatagaatgtcagttgatgcctag

SEQ ID NO: 99675 - DNA, 825 bp, Artificial Sequence
  derived and/or modified sequence
atggcgcaagtggcgatgagcacgctgcccgtagaggacgaggaatcatcagagtctaggatggtggttaccttcctcatgagcgctctcgagagtatgtgtaaagagctggccaaatcgaaagccgaagttgcatgcatagcagtttacgagaccgatgtgttcgtggtgggtactgaacgaggccgagccttcgtcaataccagaaaggatttccagaaggacttcgtgaaatactgcgttgaagaggaggaaaaagcagccgagatgcataagatgaagtccaccactcaggccaatagaatgtctgttgacgccgtggagattgaaactctacggaagactgtggaggattacttctgcttttgttacggcaaggcgttggggaaatccacagtggtgccagtgccctacgaaaagatgctcagagatcaatcagcggtagttgttcaaggtctacctgaaggtgtggcattcaaacatccagagaattacgacctcgcaacgctcaaatggatactcgaaaacaaggcgggtatttcatttattattaagaggccctttctagaaccaaagaaacacgtgggaggtcgagttatggtgacagacgctgatcgatcaatcctgtcacctggcggttcctgcgggccaattaaggtgaagaccgagcccaccgaagacagcggaatctccttggaaatggccgctgttactgtgaaagaagaaagtgaagaccccgattactaccagtataatatccagggctcccatcattcatccgagggaaatgaggggactgaaatggaggtgcctgccgagggatag

SEQ ID NO: 99676 - DNA, 321 bp, Artificial Sequence
  derived and/or modified sequence
atggcccaggtggccatgagcaccctgcccgtggaggacgaggagagcagcgagagcagaatggtggtgaccttcctgatgagcgccctggagagcatgtgcaaggagctggccaagagcaaggccgaggtggcctgcatcgccgtgtacgagaccgacgtgttcgtggtgggcaccgagagaggcagagccttcgtgaacaccagaaaggacttccagaaggacttcgtgaagtactgcgtggaggaggaggagaaggccgccgagatgcacaagatgaagagcaccacccaggccaacagaatgagcgtggacgcctag

SEQ ID NO: 99677 - DNA, 825 bp, Artificial Sequence
  derived and/or modified sequence
atggcccaggtggccatgagcaccctgcccgtggaggacgaggagagcagcgagagcagaatggtggtgaccttcctgatgagcgccctggagagcatgtgcaaggagctggccaagagcaaggccgaggtggcctgcatcgccgtgtacgagaccgacgtgttcgtggtgggcaccgagagaggcagagccttcgtgaacaccagaaaggacttccagaaggacttcgtgaagtactgcgtggaggaggaggagaaggccgccgagatgcacaagatgaagagcaccacccaggccaacagaatgagcgtggacgccgtggagatcgagaccctgagaaagaccgtggaggactacttctgcttctgctacggcaaggccctgggcaagagcaccgtggtgcccgtgccctacgagaagatgctgagagaccagagcgccgtggtggtgcagggcctgcccgagggcgtggccttcaagcaccccgagaactacgacctggccaccctgaagtggatcctggagaacaaggccggcatcagcttcatcatcaagagacccttcctggagcccaagaagcacgtgggcggcagagtgatggtgaccgacgccgacagaagcatcctgagccccggcggcagctgcggccccatcaaggtgaagaccgagcccaccgaggacagcggcatcagcctggagatggccgccgtgaccgtgaaggaggagagcgaggaccccgactactaccagtacaacatccagggcagccaccacagcagcgagggcaacgagggcaccgagatggaggtgcccgccgagggctag

SEQ ID NO: 99678 - protein, 895 aa, Artificial Sequence
  derived and/or modified sequence
MKIGSGFLSGGGGTGSSGGSGSGGGGSGGGGGGGSSGRRAEMEPTFPQGMVMFNHRLPPVTSFTRPAGSAAPPPQCVLSSSTSAAPAAEPPPPPAPDMTFKKEPAASAAAFPSQRTSWGFLQSLVSIKQEKPADPEEQQSHHHHHHHHYGGLFAGAEERSPGLGGGEGGSHGVIQDLSILHQHVQQQPAQHHRDVLLSSSSRTDDHHGTEEPKQDTNVKKAKRPKPESQGIKAKRKPSASSKPSLVGDGEGAILSPSQKPHICDHCSAAFRSSYHLRRHVLIHTGERPFQCSQCSMGFIQKYLLQRHEKIHSREKPFGCDQCSMKFIQKYHMERHKRTHSGEKPYKCDTCQQYFSRTDRLLKHRRTCGEVIVKGATSAEPGSSNHTNMGNLAVLSQGNTSSSRRKTKSKSIAIENKEQKTGKTNESQISNNINMQSYSVEMPTVSSSGGIIGTGIDELQKRVPKLIFKKGSRKNTDKNYLNFVSPLPDIVGQKSLSGKPSGSLGIVSNNSVETIGLLQSTSGKQGQISSNYDDAMQFSKKRRYLPTASSNSAFSINVGHMVSQQSVIQSAGVSVLDNEAPLSLIDSSALNAEIKSCHDKSGIPDEVLQSILDQYSNKSESQKEDPFNIAEPRVDLHTSGEHSELVQEENLSPGTQTPSNDKASMLQEYSKYLQQAFEKSTNASFTLGHGFQFVSLSSPLHNHTLFPEKQIYTTSPLECGFGQSVTSVLPSSLPKPPFGMLFGSQPGLYLSALDATHQQLTPSQELDDLIDSQKNLETSSAFQSSSQKLTSQKEQKNLESSTGFQIPSQELASQIDPQKDIEPRTTYQIENFAQAFGSQFKSGSRVPMTFITNSNGEVDHRVRTSVSDFSGYTNMMSDVSEPCSTRVKTPTSQSYR

SEQ ID NO: 99679 - DNA, 3535 bp, Artificial Sequence
  derived and/or modified sequence
gcagtacacgggaggcttttaattccattgtggagaggacggcgttatttttattaactggaggcgacggcggctgcggcggcggcgggacccgcctcctccggggtatgaaaatcggcagtgggttcctgagtggcggcggaggtaccggcagtagcggtggtagcggctccggcggcggtggtagtggcggcggcggcggcggcggcagcagcggcaggagggcagagatggaacccacctttccccagggtatggttatgttcaaccaccgtcttcccccggtcaccagcttcacccggccggcggggtcggccgcccctcccccgcaatgcgtgttatcctcctctacctccgcagccccggccgctgagcccccccctccgccagccccggacatgactttcaagaaggagccggcggcgtcagccgcggccttcccctcgcagaggacctcctgggggttcttgcagtctttggttagcatcaaacaggagaaacccgcggatcctgaggagcagcagtcccaccaccaccatcaccaccaccactatggggggctgttcgctggagctgaagagaggtctccaggcctaggaggcggtgaaggggggagtcacggcgtcatccaggacctcagtattctccaccagcatgtccagcagcaaccagcccagcaccaccgtgacgtattactcagcagcagtagcaggactgatgaccaccatggcactgaggagccaaagcaggacactaatgtcaaaaaggcaaaaaggccaaagccagaatctcagggaatcaaagccaagaggaagccaagtgcatcttccaaaccttctttggttggagatggagaaggtgccatcctctccccaagtcagaaacctcatatctgtgatcactgtagtgctgctttccgaagctcctatcacctgcggagacatgtcctcattcatacaggagaaagacctttccagtgcagccagtgtagtatgggtttcattcagaaatacctactacagagacatgagaaaattcatagtagagagaagccatttggatgtgatcagtgcagcatgaagtttattcagaagtaccatatggagagacacaagaggacacatagtggagaaaagccatataagtgtgacacttgccaacagtatttttcaaggactgatagattgttgaagcacaggcgcacatgtggtgaagtcatagttaaaggagccactagtgcagaacctgggtcatcaaaccataccaatatgggtaatctggctgtgttgtctcagggaaatacaagttcttcaaggagaaaaacaaagtcaaaaagcatagctattgaaaataaggaacagaagaccggtaaaacaaatgaatcacaaatttcaaataatataaacatgcagagttactcagtagaaatgcctaccgtgtcttccagtggaggcataattggcactggaatagatgaactgcagaagagggtgccaaaattgatctttaagaaaggaagcagaaagaatacagataaaaactaccttaactttgtgtcaccattaccagacatagtaggacagaaatccttgtctggaaaaccaagtggctcacttggcatagtatcaaataatagtgtggagaccattggtcttctccaaagtacaagtggcaaacaaggtcagataagtagtaattatgatgatgccatgcagttttcaaagaaaagaagatatttaccaactgccagcagcaacagtgccttttctataaacgtaggacacatggtctcccaacagtctgtcattcagtctgcaggtgtcagtgttttggacaatgaggcaccattgtcacttattgactcctcagctctaaatgctgaaattaaatcttgtcatgacaagtctggaattcctgatgaggttttacaaagtattttggatcaatactccaacaaatcagaaagccagaaagaggatcctttcaatattgcagaaccacgagtggatttacacacctcaggagaacactcagaattggttcaagaagaaaatttgagcccaggcacccaaacaccttcaaatgataaagcaagtatgttgcaagaatactccaaatacctccaacaggcttttgaaaaatccactaatgcaagttttactcttggacacggtttccaatttgtcagtttgtcttcacctctccacaaccacactttgtttccagaaaaacaaatatacactacgtctcctttggagtgtggtttcggccaatctgttacctcagtgttgccatcttcattgccaaagcctccttttgggatgttgtttggatctcagccaggtctttatttgtctgctttggatgctacacatcagcagttgacaccttcccaggagctggatgatctgatagattctcagaagaacttagagacttcatcagccttccagtcctcatctcagaaattgactagccagaaggaacagaaaaacttagagtcttcaacaggctttcagattccatctcaggagttagctagccagatagatcctcagaaagacatagagcctagaacaacgtatcagattgagaactttgcacaagcgtttggttctcagtttaagtcgggcagcagggtgccaatgacctttatcactaactctaatggagaagtggaccatagagtaaggacttcagtgtcagatttctcagggtatacaaatatgatgtctgatgtaagtgagccatgtagtacaagagtaaagacacccaccagccagagttacaggtaaggtcccaaaagtggccaggctggaggtcttctaatgtaattttgttttattttgagaacactgccattggaatgtttctacacgatcctattaagaataatgtgatgccctttcaatgcaacttttcatatttagtttattttgttagcgtgattttagctctgtttgtattatgatttttaatcaaaatcaatagattaaaaatagtttgacattcaaagtgacaatgtttagcaatcaaatttacatgtatagatcgtcagggaatagcccaaatgttttaaacgcaaaaaaaaagacaaaaaaaaaccaaaaaaaaaaaacctacaaaaaaaactttgttgctaggattaaggttattctaattgctttactctcaggaaagtgtaataacgcatgggaattctgtacgttatcactgtaatggaatatccaatttacagatagtatgatatacatttcatcatttaagtaagggatcgaaaacatttcaaattgctctatctgggctgatagacatttcgtcatttaagtaagggatcgaagacatttcaaattgctatctccatctgggctgatccaaaattctgagattgttggctacctatattttgttgcagcttttaaatgtactctgaacttccaaaccacattcattccagcctggtagaacaaatattcttggatctttgatcaaagcctggaatgatagctttaataaaagaaaaaaaaaaaaaaaa

SEQ ID NO: 99680 - DNA, 2688 bp, Artificial Sequence
  derived and/or modified sequence
atgaagatcggcagcggcttcctgagcggcggcggcggcaccggcagcagcggcggcagcggcagcggcggcggcggcagcggcggcggcggcggcggcggcagcagcggcagaagagccgagatggagcccaccttcccccagggcatggtgatgttcaaccacagactgccccccgtgaccagcttcaccagacccgccggcagcgccgccccccccccccagtgcgtgctgagcagcagcaccagcgccgcccccgccgccgagcccccccccccccccgcccccgacatgaccttcaagaaggagcccgccgccagcgccgccgccttccccagccagagaaccagctggggcttcctgcagagcctggtgagcatcaagcaggagaagcccgccgaccccgaggagcagcagagccaccaccaccaccaccaccaccactacggcggcctgttcgccggcgccgaggagagaagccccggcctgggcggcggcgagggcggcagccacggcgtgatccaggacctgagcatcctgcaccagcacgtgcagcagcagcccgcccagcaccacagagacgtgctgctgagcagcagcagcagaaccgacgaccaccacggcaccgaggagcccaagcaggacaccaacgtgaagaaggccaagagacccaagcccgagagccagggcatcaaggccaagagaaagcccagcgccagcagcaagcccagcctggtgggcgacggcgagggcgccatcctgagccccagccagaagccccacatctgcgaccactgcagcgccgccttcagaagcagctaccacctgagaagacacgtgctgatccacaccggcgagagacccttccagtgcagccagtgcagcatgggcttcatccagaagtacctgctgcagagacacgagaagatccacagcagagagaagcccttcggctgcgaccagtgcagcatgaagttcatccagaagtaccacatggagagacacaagagaacccacagcggcgagaagccctacaagtgcgacacctgccagcagtacttcagcagaaccgacagactgctgaagcacagaagaacctgcggcgaggtgatcgtgaagggcgccaccagcgccgagcccggcagcagcaaccacaccaacatgggcaacctggccgtgctgagccagggcaacaccagcagcagcagaagaaagaccaagagcaagagcatcgccatcgagaacaaggagcagaagaccggcaagaccaacgagagccagatcagcaacaacatcaacatgcagagctacagcgtggagatgcccaccgtgagcagcagcggcggcatcatcggcaccggcatcgacgagctgcagaagagagtgcccaagctgatcttcaagaagggcagcagaaagaacaccgacaagaactacctgaacttcgtgagccccctgcccgacatcgtgggccagaagagcctgagcggcaagcccagcggcagcctgggcatcgtgagcaacaacagcgtggagaccatcggcctgctgcagagcaccagcggcaagcagggccagatcagcagcaactacgacgacgccatgcagttcagcaagaagagaagatacctgcccaccgccagcagcaacagcgccttcagcatcaacgtgggccacatggtgagccagcagagcgtgatccagagcgccggcgtgagcgtgctggacaacgaggcccccctgagcctgatcgacagcagcgccctgaacgccgagatcaagagctgccacgacaagagcggcatccccgacgaggtgctgcagagcatcctggaccagtacagcaacaagagcgagagccagaaggaggaccccttcaacatcgccgagcccagagtggacctgcacaccagcggcgagcacagcgagctggtgcaggaggagaacctgagccccggcacccagacccccagcaacgacaaggccagcatgctgcaggagtacagcaagtacctgcagcaggccttcgagaagagcaccaacgccagcttcaccctgggccacggcttccagttcgtgagcctgagcagccccctgcacaaccacaccctgttccccgagaagcagatctacaccaccagccccctggagtgcggcttcggccagagcgtgaccagcgtgctgcccagcagcctgcccaagccccccttcggcatgctgttcggcagccagcccggcctgtacctgagcgccctggacgccacccaccagcagctgacccccagccaggagctggacgacctgatcgacagccagaagaacctggagaccagcagcgccttccagagcagcagccagaagctgaccagccagaaggagcagaagaacctggagagcagcaccggcttccagatccccagccaggagctggccagccagatcgacccccagaaggacatcgagcccagaaccacctaccagatcgagaacttcgcccaggccttcggcagccagttcaagagcggcagcagagtgcccatgaccttcatcaccaacagcaacggcgaggtggaccacagagtgagaaccagcgtgagcgacttcagcggctacaccaacatgatgagcgacgtgagcgagccctgcagcaccagagtgaagacccccaccagccagagctacagatag

SEQ ID NO: 99681 - DNA, 2688 bp, Artificial Sequence
  derived and/or modified sequence
atgaaaattggcagtggttttctatctggaggagggggaactggctcctccggcggctcaggatctggaggcggtggctcaggtggcgggggaggcggaggttcctcgggcaggagggccgaaatggagcccacattcccccaaggtatggtgatgttcaatcataggctgccaccagtgactagtttcacaagacccgcaggctcggccgcacctcctccacagtgcgtgctgtcaagcagtacttctgcggctcctgcagccgagccccctcctcctcctgccccagatatgactttcaagaaagagcccgcagcttccgccgcggctttcccctcccagcgtacctcttggggcttcctccaatccctcgtatctataaaacaggagaaacctgctgaccctgaggaacaacaatctcatcatcaccaccaccatcatcactacggaggtctttttgcgggcgcggaggagaggagtcctggcctgggtggaggagagggaggcagccatggcgtgatccaggacctgagtatactgcaccagcacgtgcagcagcagccagcccagcaccaccgggatgtcctgttgtcttccagctcccggaccgatgatcaccacggtacggaggagcctaaacaagacacaaatgtgaagaaagccaagagacctaagcccgagtcgcaggggataaaggctaaacgcaagccgtccgccagctctaagccctctttagttggtgatggcgagggagctattctttcaccttctcaaaagcctcatatctgcgaccactgtagtgctgcatttcgcagtagttatcatcttaggaggcatgtcctgatacacactggggaaagaccattccagtgttcccagtgtagtatgggcttcatccagaaatacctgcttcagcgacacgagaaaattcactcccgagagaagccctttgggtgtgatcagtgttctatgaaattcattcagaagtaccatatggagcggcataagcgtacacatagcggagagaaaccatacaagtgcgatacttgccaacagtacttctcccgaacagaccgattgctcaaacacagacgcacctgcggcgaggtgattgtgaaaggggccacatccgctgagccaggatcctccaaccacactaatatgggcaatctggctgtgctctctcaaggaaatacctcctctagcagacggaaaaccaaaagcaaatccatcgccattgagaacaaggaacaaaagactggcaaaaccaacgaatcccaaatcagcaacaatataaatatgcagagttatagcgtggagatgccaaccgtgtccagctcggggggcatcattggtacgggcattgacgagctgcagaaacgtgtgcccaagttgatattcaagaaggggtcccgaaaaaatacagataaaaactatctcaactttgtgagccctcttccagacatcgtagggcagaaatcactgtccgggaagcctagcggcagtctgggcatagtcagcaacaattcagtggagaccatcggactgcttcagtcaacctctggcaaacagggtcaaatctcaagcaactacgacgacgcaatgcagttcagtaaaaagagaagatacctgccgactgccagttccaactcagccttttctatcaatgtgggacacatggtgagccagcaatcagtcatccaaagcgccggggtctctgtgctggataacgaagccccactcagcctcattgactcgagcgccctgaatgcagagatcaagtcttgtcatgataaatcggggattcccgacgaagtgctgcagagcatacttgaccagtatagcaacaaaagcgaatctcagaaggaagatcccttcaatattgccgaacccagagtggaccttcacactagcggagagcactccgagcttgtccaggaagaaaatttgtcccccggcacccagaccccctcaaatgataaggcttccatgctgcaggagtattcaaaatacctgcagcaagccttcgaaaagagtacaaacgcgagcttcactcttggacacggctttcagtttgtctcacttagcagccctctccataaccacaccctctttcccgagaaacagatatacacaaccagccctctcgagtgcggcttcggccaatccgtgacctctgtgcttccctctagcttgccaaagcccccattcggtatgttgttcggatctcaaccaggattatacctcagtgcgctcgatgcaacacatcagcaattgaccccttcccaggaattagacgacctgattgacagccagaaaaatctggagactagctcggccttccagtcatcatcccagaaactgacatcgcaaaaagagcagaagaacctggagagttctaccgggtttcagattccgagtcaggaactcgcctcacagattgatcctcaaaaggacatcgagcccagaactacataccagatcgagaattttgctcaggcctttgggtctcagtttaaatcgggctcaagagtgcctatgacctttattaccaatagcaacggcgaggtggatcaccgggttcgcacaagcgtgagcgatttctctgggtacaccaacatgatgagtgatgtttctgaaccctgctctacacgggtgaagactccaacttcccagtcctaccgttag

SEQ ID NO: 99682 - DNA, 2688 bp, Artificial Sequence
  derived and/or modified sequence
atgaagatcggttccgggtttttgtccggcggcggagggaccggtagttccggcggcagcggatctggtgggggtggcagcggagggggtgggggcgggggatcctccggcaggcgtgcagaaatggagcctacattcccccagggcatggttatgtttaatcaccgcctgccaccagtgactagctttacgcggcctgcagggagtgccgctcctcccccacagtgtgtgctaagctcttcaaccagtgcagcccccgctgcggaaccaccacctccccccgcacccgacatgacgttcaaaaaggagcccgccgcttcagccgccgcctttccttcccaacggacatcttggggatttctccagtcgctggtctcaatcaaacaggagaaacctgcagacccagaagagcagcagtcacatcatcatcatcatcatcaccattatggcggtctcttcgcgggggccgaagagcgatcccccggcctgggtggaggcgaaggagggagccatggggtaattcaggatctctcaatactgcatcagcacgtgcagcaacaacctgctcaacaccaccgggacgtgctgctcagctctagcagcagaaccgatgatcaccatggcacagaggagcccaagcaagataccaacgtgaagaaggccaagaggcctaaacccgaatctcagggaatcaaagcaaagcgtaagccctcagcctctagcaaaccatctctagtgggcgatggggaaggcgccatcctttccccatcccagaagccacacatttgtgaccactgcagcgcagccttccgatcaagttatcatctgcggcgacacgtgctgatccatacaggcgagcgcccattccagtgttctcagtgctccatgggctttatccagaagtatctgctccagagacacgagaaaatccactcacgtgagaagccattcgggtgcgatcagtgttccatgaaatttatacagaagtatcatatggaacggcacaagcgcacccactccggtgagaaaccatataaatgcgatacgtgccagcagtacttttcacgaaccgatcgtttgctgaaacaccgccggacgtgtggcgaagtgatcgtcaagggggccacaagcgccgagcccgggtcatcaaatcataccaacatggggaatcttgccgtgctgtcccaaggcaatacatccagcagcagacgaaagaccaagtccaaatccatcgcaattgagaacaaagagcaaaaaactggaaagaccaacgaaagccagatctccaacaacatcaacatgcaatcctatagtgtggaaatgccaacagtcagctcctccggaggcataatcggtacaggcatagacgagctccagaagagagtgccgaaactgatcttcaaaaagggatctcgcaaaaatacagacaagaattatctgaatttcgtgtcgcccctgccagacatcgtggggcagaagtcactttctggcaagccgtccggctctctggggattgtatccaacaactccgtagagaccattgggctgctccagtccacttccgggaagcagggacagatttctagtaattacgatgatgccatgcagttctccaagaagaggaggtacttacctacagcctctagcaacagtgcctttagtattaacgtaggtcacatggtctcgcagcagtccgtcatacaaagtgctggagtctcagtgctagataacgaggctccattaagcctgatagacagttcagcccttaacgccgagataaagagctgccacgacaagagcgggatacctgacgaagtgctgcaatcgatactagatcaatactcaaataagtccgagtctcagaaagaggatccattcaatatcgctgagccaagagttgacttacatacctcaggcgagcacagcgagctggtgcaagaggaaaacctcagccctgggacacagactccttcgaatgataaggcttccatgctccaggagtatagcaagtacctgcagcaggcattcgagaagtcaactaacgcctcatttacattaggacacggcttccagttcgtgtcgcttagctcacctctgcataaccacacactctttccggagaagcagatctacacaacgtccccactcgaatgtggttttggacagagcgtcacatccgtgcttccctccagcttgcccaagcctcccttcggcatgctgttcggctcacagcctgggttgtatctttctgcattagatgctacacaccagcagctaacaccctcccaggaactcgacgatttgattgactcccagaaaaatcttgaaactagttctgctttccagtcgtcatcccagaaactgacatcgcagaaggagcagaaaaacctggaaagctccaccgggttccagattccatcacaggaactcgcgagtcaaattgatccacagaaggatatagaaccgcgcacaacttaccagatcgagaacttcgcccaagcttttgggagccagtttaagtcaggttctagagtgcctatgacgtttatcacgaattctaatggcgaagtcgaccaccgggtacggacctctgtgtcggatttctccggctacacaaacatgatgagcgatgtctccgaaccatgtagtacccgggtgaagaccccaacttctcagtcatataggtag

SEQ ID NO: 99683 - DNA, 2688 bp, Artificial Sequence
  derived and/or modified sequence
atgaagattggcagcggcttcctgagcggcggcggcggcaccggcagcagcggcggcagcggcagcggcggcggcggcagcggcggcggcggcggcggcggcagcagcggccggcgggcagagatggagcccaccttcccccagggcatggtgatgttcaaccaccggctgccccctgtgaccagcttcaccaggcctgctggcagcgctgcccccccaccccagtgtgtgctgagcagcagcaccagcgctgccccagctgctgagcccccacctcctccagccccagacatgaccttcaagaaggagcctgctgccagcgctgctgccttccccagccagaggacctcctggggcttcctgcagagcctggtgtccatcaagcaggagaagccagctgaccctgaggagcagcagagccaccaccaccaccaccaccaccactatggaggcctgtttgctggagctgaggagaggagccctggcctgggcggcggggagggcggcagccatggagtcatccaggacctgagcatcctgcaccagcacgtgcagcagcagcctgcccagcaccacagagatgtgctgctgagcagcagcagcaggacagatgaccaccacggcacagaggagcccaagcaggacaccaacgtgaagaaggccaagaggcccaagccagagagccagggcatcaaggccaagaggaagcccagcgccagcagcaagcccagcctggtgggagatggagagggcgccatcctgagccccagccagaagccccacatctgtgaccactgcagcgctgccttccgcagcagctaccacctgcggagacatgtgctgatccacactggagagcggcccttccagtgcagccagtgcagcatgggcttcatccagaagtacctgctgcagagacatgagaagatccacagccgggagaagcccttcggctgtgaccagtgcagcatgaagttcatccagaagtaccacatggagcggcacaagaggacccacagcggggagaagccctacaagtgtgacacctgccagcagtacttcagcaggacagaccggctgctgaagcacaggaggacctgtggggaggtgattgtgaagggggccaccagcgctgagcccggcagcagcaaccacaccaacatgggcaacctggccgtgctgagccagggcaacaccagcagcagcaggaggaagaccaagagcaagagcatcgccatcgagaacaaggagcagaagacaggcaagaccaatgaaagccagatcagcaacaacatcaacatgcagagctacagcgtggagatgcccaccgtgagcagcagcggcggcatcattggaactggaattgatgagctgcagaagagggtgcccaagctgatcttcaagaagggcagcaggaagaacacagacaagaactacctgaactttgtgagccccctgcctgacatcgtgggccagaagagcctgagcggcaagcccagcggcagcctgggcatcgtgagcaacaacagcgtggagaccatcggcctgctgcagagcaccagcggcaagcagggccagatcagcagcaactatgatgatgccatgcagttcagcaagaagaggcgctacctgcccacagccagcagcaacagcgccttcagcatcaacgtgggccacatggtgtcccagcagagcgtcatccagagcgctggggtgtctgtgctggacaatgaggcccccctgagcctgattgacagcagcgccctgaatgctgagatcaagagctgccacgacaagagcggcatcccagatgaggtgctgcagagcatcctggaccagtacagcaacaagtctgagagccagaaggaggaccccttcaacattgctgagccccgggtggacctgcacaccagcggggagcacagcgagctggtgcaggaggagaacctgagccctggcacccagacccccagcaatgacaaggcctccatgctgcaggagtacagcaagtacctgcagcaggcctttgagaagagcaccaatgccagcttcaccctgggccacggcttccagtttgtgtccctgagcagccccctgcacaaccacaccctcttccctgagaagcagatctacaccaccagccccctggagtgtggcttcggccagagcgtgacctctgtgctgcccagcagcctgcccaagcccccatttggcatgctgtttggcagccagcccggcctgtacctgagcgccctggatgccacccaccagcagctgacccccagccaggagctggatgacctgattgacagccagaagaacctggagaccagcagcgccttccagagcagcagccagaagctgaccagccagaaggagcagaagaacctggagagcagcacaggcttccagatccccagccaggagctggccagccagattgacccccagaaggacatcgagcccaggaccacctaccagattgaaaattttgcccaggccttcggcagccagttcaagagcggcagccgggtgcccatgaccttcatcaccaacagcaatggagaggtggaccaccgggtgaggacctctgtgtctgacttcagcggctacaccaacatgatgtctgatgtgtctgagccctgcagcaccagggtgaagacccccaccagccagagctacagatag

SEQ ID NO: 99684 - DNA, 2688 bp, Artificial Sequence
  derived and/or modified sequence
atgaagatcggcagcggcttcctgagcggcggcggcggcaccggcagctcgggcggctcaggttcaggaggaggtggctccggtgggggcggaggaggtggatccagcggcagacgcgcggaaatggaaccaacgtttcctcagggtatggtgatgttcaatcaccgcctgccacccgtgacctcgtttactaggccggctggtagcgctgcgccacctcctcaatgcgtgctgtcctcttcgacaagcgcagcaccagccgcagagccccccccaccgcccgcaccggatatgacgttcaagaaagaaccagcagcatccgccgccgcctttccctcacagcgcacgagttggggctttctccagtctttggtgagcatcaagcaggagaaacccgctgatcctgaagaacagcaaagtcatcatcaccaccaccaccatcactacggcggactgttcgccggagccgaggagaggtctcctggactcggagggggcgagggaggcagccatggtgtcattcaggacctttccatcttgcatcagcacgtgcagcaacagccggcacagcatcatcgagacgttctgctgtctagcagttcccggactgacgatcaccatggcaccgaggagccaaagcaggacacgaatgtaaaaaaggccaagagaccaaaacctgagtcccaagggatcaaggccaaacgaaagccttccgctagctctaaaccctcactggtgggagatggagaaggcgcaatcctttcccccagtcagaaacctcacatctgcgaccattgctccgctgcatttcgatcatcataccatcttcgcagacacgtgctaatccacactggcgaacgacccttccaatgttcccaatgttccatggggtttatacaaaaatacctgctgcagagacacgagaagatccattctcgcgagaagccattcggctgcgaccagtgttcaatgaaattcattcagaagtaccacatggagcgccacaagaggacccactccggagagaagccctataagtgcgatacctgtcagcaatacttttcaaggactgatagactactcaagcaccggcggacctgcggggaggtcatcgttaagggggccactagcgccgaacccggaagttcaaatcacacaaatatgggaaatctcgccgttctcagccagggaaacacatctagctctcgaagaaagacaaagagtaaaagtatcgctatcgagaataaagaacagaagacagggaaaactaacgaaagtcagattagtaataacattaacatgcagtcttacagcgttgaaatgcctactgtgagctctagcggaggaattatcggtacaggcatcgatgaactgcaaaagcgtgtgcccaaactcatattcaaaaaaggatctcggaaaaatacagataaaaattacttgaacttcgtgtcgcctctccccgacattgtgggccaaaagtcactgtctggtaagccgtcagggtcactggggattgtgagtaacaactcagtggagacaatcggcctgttgcagtccaccagtggcaagcagggtcagatctcctctaattacgacgacgccatgcaattcagcaaaaagagaaggtatctccccactgcctcctccaacagcgccttcagcatcaacgtgggtcacatggtatcccaacaatcagttatccagagtgcgggcgttagcgttctggataatgaagctcccttatccctgattgattcttccgcactgaacgccgaaattaaatcctgccacgataagtcaggcattcccgacgaggtcctgcaatccatcctggaccaatactctaataagtcagagtctcaaaaagaggatccattcaatattgcagagcccagagtggatctgcacacgtcaggggagcacagcgaattggtgcaagaggagaatctgtccccaggtacacagacaccctctaacgacaaggccagcatgctccaagagtactctaaatatctccagcaggcgtttgaaaagtccactaacgcctcatttaccctgggccatggcttccagttcgtgtccctctctagtccactccataatcacactctattcccagagaagcagatctacaccacctcacccctggagtgcggtttcggccagagtgtgacttccgttctgccaagctccctgccaaagcctcccttcggcatgttgtttggaagccagcctggattatatctgagtgcccttgatgccacacaccagcagctgaccccctcccaggagttagacgacctgatcgattcccagaagaatctcgagacatcatctgcttttcaaagcagttcccagaaactgacatcacaaaaggagcagaaaaacctggagagcagtaccggtttccagatcccaagccaggagctcgcaagccagatcgaccctcagaaggacatagagccccgtacaacctaccaaatagagaactttgctcaggcctttgggagccaattcaaatccgggtcccgtgtcccaatgacctttatcaccaattctaacggagaggtcgaccacagagtacgaactagcgtctctgatttcagcgggtatactaacatgatgtccgacgtttctgagccttgcagtacccgggtgaagacacccacatcccagtcgtaccggtag

SEQ ID NO: 99685 - DNA, 2688 bp, Artificial Sequence
  derived and/or modified sequence
atgaagatcggcagcggcttcctgagcggcggcggcggcaccggctccagtgggggatcaggctccggcggaggagggagcggaggcggtggaggcggaggcagttccgggcgtcgcgcagagatggaaccaacatttccccagggcatggtgatgttcaatcatcgacttcctcctgtaacctcattcactcggccagcagggtccgcggctccacccccacaatgcgtgctttccagtagcactagtgcggctcctgcagctgagccacctcccccacctgccccagacatgacgttcaaaaaggaaccagcagccagtgccgctgcattcccgtcccagcggaccagctggggctttctgcagtcgctcgtcagcatcaagcaagagaagcccgctgatcctgaggagcaacagagccaccaccatcaccaccatcaccattacgggggcttattcgcaggtgctgaagagcggagccccggtcttggcggaggtgaaggaggctctcatggagtgatccaggatctgtctattctacatcaacacgtccagcaacagccagcccagcaccaccgcgatgtgctgttgtcatccagcagcagaaccgatgaccatcatggcacagaggagcctaaacaggacactaatgtcaagaaggcaaagcgaccgaagcccgagtcacaggggattaaagcaaaaaggaagccctcagcctcctcaaaaccatccttagtcggggacggtgagggtgctatcctgagtccatctcagaaaccacacatttgcgaccattgttctgccgccttcagaagttcttaccatttgcggcggcacgtgttaatccacaccggcgaacgtccgtttcagtgcagccagtgctcaatgggctttatccagaagtacttgcttcagcggcacgagaagatacatagtcgggaaaaaccctttgggtgtgaccaatgttctatgaaattcatccaaaaataccacatggagcggcataagaggacccactctggggagaagccttacaagtgcgacacctgccagcagtatttctccagaactgaccggctactgaagcataggcgtacatgtggcgaggtaatcgtgaagggagctacttccgccgaaccaggatcaagcaaccataccaacatgggaaacttagccgtgctgagccaaggtaacacatcctctagccggcgcaagaccaagtccaagtcaattgccatagagaataaagaacagaagacgggtaagaccaacgagtctcaaatctccaacaatataaatatgcagtcctatagcgtagaaatgcctacagttagttcttctggcggcatcattggcacgggaattgatgagctccaaaagcgtgtgcctaagctgatcttcaagaaggggtcccggaagaatactgataagaactatcttaattttgttagtcctctgcctgacattgtggggcagaaatccctcagcggtaagccctctgggagcctgggcatcgtgtccaataattccgtggagacaattggtctgttgcagtcaacctcagggaaacaggggcagattagcagcaactacgacgacgcaatgcagttctctaagaaaagacggtatctccccaccgcttcctcaaatagcgccttctctattaatgtgggtcacatggtgtcccagcagtctgttatccagtcagcaggagtgagcgtactggataacgaggcccccctgtcactgatcgattctagcgcactgaatgcagagatcaagtcctgtcatgataaatccggcatacccgatgaggtcctccagtctattctggatcagtattccaacaagagtgaatctcagaaagaagaccccttcaacatagcagagcctagggtggatttgcataccagtggcgagcactctgagttggtacaggaagaaaacctgtcaccaggtacccagacgccttctaacgacaaggcctcgatgctgcaggagtactcaaagtatcttcaacaagcctttgagaagagcaccaatgctagctttactcttggccacggattccagttcgtgtcactgtcatcccccctccacaaccacactctgtttcctgaaaaacagatttatacaacttctcccctggaatgtgggtttgggcagtctgtgacatccgtgctaccctccagcctgccgaagcctccgtttggcatgttgtttggctcgcagcctgggctctacctgtcagcattggatgccacccaccaacagctgacaccttcacaagagctggatgacctgatcgattcccagaagaatctcgaaacttcttccgcattccagagcagtagccagaagctaaccagccaaaaagagcagaagaatttggagagctccaccggatttcagattccttcccaggagcttgcgtctcagatcgacccacagaaagatatcgaaccacggactacctatcagatcgaaaatttcgcccaggcgtttggctcacagtttaagtctggttcgagagtgcctatgacatttatcactaattcaaatggcgaagtggaccaccgtgttcggaccagcgtgtctgattttagtggctataccaatatgatgagtgatgtttccgaaccttgtagcacacgagtgaaaacccccaccagtcagagttatcgatag

SEQ ID NO: 99686 - DNA, 2688 bp, Artificial Sequence
  derived and/or modified sequence
atgaaaatcgggtccggctttttgagtggcggtggaggaactggcagctctgggggatccggcagcggcggtggtggctcgggaggtgggggaggaggcggatccagtgggaggcgagctgaaatggaacccacctttcctcaaggaatggtgatgttcaaccaccgactccccccagtaaccagttttactcgaccagcaggtagcgcagctccgccacctcagtgtgtgctcagttcaagcacctctgccgcaccagctgccgagccccctcctccccctgctccagacatgaccttcaagaaagagcctgctgcctccgctgctgcgtttccttcacagcggacgtcgtggggttttttgcaatccctcgtgtcgattaagcaagaaaagccggctgacccagaggagcagcagtcacatcaccatcaccaccaccatcattatggaggtttgttcgcaggggctgaagagcgttcccccggtctcggaggcggagaggggggtagccatggagtcatccaggatctttccattctgcatcagcatgtccagcaacaaccagctcaacaccaccgtgacgtgctcctctcgagctcctcccggactgacgaccatcacgggaccgaggaacctaagcaggacacgaacgtgaagaaggccaaaaggcctaagcccgaatcccagggcataaaggccaagcgcaagccctccgcctctagcaagccatcattggttggagatggagaaggagccatcctgtcgccgtcacaaaaaccacatatttgtgaccattgctcagcagctttccgctcaagttatcatttgagaaggcatgtgcttatccataccggtgaacggcctttccaatgctcccagtgttctatggggtttatacagaagtaccttcttcagagacacgagaagattcatagccgagagaagccgttcgggtgcgatcaatgttcaatgaagtttatccagaagtatcatatggaacgccacaagaggactcactccggggagaagccatataagtgcgatacttgccagcagtatttctccaggactgatcgactcctcaagcatcggaggacgtgcggagaagtcatcgttaagggtgccaccagtgcggagccgggtagttccaaccacaccaatatggggaacctggccgtgctgagtcagggtaacacgagcagctcacggcgaaagaccaaaagtaagtctatcgctatcgagaacaaagaacagaaaaccggaaagaccaatgaaagccagatatcaaacaacatcaatatgcaatcctactcggtggaaatgcccactgtctctagctccggcggaatcattgggacagggatagacgaactacagaagcgggtacccaaactgatttttaagaaagggtcccggaagaatacggataagaattatctgaatttcgtttctcccctgccagacatcgtgggccaaaagtcattatcagggaagcctagtggatcactgggcatcgtaagcaacaattctgtcgagactatcggtcttttacagtccacaagcggaaaacaaggccagatctcaagcaattatgatgatgcaatgcagttctccaagaagcgtcgctatctgcccactgcctcttctaattccgcattcagcattaatgtggggcacatggtctcacagcagagcgttattcagagcgccggagtgtctgttctggacaatgaggcccctctgagtctgatcgacagcagcgccctgaacgccgagatcaaatcctgccacgacaagtcgggaatcccagacgaggttctgcagtctatcttagaccagtattcaaataagtctgaatctcagaaggaggacccctttaatattgccgagccacgggtggatcttcacacaagcggagaacactccgagctcgtgcaagaggagaacctgtcacctgggacccagactccatccaatgataaggcctcaatgttacaggagtattcaaagtacctgcagcaggcttttgagaaaagtacaaacgcctctttcactctgggacacgggtttcaattcgtcagcttaagtagcccattacataatcatactttgttccctgagaaacagatctacacgacttcacctctcgagtgcggctttgggcaatcagtcacctctgtccttccatcgtccttgccaaagccaccatttggaatgttgttcggaagccaaccagggttgtacctcagcgcgttggatgccacgcatcaacaattaaccccatcgcaggaacttgatgacctgatcgacagtcagaagaacctggaaaccagttcagcctttcaaagcagctcccagaaactgacatcccagaaggaacagaagaacctggaaagctcaaccggatttcaaattccatcccaggagttggctagtcagatcgatccacagaaggatatcgaaccacgcaccacttatcaaattgagaactttgctcaagcctttggaagccaattcaaatcaggctccagggtccccatgacctttattaccaattccaatggggaagttgaccatcgcgttcggacttccgtatcagatttttcgggctacaccaacatgatgagtgatgtatctgaaccctgttccactagagtgaagactccgacttctcagtcttatcgttag

SEQ ID NO: 99687 - DNA, 2688 bp, Artificial Sequence
  derived and/or modified sequence
atgaagataggttccggattcctttccggtgggggtggcaccggatcatctgggggtagtgggagcggcggaggtggctcgggaggcggagggggagggggttcgagtggacgtcgggcagagatggaacccacattcccccagggcatggtcatgttcaatcatcgactcccaccagttaccagctttacccgcccagccggttcggctgcacccccacctcagtgtgtgctatcctcctcgacttcggccgctccagctgcagaaccaccgccaccccctgcccctgacatgaccttcaagaaagagccggcagcatccgccgctgcgttcccctctcaacgaacgtcatggggctttctgcagtctcttgttagtataaagcaagagaaaccagccgacccggaggagcaacagtctcaccaccaccaccaccaccatcactatggtggcctgttcgccggagctgaagagaggtcgcccggactggggggtggtgaggggggatcacatggcgttatccaggatctgtccatcctgcaccaacatgtgcagcaacagccggctcaacatcaccgggacgtgcttcttagtagctcctccaggacggatgaccatcacggaactgaagagccaaaacaggatacaaacgttaaaaaggctaaacgcccaaagccagaatcccagggaataaaagcgaagcggaaaccctccgcatcctccaagccaagtctagttggcgacggcgaaggcgctattctatcacccagccagaaaccacacatttgcgaccattgctccgcagcctttcggtcaagctaccacttacgcaggcatgtcctgatccatacgggcgagcggccttttcagtgctcgcagtgttctatgggcttcattcagaagtacctgctgcagagacacgagaagattcattcgagagaaaaacctttcggatgtgatcagtgtagtatgaagtttatacagaaataccacatggaacgtcataagaggacacactctggcgagaaaccctataagtgtgatacctgccagcagtacttttcaagaactgaccggttgctgaaacatagaaggacctgtggcgaggtcatcgttaaaggcgctactagtgccgaacccggatccagtaaccacaccaatatgggcaatctcgccgtcctcagtcagggaaatacttcaagttctcggagaaagacgaagagtaagtcaatagctatcgagaataaagaacagaaaacagggaagaccaatgagagccagatatctaacaacatcaatatgcaaagctatagtgtggaaatgcccacggtgtcttcatctggtgggattatcggaaccggcattgacgagctgcagaaaagagtgccaaagttgatcttcaaaaagggctcccggaaaaataccgacaagaattacctgaattttgtgagtcctctccctgatatagtcggacaaaagtctctgagcgggaagcccagcggctctcttggcatcgtatccaataactccgtggaaacgatcggcctgctgcaaagcacgagtggaaagcaaggacagatcagtagcaattacgacgatgccatgcagttttctaaaaagcgcagatacctccccacagcctcgtcaaactccgcgtttagcataaatgtgggccatatggtgtcacagcagagcgtgatccagtctgccggagtgtcggtcctcgacaatgaggctcccttgtctctcatcgattcttccgcgttaaatgccgagattaaatcatgccacgataagtccggaatccccgatgaagtcctgcagtcaatcctggatcagtactccaataaaagcgagagccaaaaggaagacccatttaatatcgccgagcccagggtggacctgcataccagcggggagcacagtgaactcgtccaggaagagaacctcagccctggcacacaaacgccctctaacgacaaggcatctatgctccaggagtactccaagtacttacagcaagcctttgaaaaaagtaccaatgcgtcctttactctcggccatggctttcagttcgtgtctctgtcatctccgcttcacaaccacaccctcttccccgaaaagcagatctacactactagtccactggagtgcggttttggacaatcagtgacctcagtgctgccaagcagcctgcccaaacctccattcggcatgctctttggaagccaaccgggtctctatttgtcagccctggatgcaactcaccagcagctaaccccctctcaggagctggatgatctgatcgatagccagaagaatctcgaaacctcgtccgccttccagtccagctcacagaagcttacctctcagaaggagcaaaaaaatctggagtccagcaccggattccagattccttcccaggagttggcaagtcaaatcgacccacagaaagatatagagcctagaaccacctatcagatagagaatttcgctcaagcctttgggtcccagttcaaaagtgggtctcgggttcctatgacttttataactaattcaaatggcgaggtcgaccaccgagtgcggacgagcgtgagcgattttagcggatacacaaatatgatgtcagacgttagcgaaccttgttccactcgagttaaaacccccacctcgcaaagttacaggtag

SEQ ID NO: 99688 - DNA, 3132 bp, Artificial Sequence
  derived and/or modified sequence
acactgcgccgcggctgcgcagtacacgggaggcttttaattccattgtggagaggacggcgttatttttattaactggaggcgacggcggctgcggcggcggcgggacccgcctcctccggggtatgaaaatcggcagtgggttcctgagtggcggcggaggtaccggcagtagcggtggtagcggctccggcggcggtggtagtggcggcggcggcggcggcggcagcagcggcaggagggcagagatggaacccacctttccccagggtatggttatgttcaaccaccgtcttcccccggtcaccagcttcacccggccggcggggtcggccgcccctcccccgcaatgcgtgttatcctcctctacctccgcagccccggccgctgagcccccccctccgccagccccggacatgactttcaagaaggagccggcggcgtcagccgcggccttcccctcgcagaggacctcctgggggttcttgcagtctttggttagcatcaaacaggagaaacccgcggatcctgaggagcagcagtcccaccaccaccatcaccaccaccactatggggggctgttcgctggagctgaagagaggtctccaggcctaggaggcggtgaaggggggagtcacggcgtcatccaggacctcagtattctccaccagcatgtccagcagcaaccagcccagcaccaccgtgacgtattactcagcagcagtagcaggactgatgaccaccatggcactgaggagccaaagcaggacactaatgtcaaaaaggcaaaaaggccaaagccagaatctcagggaatcaaagccaagaggaagccaagtgcatcttccaaaccttctttggttggagatggagaaggtgccatcctctccccaagtcagaaacctcatatctgtgatcactgtagtgctgctttccgaagctcctatcacctgcggagacatgtcctcattcatacaggagaaagacctttccagtgcagccagtgtagtatgggtttcattcagaaatacctactacagagacatgagaaaattcatagtagagagaagccatttggatgtgatcagtgcagcatgaagtttattcagaagtaccatatggagagacacaagaggacacatagtggagaaaagccatataagtgtgacacttgccaacagtatttttcaaggactgatagattgttgaagcacaggcgcacatgtggtgaagtcatagttaaaggagccactagtgcagaacctgggtcatcaaaccataccaatatgggtaatctggctgtgttgtctcagggaaatacaagttcttcaaggagaaaaacaaagtcaaaaagcatagctattgaaaataaggaacagaagaccggtaaaacaaatgaatcgcaaatttcaaataatataaacatgcagagttactcagtagaaatgcctaccgtgtcttccagtggaggcataattggcactggaatagatgaactgcagaagagggtgccaaaattgatctttaagaaaggaagcagaaagaatacagataaaaactaccttaactttgtgtcaccattaccagacatagtaggacagaaatccttgtctggaaaaccaagtggctcacttggcatagtatcaaataatagtgtggagaccattggtcttctccaaagtacaagtggcaaacaaggtcagataagtagtaattatgatgatgccatgcagttttcaaagaaaagaagatatttaccaactgccagcagcaacagtgccttttctataaacgtaggacacatggtctcccaacagtctgtcattcagtctgcaggtgtcagtgttttggacaatgaggcaccattgtcacttattgactcctcagctctaaatgctgaaattaaatcttgtcatgacaagtctggaattcctgatgaggttttacaaagtattttggatcaatactccaacaaatcagaaagccagaaagaggatcctttcaatattgcagaaccacgagtggatttacacacctcaggagaacactcagaattggttcaagaagaaaatttgagcccaggcacccaaacaccttcaaatgataaagcaagtatgttgcaagaatactccaaatacctccaacaggcttttgaaaaatccactaatgcaagttttactcttggacacggtttccaatttgtcagtttgtcttcacctctccacaaccacactttgtttccagaaaaacaaatatacactacgtctcctttggagtgtggtttcggccaatctgttacctcagtgttgccatcttcattgccaaagcctccttttgggatgttgtttggatctcagccaggtctttatttgtctgctttggatgctacacatcagcagttgacaccttcccaggagctggatgatctgatagattctcagaagaacttagagacttcatcagccttccagtcctcatctcagaaattgactagccagaaggaacagaaaaacttagagtcttcaacaggctttcagattccatctcaggagttagctagccagatagatcctcagaaagacatagagcctagaacaacgtatcagattgagaactttgcacaagcgtttggttctcagtttaagtcgggcagcagggtgccaatgacctttatcactaactctaatggagaagtggaccatagagtaaggacttcagtgtcagatttctcagggtatacaaatatgatgtctgatgtaagtgagccatgtagtacaagagtaaagacacccaccagccagagttacaggtaaggtcccaaaagtggccaggctggaggtcttctaatgtaattttgttttattttgagaacactgccattggaatgtttctacacgatcctattaagaataatgtgatgccctttcaatgcaacttttcatatttagtttattttgttagcgtgattttagctctgtttgtattatgatttttaatcaaaatcaatagattaaaaatagtttgacattcaaagtgacaatgtttagcaatcaaatttacatgtatagatcgtcagggaatagcccaaatgttttaaacgcaaaaaaaaagacaaaaaaaaaccaaaaaaaa

SEQ ID NO: 99689 - DNA, 3080 bp, Artificial Sequence
  derived and/or modified sequence
gtggagaggacggcgttatttttattaactggaggcgacggcggctgcggcggcggcgggacccccaggcctcctccggggtatgaaaatcggcagtgggttcctgagtggcggcggaggtaccggcagtagcggtggtagcggctccggcggcggtggtagtggcggcggcggcggcggcggcagcagcggcaggagggcagagatggaacccacctttccccagggtatggttatgttcaaccaccgtcttcccccggtcaccagcttcacccggccggcggggtcggccgcccctcccccgcaatgcgtgttatcctcctctacctccgcagccccggccgctgagcccccccctccgccagccccggacatgactttcaagaaggagccggcggcgtcagccgcggccttcccctcgcagaggacctcctgggggttcttgcagtctttggttagcatcaaacaggagaaacccgcggatcctgaggagcagcagtcccaccaccaccatcaccaccaccactatggggggctgttcgctggagctgaagagaggtctccaggcctaggaggcggtgaaggggggagtcacggcgtcatccaggacctcagtattctccaccagcatgtccagcagcaaccagcccagcaccaccgtgacgtattactcagcagcagtagcaggactgatgaccaccatggcactgaggagccaaagcaggacactaatgtcaaaaaggcaaaaaggccaaagccagaatctcagggaatcaaagccaagaggaagccaagtgcatcttccaaaccttctttggttggagatggagaaggtgccatcctctccccaagtcagaaacctcatatctgtgatcactgtagtgctgctttccgaagctcctatcacctgcggagacatgtcctcattcatacaggagaaagacctttccagtgcagccagtgtagtatgggtttcattcagaaatacctactacagagacatgagaaaattcatagtagagagaagccatttggatgtgatcagtgcagcatgaagtttattcagaagtaccatatggagagacacaagaggacacatagtggagaaaagccatataagtgtgacacttgccaacagtatttttcaaggactgatagattgttgaagcacaggcgcacatgtggtgaagtcatagttaaaggagccactagtgcagaacctgggtcatcaaaccataccaatatgggtaatctggctgtgttgtctcagggaaatacaagttcttcaaggagaaaaacaaagtcaaaaagcatagctattgaaaataaggaacagaagaccggtaaaacaaatgaatcgcaaatttcaaataatataaacatgcagagttactcagtagaaatgcctaccgtgtcttccagtggaggcataattggcactggaatagatgaactgcagaagagggtgccaaaattgatctttaagaaaggaagcagaaagaatacagataaaaactaccttaactttgtgtcaccattaccagacatagtaggacagaaatccttgtctggaaaaccaagtggctcacttggcatagtatcaaataatagtgtggagaccattggtcttctccaaagtacaagtggcaaacaaggtcagataagtagtaattatgatgatgccatgcagttttcaaagaaaagaagatatttaccaactgccagcagcaacagtgccttttctataaacgtaggacacatggtctcccaacagtctgtcattcagtctgcaggtgtcagtgttttggacaatgaggcaccattgtcacttattgactcctcagctctaaatgctgaaattaaatcttgtcatgacaagtctggaattcctgatgaggttttacaaagtattttggatcaatactccaacaaatcagaaagccagaaagaggatcctttcaatattgcagaaccacgagtggatttacacacctcaggagaacactcagaattggttcaagaagaaaatttgagcccaggcacccaaacaccttcaaatgataaagcaagtatgttgcaagaatactccaaatacctccaacaggcttttgaaaaatccactaatgcaagttttactcttggacacggtttccaatttgtcagtttgtcttcacctctccacaaccacactttgtttccagaaaaacaaatatacactacgtctcctttggagtgtggtttcggccaatctgttacctcagtgttgccatcttcattgccaaagcctccttttgggatgttgtttggatctcagccaggtctttatttgtctgctttggatgctacacatcagcagttgacaccttcccaggagctggatgatctgatagattctcagaagaacttagagacttcatcagccttccagtcctcatctcagaaattgactagccagaaggaacagaaaaacttagagtcttcaacaggctttcagattccatctcaggagttagctagccagatagatcctcagaaagacatagagcctagaacaacgtatcagattgagaactttgcacaagcgtttggttctcagtttaagtcgggcagcagggtgccaatgacctttatcactaactctaatggagaagtggaccatagagtaaggacttcagtgtcagatttctcagggtatacaaatatgatgtctgatgtaagtgagccatgtagtacaagagtaaagacacccaccagccagagttacaggtaaggtcccaaaagtggccaggctggaggtcttctaatgtaattttgttttattttgagaacactgccattggaatgtttctacacgatcctattaagaataatgtgatgccctttcaatgcaacttttcatatttagtttattttgttagcgtgattttagctctgtttgtattatgatttttaatcaaaatcaatagattaaaaatagtttgacattcaaagtgacaatgtttagcaatcaaatttacatgtatagatcgtcagggaatagcccaaatgttttaaacgcaaaaaaaaagacaaaaaaaaac

SEQ ID NO: 99690 - protein, 859 aa, Artificial Sequence
  derived and/or modified sequence
MKIGSGFLSGGGGTGSSGGSGSGGGGSGGGGGGGSSGRRAEMEPTFPQAPAAEPPPPPAPDMTFKKEPAASAAAFPSQRTSWGFLQSLVSIKQEKPADPEEQQSHHHHHHHHYGGLFAGAEERSPGLGGGEGGSHGVIQDLSILHQHVQQQPAQHHRDVLLSSSSRTDDHHGTEEPKQDTNVKKAKRPKPESQGIKAKRKPSASSKPSLVGDGEGAILSPSQKPHICDHCSAAFRSSYHLRRHVLIHTGERPFQCSQCSMGFIQKYLLQRHEKIHSREKPFGCDQCSMKFIQKYHMERHKRTHSGEKPYKCDTCQQYFSRTDRLLKHRRTCGEVIVKGATSAEPGSSNHTNMGNLAVLSQGNTSSSRRKTKSKSIAIENKEQKTGKTNESQISNNINMQSYSVEMPTVSSSGGIIGTGIDELQKRVPKLIFKKGSRKNTDKNYLNFVSPLPDIVGQKSLSGKPSGSLGIVSNNSVETIGLLQSTSGKQGQISSNYDDAMQFSKKRRYLPTASSNSAFSINVGHMVSQQSVIQSAGVSVLDNEAPLSLIDSSALNAEIKSCHDKSGIPDEVLQSILDQYSNKSESQKEDPFNIAEPRVDLHTSGEHSELVQEENLSPGTQTPSNDKASMLQEYSKYLQQAFEKSTNASFTLGHGFQFVSLSSPLHNHTLFPEKQIYTTSPLECGFGQSVTSVLPSSLPKPPFGMLFGSQPGLYLSALDATHQQLTPSQELDDLIDSQKNLETSSAFQSSSQKLTSQKEQKNLESSTGFQIPSQELASQIDPQKDIEPRTTYQIENFAQAFGSQFKSGSRVPMTFITNSNGEVDHRVRTSVSDFSGYTNMMSDVSEPCSTRVKTPTSQSYR

SEQ ID NO: 99691 - protein, 600 aa, Artificial Sequence
  derived and/or modified sequence
MGFIQKYLLQRHEKIHSREKPFGCDQCSMKFIQKYHMERHKRTHSGEKPYKCDTCQQYFSRTDRLLKHRRTCGEVIVKGATSAEPGSSNHTNMGNLAVLSQGNTSSSRRKTKSKSIAIENKEQKTGKTNESQISNNINMQSYSVEMPTVSSSGGIIGTGIDELQKRVPKLIFKKGSRKNTDKNYLNFVSPLPDIVGQKSLSGKPSGSLGIVSNNSVETIGLLQSTSGKQGQISSNYDDAMQFSKKRRYLPTASSNSAFSINVGHMVSQQSVIQSAGVSVLDNEAPLSLIDSSALNAEIKSCHDKSGIPDEVLQSILDQYSNKSESQKEDPFNIAEPRVDLHTSGEHSELVQEENLSPGTQTPSNDKASMLQEYSKYLQQAFEKSTNASFTLGHGFQFVSLSSPLHNHTLFPEKQIYTTSPLECGFGQSVTSVLPSSLPKPPFGMLFGSQPGLYLSALDATHQQLTPSQELDDLIDSQKNLETSSAFQSSSQKLTSQKEQKNLESSTGFQIPSQELASQIDPQKDIEPRTTYQIENFAQAFGSQFKSGSRVPMTFITNSNGEVDHRVRTSVSDFSGYTNMMSDVSEPCSTRVKTPTSQSYR

SEQ ID NO: 99692 - DNA, 258 bp, Artificial Sequence
  derived and/or modified sequence
gccaccctgcggaacaagctgatgtggaacatcatcagcatcatcattattctggcgggcgcgattgcccttatcatcggctttggtattagcgaggtgagcgtgtggctttctgcaatgaagggctgcaggtcaagcaaggccagcctttctatcgacctttgttttctaaattgcagggaaaccctacaccatagccactattgccgtttgtcgtgggaacactggggaggctggaaccctgagctgcatttctag

SEQ ID NO: 99693 - DNA, 2580 bp, Artificial Sequence
  derived and/or modified sequence
atgaagatcggcagcggcttcctgagcggcggcggcggcaccggcagcagcggcggcagcggcagcggcggcggcggcagcggcggcggcggcggcggcggcagcagcggcagaagagccgagatggagcccaccttcccccaggcccccgccgccgagcccccccccccccccgcccccgacatgaccttcaagaaggagcccgccgccagcgccgccgccttccccagccagagaaccagctggggcttcctgcagagcctggtgagcatcaagcaggagaagcccgccgaccccgaggagcagcagagccaccaccaccaccaccaccaccactacggcggcctgttcgccggcgccgaggagagaagccccggcctgggcggcggcgagggcggcagccacggcgtgatccaggacctgagcatcctgcaccagcacgtgcagcagcagcccgcccagcaccacagagacgtgctgctgagcagcagcagcagaaccgacgaccaccacggcaccgaggagcccaagcaggacaccaacgtgaagaaggccaagagacccaagcccgagagccagggcatcaaggccaagagaaagcccagcgccagcagcaagcccagcctggtgggcgacggcgagggcgccatcctgagccccagccagaagccccacatctgcgaccactgcagcgccgccttcagaagcagctaccacctgagaagacacgtgctgatccacaccggcgagagacccttccagtgcagccagtgcagcatgggcttcatccagaagtacctgctgcagagacacgagaagatccacagcagagagaagcccttcggctgcgaccagtgcagcatgaagttcatccagaagtaccacatggagagacacaagagaacccacagcggcgagaagccctacaagtgcgacacctgccagcagtacttcagcagaaccgacagactgctgaagcacagaagaacctgcggcgaggtgatcgtgaagggcgccaccagcgccgagcccggcagcagcaaccacaccaacatgggcaacctggccgtgctgagccagggcaacaccagcagcagcagaagaaagaccaagagcaagagcatcgccatcgagaacaaggagcagaagaccggcaagaccaacgagagccagatcagcaacaacatcaacatgcagagctacagcgtggagatgcccaccgtgagcagcagcggcggcatcatcggcaccggcatcgacgagctgcagaagagagtgcccaagctgatcttcaagaagggcagcagaaagaacaccgacaagaactacctgaacttcgtgagccccctgcccgacatcgtgggccagaagagcctgagcggcaagcccagcggcagcctgggcatcgtgagcaacaacagcgtggagaccatcggcctgctgcagagcaccagcggcaagcagggccagatcagcagcaactacgacgacgccatgcagttcagcaagaagagaagatacctgcccaccgccagcagcaacagcgccttcagcatcaacgtgggccacatggtgagccagcagagcgtgatccagagcgccggcgtgagcgtgctggacaacgaggcccccctgagcctgatcgacagcagcgccctgaacgccgagatcaagagctgccacgacaagagcggcatccccgacgaggtgctgcagagcatcctggaccagtacagcaacaagagcgagagccagaaggaggaccccttcaacatcgccgagcccagagtggacctgcacaccagcggcgagcacagcgagctggtgcaggaggagaacctgagccccggcacccagacccccagcaacgacaaggccagcatgctgcaggagtacagcaagtacctgcagcaggccttcgagaagagcaccaacgccagcttcaccctgggccacggcttccagttcgtgagcctgagcagccccctgcacaaccacaccctgttccccgagaagcagatctacaccaccagccccctggagtgcggcttcggccagagcgtgaccagcgtgctgcccagcagcctgcccaagccccccttcggcatgctgttcggcagccagcccggcctgtacctgagcgccctggacgccacccaccagcagctgacccccagccaggagctggacgacctgatcgacagccagaagaacctggagaccagcagcgccttccagagcagcagccagaagctgaccagccagaaggagcagaagaacctggagagcagcaccggcttccagatccccagccaggagctggccagccagatcgacccccagaaggacatcgagcccagaaccacctaccagatcgagaacttcgcccaggccttcggcagccagttcaagagcggcagcagagtgcccatgaccttcatcaccaacagcaacggcgaggtggaccacagagtgagaaccagcgtgagcgacttcagcggctacaccaacatgatgagcgacgtgagcgagccctgcagcaccagagtgaagacccccaccagccagagctacagatag

SEQ ID NO: 99694 - DNA, 1803 bp, Artificial Sequence
  derived and/or modified sequence
atgggcttcatccagaagtacctgctgcagagacacgagaagatccacagcagagagaagcccttcggctgcgaccagtgcagcatgaagttcatccagaagtaccacatggagagacacaagagaacccacagcggcgagaagccctacaagtgcgacacctgccagcagtacttcagcagaaccgacagactgctgaagcacagaagaacctgcggcgaggtgatcgtgaagggcgccaccagcgccgagcccggcagcagcaaccacaccaacatgggcaacctggccgtgctgagccagggcaacaccagcagcagcagaagaaagaccaagagcaagagcatcgccatcgagaacaaggagcagaagaccggcaagaccaacgagagccagatcagcaacaacatcaacatgcagagctacagcgtggagatgcccaccgtgagcagcagcggcggcatcatcggcaccggcatcgacgagctgcagaagagagtgcccaagctgatcttcaagaagggcagcagaaagaacaccgacaagaactacctgaacttcgtgagccccctgcccgacatcgtgggccagaagagcctgagcggcaagcccagcggcagcctgggcatcgtgagcaacaacagcgtggagaccatcggcctgctgcagagcaccagcggcaagcagggccagatcagcagcaactacgacgacgccatgcagttcagcaagaagagaagatacctgcccaccgccagcagcaacagcgccttcagcatcaacgtgggccacatggtgagccagcagagcgtgatccagagcgccggcgtgagcgtgctggacaacgaggcccccctgagcctgatcgacagcagcgccctgaacgccgagatcaagagctgccacgacaagagcggcatccccgacgaggtgctgcagagcatcctggaccagtacagcaacaagagcgagagccagaaggaggaccccttcaacatcgccgagcccagagtggacctgcacaccagcggcgagcacagcgagctggtgcaggaggagaacctgagccccggcacccagacccccagcaacgacaaggccagcatgctgcaggagtacagcaagtacctgcagcaggccttcgagaagagcaccaacgccagcttcaccctgggccacggcttccagttcgtgagcctgagcagccccctgcacaaccacaccctgttccccgagaagcagatctacaccaccagccccctggagtgcggcttcggccagagcgtgaccagcgtgctgcccagcagcctgcccaagccccccttcggcatgctgttcggcagccagcccggcctgtacctgagcgccctggacgccacccaccagcagctgacccccagccaggagctggacgacctgatcgacagccagaagaacctggagaccagcagcgccttccagagcagcagccagaagctgaccagccagaaggagcagaagaacctggagagcagcaccggcttccagatccccagccaggagctggccagccagatcgacccccagaaggacatcgagcccagaaccacctaccagatcgagaacttcgcccaggccttcggcagccagttcaagagcggcagcagagtgcccatgaccttcatcaccaacagcaacggcgaggtggaccacagagtgagaaccagcgtgagcgacttcagcggctacaccaacatgatgagcgacgtgagcgagccctgcagcaccagagtgaagacccccaccagccagagctacagatag

SEQ ID NO: 99695 - DNA, 2580 bp, Artificial Sequence
  derived and/or modified sequence
atgaagatcggctccggcttcctatccggtgggggaggcacgggatcctccgggggatctgggagtggaggtggtgggagcgggggaggggggggggggggatctagtggcaggcgcgccgaaatggagcccactttcccccaagcacccgctgcagagcctcctccccctccagccccagacatgacgtttaagaaggaacccgccgccagcgctgcagctttcccctcccagcgcacctcttggggatttcttcagtccctggtctctatcaaacaggagaagcccgcagatccagaggagcagcaaagccaccaccaccaccaccaccatcactacggaggactctttgcgggggcagaggagcgctctcccgggctgggaggtggcgaagggggaagccatggggtcattcaggatctgtccatcttgcatcaacacgtgcagcagcaaccagctcagcatcaccgcgatgtgctgctcagcagtagcagccggacagatgatcaccacgggaccgaagagcccaagcaagacacaaacgtaaaaaaagccaaacgccctaaacctgagtctcaaggcatcaaggcaaagaggaaacccagtgccagttccaagccatccctggtaggtgatggtgaaggggccattcttagtccctcccaaaagccgcacatctgcgaccactgttccgccgcctttcgctcttcctaccacctccgccggcacgttctgattcacacaggcgaaagacctttccaatgtagccaatgctcaatgggatttatccagaaatacctcctccagcgacatgagaagatacatagcagggagaagccatttgggtgcgaccaatgcagcatgaaattcattcagaagtatcacatggagagacacaagcggacccattctggagagaaaccttacaagtgtgacacatgtcaacagtatttctctcggactgatcgactccttaaacatcgcagaacatgcggtgaggtgattgttaagggcgcaactagcgccgagcctggcagctccaatcacaccaacatgggtaatctagccgttcttagtcagggaaatactagctcgagccgcagaaagacaaaaagcaaatctattgccatcgaaaacaaagaacaaaagacaggcaagaccaatgagtctcagatttctaacaatatcaatatgcagagttattcagttgaaatgccaacggtgtcctcctctggtggcattattggaaccggtattgatgaactgcagaagcgcgtccctaagctcatatttaagaagggcagcagaaaaaacacagataaaaattatctcaacttcgtcagcccactgcctgatattgttggccagaaaagtctaagcggaaagcctagcggaagcttggggatcgttagtaataactcagttgagaccatcggcctgctgcagagcacctcagggaagcagggacaaatcagctcaaattacgacgacgccatgcaattttccaagaagagacggtatctcccaacggcttcaagcaatagtgccttctcaatcaacgtcggtcacatggtatctcagcagtcagtgattcaatccgccggagtgagcgtcctagacaacgaggctcctctaagtcttattgatagcagtgccttaaacgctgaaattaagtcctgtcacgataagagtggaattcctgatgaagtcttacagtcaatcctggatcaatactcaaacaaatccgaatcccagaaggaagacccgtttaatatcgctgaaccgcgggtagatctccacacctccggggagcatagcgagctggtacaggaggagaatctatcgccaggtactcaaaccccaagcaacgacaaggctagcatgctgcaggagtactcgaagtacctccaacaagcctttgagaagagcacaaatgcttcatttaccctaggacatggattccaatttgtttccctctcttctcccctacataaccataccctgttcccggagaagcagatatatacaacaagtcctctggagtgtggctttggacagagtgtcacgtccgttctcccttcctcattgccaaagccacccttcggaatgctcttcggctctcagcccgggctttacctcagcgctcttgatgcaacccatcaacagctaaccccttcccaggagttagacgaccttattgattcccagaagaatcttgagacttcaagcgcctttcaatcatcctctcagaaactcacgtcacagaaggagcaaaaaaacctggaatcctcaacgggcttccagataccatcgcaagagttggcctcgcagatagatccgcaaaaggacatcgaaccgcgtactacctatcagatagagaactttgcccaggcgtttggcagccaatttaaatcaggcagtagagtcccaatgacattcattaccaattcaaatggtgaggtcgaccacagagtgcggaccagtgtgagtgacttctccgggtatacaaacatgatgagtgacgtttctgagccctgctctacacgggtcaagaccccaaccagtcagagttaccgctag

SEQ ID NO: 99696 - DNA, 1803 bp, Artificial Sequence
  derived and/or modified sequence
atgggatttatccagaagtatctgttacagcgccacgaaaagattcactcccgggagaagccgtttggctgtgatcagtgcagcatgaaattcattcagaagtaccatatggagcgccacaaacggacacactctggggaaaaaccgtacaaatgcgatacctgccaacagtatttcagcaggaccgatcgtctgttgaaacacagaagaacttgcggcgaagtgatagttaagggagcaactagcgccgagccggggagctctaaccacacaaacatgggcaaccttgcagtcctgagtcagggtaacacatcatcatccaggcgcaagacaaagtccaaaagtatagccatagaaaacaaggaacagaagactggcaaaaccaacgagagtcagattagcaataacattaatatgcagtcctactctgtggagatgcccacggtctcgagcagcggagggattatcgggaccggaatagacgagctgcagaagcgggttccaaaactgatttttaagaaaggatcgcgcaaaaacaccgataaaaactatctaaacttcgtgtcccccctgcccgacatcgtgggacagaagagccttagcggaaagcctagcggtagtctgggcatcgtgtcgaacaacagtgtggagaccattggactgctgcagtccacttccggcaagcaggggcaaatctcaagcaattacgatgacgcgatgcagttttcgaaaaagcgtcgctacctgccgaccgccagctcgaattccgcattctccatcaacgtcggccatatggtgagtcagcagtccgttattcagtctgctggtgtttcagttcttgacaatgaggccccattatctctgatcgatagctccgcacttaacgcagaaattaaatcatgtcatgataagagcggcatccccgacgaggtgcttcaaagcatactcgatcagtacagcaacaagtcggagtctcaaaaggaggacccatttaatattgccgagccacgggtggacttgcacacatctggagaacacagcgagctcgttcaggaggagaatctgagccctggcacgcagacaccatctaacgacaaggcgtccatgctacaggaatactctaagtatttgcagcaggcgtttgagaaatccaccaatgcaagctttactctcggccatgggtttcagttcgtgtcattgagcagccccctgcacaaccacacgctgtttcccgagaagcagatctatacaacatccccactcgagtgtggatttgggcagagtgttacgtctgtgctgccgtcctctctccccaagcctcccttcggtatgctgttcggatctcaaccgggactctacctcagcgcgctggacgccacccaccagcagctgactcccagtcaagaacttgacgacttgatagatagtcagaagaatctggagacctccagcgccttccagagcagttctcagaaactgacttctcagaaagagcagaaaaacttggaatctagcactggtttccagattcccagccaggagctggcaagtcaaattgatcctcagaaagatatcgaacccagaaccacctaccagatcgagaactttgcccaggcgttcggctcccagttcaagtccggcagccgagttccaatgacctttattacaaattccaatggcgaagttgaccatcgcgtgcgaacgagcgtgtcagacttttctggctacaccaacatgatgtcggacgtctctgaaccttgttcgacacgagtgaaaaccccaacaagccagtcctaccgatag

SEQ ID NO: 99697 - DNA, 2580 bp, Artificial Sequence
  derived and/or modified sequence
atgaagattggcagcggcttcctgagcggcggcggcggcaccggcagcagcggcggcagcggcagcggcggcggcggcagcggcggcggcggcggcggcggcagcagcggccggcgggcagagatggagcccaccttcccccaggccccagctgctgagcccccacctcctccagccccagacatgaccttcaagaaggagcctgctgccagcgctgctgccttccccagccagaggacctcctggggcttcctgcagagcctggtgtccatcaagcaggagaagccagctgaccctgaggagcagcagagccaccaccaccaccaccaccaccactatggaggcctgtttgctggagctgaggagaggagccctggcctgggcggcggggagggcggcagccatggagtcatccaggacctgagcatcctgcaccagcacgtgcagcagcagcctgcccagcaccacagagatgtgctgctgagcagcagcagcaggacagatgaccaccacggcacagaggagcccaagcaggacaccaacgtgaagaaggccaagaggcccaagccagagagccagggcatcaaggccaagaggaagcccagcgccagcagcaagcccagcctggtgggagatggagagggcgccatcctgagccccagccagaagccccacatctgtgaccactgcagcgctgccttccgcagcagctaccacctgcggagacatgtgctgatccacactggagagcggcccttccagtgcagccagtgcagcatgggcttcatccagaagtacctgctgcagagacatgagaagatccacagccgggagaagcccttcggctgtgaccagtgcagcatgaagttcatccagaagtaccacatggagcggcacaagaggacccacagcggggagaagccctacaagtgtgacacctgccagcagtacttcagcaggacagaccggctgctgaagcacaggaggacctgtggggaggtgattgtgaagggggccaccagcgctgagcccggcagcagcaaccacaccaacatgggcaacctggccgtgctgagccagggcaacaccagcagcagcaggaggaagaccaagagcaagagcatcgccatcgagaacaaggagcagaagacaggcaagaccaatgaaagccagatcagcaacaacatcaacatgcagagctacagcgtggagatgcccaccgtgagcagcagcggcggcatcattggaactggaattgatgagctgcagaagagggtgcccaagctgatcttcaagaagggcagcaggaagaacacagacaagaactacctgaactttgtgagccccctgcctgacatcgtgggccagaagagcctgagcggcaagcccagcggcagcctgggcatcgtgagcaacaacagcgtggagaccatcggcctgctgcagagcaccagcggcaagcagggccagatcagcagcaactatgatgatgccatgcagttcagcaagaagaggcgctacctgcccacagccagcagcaacagcgccttcagcatcaacgtgggccacatggtgtcccagcagagcgtcatccagagcgctggggtgtctgtgctggacaatgaggcccccctgagcctgattgacagcagcgccctgaatgctgagatcaagagctgccacgacaagagcggcatcccagatgaggtgctgcagagcatcctggaccagtacagcaacaagtctgagagccagaaggaggaccccttcaacattgctgagccccgggtggacctgcacaccagcggggagcacagcgagctggtgcaggaggagaacctgagccctggcacccagacccccagcaatgacaaggcctccatgctgcaggagtacagcaagtacctgcagcaggcctttgagaagagcaccaatgccagcttcaccctgggccacggcttccagtttgtgtccctgagcagccccctgcacaaccacaccctcttccctgagaagcagatctacaccaccagccccctggagtgtggcttcggccagagcgtgacctctgtgctgcccagcagcctgcccaagcccccatttggcatgctgtttggcagccagcccggcctgtacctgagcgccctggatgccacccaccagcagctgacccccagccaggagctggatgacctgattgacagccagaagaacctggagaccagcagcgccttccagagcagcagccagaagctgaccagccagaaggagcagaagaacctggagagcagcacaggcttccagatccccagccaggagctggccagccagattgacccccagaaggacatcgagcccaggaccacctaccagattgaaaattttgcccaggccttcggcagccagttcaagagcggcagccgggtgcccatgaccttcatcaccaacagcaatggagaggtggaccaccgggtgaggacctctgtgtctgacttcagcggctacaccaacatgatgtctgatgtgtctgagccctgcagcaccagggtgaagacccccaccagccagagctacagatag

SEQ ID NO: 99698 - DNA, 1803 bp, Artificial Sequence
  derived and/or modified sequence
atgggcttcatccagaagtacctgctgcagagacatgagaagatccacagccgggagaagcccttcggctgtgaccagtgcagcatgaagttcatccagaagtaccacatggagcggcacaagaggacccacagcggggagaagccctacaagtgtgacacctgccagcagtacttcagcaggacagaccggctgctgaagcacaggaggacctgtggggaggtgattgtgaagggggccaccagcgctgagcccggcagcagcaaccacaccaacatgggcaacctggccgtgctgagccagggcaacaccagcagcagcaggaggaagaccaagagcaagagcatcgccatcgagaacaaggagcagaagacaggcaagaccaatgaaagccagatcagcaacaacatcaacatgcagagctacagcgtggagatgcccaccgtgagcagcagcggcggcatcatcggcaccggcattgatgagctgcagaagagggtgcccaagctgatcttcaagaagggcagcaggaagaacacagacaagaactacctgaactttgtgagccccctgcctgacatcgtgggccagaagagcctgagcggcaagcccagcggcagcctgggcatcgtgagcaacaacagcgtggagaccatcggcctgctgcagagcaccagcggcaagcagggccagatcagcagcaactatgatgatgccatgcagttcagcaagaagaggcgctacctgcccacagccagcagcaacagcgccttcagcatcaacgtgggccacatggtgtcccagcagagcgtcatccagagcgctggggtgtctgtgctggacaatgaggcccccctgagcctgattgacagcagcgccctgaatgctgagatcaagagctgccacgacaagagcggcatcccagatgaggtgctgcagagcatcctggaccagtacagcaacaagtctgagagccagaaggaggaccccttcaacattgctgagccccgggtggacctgcacaccagcggggagcacagcgagctggtgcaggaggagaacctgagccctggcacccagacccccagcaatgacaaggcctccatgctgcaggagtacagcaagtacctgcagcaggcctttgagaagagcaccaatgccagcttcaccctgggccacggcttccagtttgtgtccctgagcagccccctgcacaaccacaccctcttccctgagaagcagatctacaccaccagccccctggagtgtggcttcggccagagcgtgacctctgtgctgcccagcagcctgcccaagccacccttcggcatgctgtttggcagccagcccggcctgtacctgagcgccctggatgccacccaccagcagctgacccccagccaggagctggatgacctgattgacagccagaagaacctggagaccagcagcgccttccagagcagcagccagaagctgaccagccagaaggagcagaagaacctggagagcagcacaggcttccagatccccagccaggagctggccagccagattgacccccagaaggacatcgagcccaggaccacctaccagatcgagaactttgcccaggccttcggcagccagttcaagagcggcagccgggtgcccatgaccttcatcaccaacagcaatggagaggtggaccaccgggtgaggacctctgtgtctgacttcagcggctacaccaacatgatgtctgatgtgtctgagccctgcagcaccagggtgaagacccccaccagccagagctacagatag

SEQ ID NO: 99699 - DNA, 2580 bp, Artificial Sequence
  derived and/or modified sequence
atgaagatcggcagcggcttcctgagcggcggcggcggcaccggcagctcaggaggatcggggtcagggggaggcggcagtggcggaggtggaggaggcgggtctagtgggagacgggctgagatggaacctacctttccccaggctcctgctgctgagccacctccaccgccagctccagatatgaccttcaagaaggaaccggccgcaagtgccgccgcatttccaagccagaggacctcctgggggtttcttcaaagtctagtttctatcaaacaggagaagccggccgatcccgaggagcagcagtctcaccaccatcaccaccatcaccactatggaggactgttcgccggggcagaggaacgctcaccgggattgggtggaggggagggcgggagtcatggcgtcatccaggacctgagcatcctgcaccaacacgtgcagcagcagcctgcccagcaccaccgggacgtcctgctgagtagttcctctcggaccgacgaccaccatggaactgaagaacccaagcaggatactaacgtgaaaaaggcaaaacgaccaaagccagagagccagggtattaaggcaaagcggaagccttccgcttcatcaaaaccctctctggtgggagatggtgaaggcgcaattttgtccccttcacagaagccacatatctgtgaccattgctctgctgcgtttagaagcagctaccatctaagaagacatgtgctgatccatactggagagagaccatttcaatgctcgcagtgctccatgggattcatccagaagtacttgctgcagaggcacgaaaagattcacagccgggagaaacctttcggatgcgatcagtgctcaatgaaatttattcagaagtatcacatggaaaggcataagcgcacccatagtggcgagaagccttacaaatgcgatacctgtcaacaatacttttcaagaactgatcggctgcttaaacatcggcggacatgcggagaggtgatcgtgaagggcgccacatccgccgagcccggctcaagcaatcacaccaacatggggaacctggccgtgctttctcaggggaacacgagtagcagtcggcgtaagaccaaatccaaatccatcgccattgagaacaaagagcagaaaaccgggaaaactaacgaaagccagatttcaaacaatatcaacatgcagtcctactctgtggagatgccaaccgtcagctcttccggtggaatcatcggcaccggcatagacgaactgcagaaaagggtgcctaagctcatcttcaagaaaggtagtcggaagaatacagacaagaactacctgaattttgtttctcctctgcccgacattgtggggcaaaagtctctatcgggcaagccctcagggagcctgggaattgtcagtaacaattccgtggagacaattggccttctccagtctacttctgggaagcagggtcaaattagctcaaactacgatgacgccatgcagttctcaaagaaaagaagatacctgccaaccgcatccagtaattcagccttcagtatcaacgtaggccatatggtcagccaacagagtgtgatccagtccgccggtgtctccgtcctggataatgaggctcctctgtctctcatcgattcttctgcgctaaacgccgagatcaagtcctgccacgataagtcagggatcccggacgaagtgctgcagtccatactggatcagtatagcaataaaagtgagtcccagaaggaagatccattcaatatcgccgagcctagagttgatctgcacacttctggggaacacagcgagcttgtgcaggaagaaaaccttagccccgggacccaaactcccagtaatgataaagcctcaatgttgcaggagtacagtaaatatctgcagcaggcatttgagaagagcacaaacgcaagctttactctcggccatggctttcaattcgtgagtttgagcagtccgctccacaatcacaccctattccctgaaaaacaaatttataccaccagcccattagagtgcggtttcgggcaatctgtgacatcagtattaccttcgagcctccctaaacccccattcgggatgctgttcggctctcagcctggtctctatctgtccgctctggacgccacacatcagcagctaacccccagccaggagcttgatgacctgatcgactctcagaaaaacctcgagacatcatccgcgtttcagtccagcagtcagaagctaacttctcagaaagagcagaaaaatttggaaagtagcactgggtttcagatcccatctcaggagctcgcaagtcagatcgacccgcagaaagacatcgaaccaagaacaacatatcagatcgagaatttcgcccaggcgtttgggagtcaatttaaatctgggtcccgagtgccaatgacatttataaccaattccaatggcgaagtggaccaccgggtacggacaagcgtaagcgacttttcaggctacaccaatatgatgtcagatgtgagtgaaccttgctctacacgcgtgaagactcccacgtctcagagttaccggtag

SEQ ID NO: 99700 - DNA, 1803 bp, Artificial Sequence
  derived and/or modified sequence
atgggcttcatccagaagtacctgctgcagcggcacgagaagatccacagtagagaaaagccttttggatgtgatcagtgctcaatgaaattcatacagaaataccacatggagagacataagcggacccactcgggtgaaaagccctacaagtgtgatacctgtcagcagtatttttcgagaactgatcggctcctgaaacaccggaggacctgcggcgaagtaatcgtaaagggcgctacctcggccgagccaggctcaagcaaccacacgaatatgggcaacttggctgtgctctctcagggaaatacaagctcttctcgaaggaagacaaagtctaagagtattgccatcgagaataaggagcagaagaccgggaagacgaatgaaagtcagataagcaataatataaatatgcaatcctactccgtcgagatgcctactgtctcatcaagtggcggcataatcgggaccggcattgatgaactgcagaagcgcgtgcctaaactcattttcaaaaaaggctcccggaagaacaccgataaaaattatctgaactttgtcagcccactccccgacattgttgggcaaaaatccctatcggggaaaccgagcggcagtctgggaattgtgtccaacaactcagtggagaccataggcctgcttcagtctacatctgggaagcagggccagatcagcagtaattacgatgatgctatgcagttcagtaagaagcggcggtatctgcctacagcttcaagcaattcagctttttccataaatgtcggtcacatggtgtctcaacagagtgtcatccagagtgccggtgtttcggtgctggataacgaggccccactgtctctgattgacagtagtgccctaaatgcggaaatcaagtcatgtcacgacaagtctggcattcctgacgaagtacttcaatccattctggatcagtatagcaataaaagtgaatcccagaaagaggacccgtttaacatcgcagagccgcgggtcgatttacacacctcgggggaacatagcgaactggtgcaggaggaaaatctcagtccaggaacacagacaccttccaacgataaagcctccatgctacaagagtatagcaaatatttacagcaggcattcgaaaagagtactaatgcctcattcactctggggcatggctttcagtttgtgtcgctgtcaagccccctccacaaccacactctctttcccgagaagcagatctacacgacgagccctttggagtgtggatttggccagtccgtgacctcagtactgccaagttctctgcctaagccaccatttggcatgctcttcggctcacagccaggactttacctgtccgctttagacgccacccaccagcagttaactccaagtcaagaactggatgatctcattgactctcagaaaaatctcgaaacaagcagcgctttccagtcttccagccagaaactgaccagccagaaagagcaaaagaacctcgagagttccaccggcttccagataccatcccaagagctggctagccagatagacccccagaaggacatcgagcccagaaccacatatcaaattgagaacttcgcccaggcctttggctcacaattcaaatcaggcagtagggtaccaatgactttcattacgaactccaacggggaagtggatcatagagtcagaacatccgtttcggatttctcaggctacacaaacatgatgagcgatgtctcagagccatgtagcacgcgggtgaaaacccccacttctcagtcttaccgttag

SEQ ID NO: 99701 - DNA, 2580 bp, Artificial Sequence
  derived and/or modified sequence
atgaagatcggatctggttttcttagtggcggaggtggcacaggttcttcaggaggttctggaagtggcggaggtggtagcgggggaggcggagggggtggcagctccggaagaagagctgagatggaacccacctttccccaggcccctgctgccgaacccccaccccctcccgctcccgacatgacatttaagaaagaaccagcagcatccgcagcagcattcccaagccaaagaacctcgtggggattcctccagtccctggtctccatcaagcaggaaaagcctgccgacccagaagagcagcagtcccaccaccaccatcatcaccaccactatgggggactgttcgccggagctgaggaacgatcgccgggactgggtggtggtgagggtggatctcacggagtaatacaagacctctccatcctgcaccagcacgttcagcagcaaccagcccagcaccatcgggacgtgttattaagctcctcaagccgaactgatgatcaccacggcactgaggagcccaagcaggacacaaacgtgaagaaagcgaaaagacctaaacccgagtcacagggcatcaaagctaaaagaaagccttctgcctcaagcaagcctagcctggtaggggacggggagggcgctattctgagtccatcacaaaaacctcacatctgtgatcactgtagcgccgctttcagaagctcctaccatcttcgacgccacgttctgattcacacaggggagcggccattccaatgctcacagtgttccatgggatttatacaaaagtatcttttgcagcggcacgaaaagatccattcacgcgagaaaccttttggctgtgaccagtgtagcatgaaattcatccagaagtatcacatggagcgccacaagcgtacccactctggggagaaaccctataaatgtgacacttgccaacagtatttttcccggacagatagattacttaaacatcgaagaacatgcggtgaggtgatagttaagggagcaacttctgcagaaccaggctcctccaatcataccaatatgggtaatctggctgtcctgtcacaaggcaatacctctagtagccggaggaagactaaaagcaagtctatcgccatcgagaataaggaacagaaaaccggtaaaaccaacgagtcccaaatttctaacaacatcaacatgcagtcctacagcgtagagatgccgaccgtctcctctagcgggggaataattggaaccggcatcgatgaactccagaagcgcgtaccaaagctgatattcaagaagggctccaggaaaaacacagataagaactatctgaatttcgtttctcctctaccagacatcgtcggccaaaagagcctgagtggtaaacctagtgggtctcttggaattgtaagtaataatagtgtcgagactattgggttactgcagagcacatcggggaaacaagggcagataagctccaactacgacgacgccatgcagttcagcaagaagcggaggtatcttcctaccgcttcctctaattctgccttttcaattaacgtcgggcatatggtcagtcagcaatctgtgattcagtcagcaggcgtgtcagtgctggacaatgaggccccactctctctaatcgacagtagtgctctgaacgccgaaatcaaaagttgccatgacaaaagtggaatccccgacgaggttttacaaagcattcttgatcagtattctaacaaatccgagtctcagaaggaggatccgttcaatatcgccgagccacgggtggatttgcacacctccggggaacactctgagttagttcaggaggagaacctgagcccaggcactcagacaccatcaaatgataaggcaagcatgctgcaagagtatagtaaatatcttcagcaagctttcgagaaatctacaaatgcctcttttacgctaggacacggttttcagttcgtgtccctgagctcacctctacacaaccacacactgttcccagagaaacagatatacactacgagccccttagagtgcgggtttggacaatcggtgacttccgtacttcctagctctctaccgaaacctcccttcggcatgcttttcgggtcccagcctggcttatacctgtcggcacttgacgcaactcaccagcagttaacaccaagccaggaattagatgatctgattgactcacagaagaacctcgaaaccagcagcgcttttcaatcatccagccagaagctaacctcccagaaagagcagaagaatcttgagtcatccaccggattccagattcctagccaggagctcgcaagccaaatcgatccgcagaaggacattgagcctcgaactacataccagatcgaaaactttgcacaggctttcggctcacagtttaagtcagggagcagggtgcctatgacttttatcacaaacagtaatggggaggttgatcacagggtcagaacttccgtgtccgatttttctgggtacaccaacatgatgtccgacgtgagcgagccctgctccactagagtgaaaacacccaccagccagtcttatagatag

SEQ ID NO: 99702 - DNA, 1803 bp, Artificial Sequence
  derived and/or modified sequence
atgggctttatacagaagtacctcctacagaggcatgagaagatccacagccgggaaaagccctttggttgcgaccagtgtagtatgaagtttattcagaagtaccatatggagcgacacaagcgcacacattccggggagaagccctacaagtgcgacacatgtcagcagtatttctctcgtaccgataggcttctgaaacaccgtagaacatgcggggaagttatcgtgaagggagcaaccagtgccgagccaggaagttcaaatcacacaaacatgggtaatcttgccgtcctgtcacagggcaatacatcctcatccaggaggaaaacaaaatccaaaagtatcgccatcgaaaacaaagaacagaagacagggaagacaaacgagtcacagatctctaacaatatcaatatgcagagctactccgtggagatgcccaccgtgtcatccagcggcggtatcatcgggaccggtatcgacgaacttcagaagagagtgcctaagctgatcttcaagaagggatcacggaaaaacacggataagaactacctgaactttgtttctcctttgcccgatattgtggggcagaaaagcctcagcggtaagccctctggatcactaggaatcgtgtccaataactccgtcgagaccatcggcctcctgcaaagtacatccggtaagcagggacagatctcatccaactacgatgatgcaatgcagtttagcaagaaacgccgttacctgcctacagcttccagcaattctgccttcagcatcaacgtggggcacatggtgtcccagcagagtgtgatccagtccgccggtgtgtcagttctggacaacgaagcacctctttccttgattgattcatctgctcttaacgccgagatcaagagctgccacgataagagcggtatccctgatgaagttcttcagtccatcctggaccagtatagcaataagtccgagtctcagaaagaggatccctttaatatagctgaacccagagtcgatctccatacctctggagaacactcagaactggttcaggaggagaatttgtcacccggtacacagacccccagcaatgacaaagcctctatgctgcaggaatattccaaatatttacaacaggctttcgagaagtcaactaacgcgagcttcactctaggccacggcttccagttcgtgtccctgtcaagcccgctacataatcatacgctgttccctgagaagcagatttataccacttcccctcttgaatgcgggttcgggcagagcgtgacaagcgtgcttccctctagtctgccgaagcccccatttggcatgctgttcggctcccagcctggactgtacctgtctgctttagatgccacacatcagcaactgactccctcacaggagctcgatgatttaatcgattctcagaagaatctcgagacctcatctgcatttcagagctcatcacagaaactcacttcacaaaaagagcagaagaacctggaaagcagtaccgggttccagattccaagtcaggagctagcttcccagatagaccctcagaaagatattgagcccaggaccacctatcagatcgaaaacttcgcccaggccttcggctcccagttcaagagcggcagtcgcgtacctatgaccttcattactaatagtaatggtgaggtagaccaccgcgtgcgtactagcgtgagcgattttagtggctacaccaacatgatgtctgatgtcagcgaaccatgctccactcgagtgaagacccctactagtcagagctaccgttag

SEQ ID NO: 99703 - DNA, 2933 bp, Artificial Sequence
  derived and/or modified sequence
atttttattaactggaggcgacggcggctgcggcggcggcgggacccccaggcctcctccggggtatgaaaatcggcagtgggttcctgagtggcggcggaggtaccggcagtagcggtggtagcggctccggcggcggtggtagtggcggcggcggcggcggcggcagcagcggcaggagggcagagatggaacccacctttccccaggccccggccgctgagcccccccctccgccagccccggacatgactttcaagaaggagccggcggcgtcagccgcggccttcccctcgcagaggacctcctgggggttcttgcagtctttggttagcatcaaacaggagaaacccgcggatcctgaggagcagcagtcccaccaccaccatcaccaccaccactatggggggctgttcgctggagctgaagagaggtctccaggcctaggaggcggtgaaggggggagtcacggcgtcatccaggacctcagtattctccaccagcatgtccagcagcaaccagcccagcaccaccgtgacgtattactcagcagcagtagcaggactgatgaccaccatggcactgaggagccaaagcaggacactaatgtcaaaaaggcaaaaaggccaaagccagaatctcagggaatcaaagccaagaggaagccaagtgcatcttccaaaccttctttggttggagatggagaaggtgccatcctctccccaagtcagaaacctcatatctgtgatcactgtagtgctgctttccgaagctcctatcacctgcggagacatgtcctcattcatacaggagaaagacctttccagtgcagccagtgtagtatgggtttcattcagaaatacctactacagagacatgagaaaattcatagtagagagaagccatttggatgtgatcagtgcagcatgaagtttattcagaagtaccatatggagagacacaagaggacacatagtggagaaaagccatataagtgtgacacttgccaacagtatttttcaaggactgatagattgttgaagcacaggcgcacatgtggtgaagtcatagttaaaggagccactagtgcagaacctgggtcatcaaaccataccaatatgggtaatctggctgtgttgtctcagggaaatacaagttcttcaaggagaaaaacaaagtcaaaaagcatagctattgaaaataaggaacagaagaccggtaaaacaaatgaatcgcaaatttcaaataatataaacatgcagagttactcagtagaaatgcctaccgtgtcttccagtggaggcataattggcactggaatagatgaactgcagaagagggtgccaaaattgatctttaagaaaggaagcagaaagaatacagataaaaactaccttaactttgtgtcaccattaccagacatagtaggacagaaatccttgtctggaaaaccaagtggctcacttggcatagtatcaaataatagtgtggagaccattggtcttctccaaagtacaagtggcaaacaaggtcagataagtagtaattatgatgatgccatgcagttttcaaagaaaagaagatatttaccaactgccagcagcaacagtgccttttctataaacgtaggacacatggtctcccaacagtctgtcattcagtctgcaggtgtcagtgttttggacaatgaggcaccattgtcacttattgactcctcagctctaaatgctgaaattaaatcttgtcatgacaagtctggaattcctgatgaggttttacaaagtattttggatcaatactccaacaaatcagaaagccagaaagaggatcctttcaatattgcagaaccacgagtggatttacacacctcaggagaacactcagaattggttcaagaagaaaatttgagcccaggcacccaaacaccttcaaatgataaagcaagtatgttgcaagaatactccaaatacctccaacaggcttttgaaaaatccactaatgcaagttttactcttggacacggtttccaatttgtcagtttgtcttcacctctccacaaccacactttgtttccagaaaaacaaatatacactacgtctcctttggagtgtggtttcggccaatctgttacctcagtgttgccatcttcattgccaaagcctccttttgggatgttgtttggatctcagccaggtctttatttgtctgctttggatgctacacatcagcagttgacaccttcccaggagctggatgatctgatagattctcagaagaacttagagacttcatcagccttccagtcctcatctcagaaattgactagccagaaggaacagaaaaacttagagtcttcaacaggctttcagattccatctcaggagttagctagccagatagatcctcagaaagacatagagcctagaacaacgtatcagattgagaactttgcacaagcgtttggttctcagtttaagtcgggcagcagggtgccaatgacctttatcactaactctaatggagaagtggaccatagagtaaggacttcagtgtcagatttctcagggtatacaaatatgatgtctgatgtaagtgagccatgtagtacaagagtaaagacacccaccagccagagttacaggtaaggtcccaaaagtggccaggctggaggtcttctaatgtaattttgttttattttgagaacactgccattggaatgtttctacacgatcctattaagaataatgtgatgccctttcaatgcaacttttcatatttagtttattttgttagcgtgattttagctctgtttgtattatgatttttaatcaaaatcaatagattaaaaatagtttgacattcaaagtgacaatgtttagcaatcaaatttacatgtatagatcgtcagggaatagcccaaatgttttaaacgc

SEQ ID NO: 99704 - DNA, 2957 bp, Artificial Sequence
  derived and/or modified sequence
ttattaactggaggcgacggcggctgcggcggcggcgggacccgcctcctccggggtatgaaaatcggcagtgggttcctgagtggcggcggaggtaccggcagtagcggtggtagcggctccggcggcggtggtagtggcggcggcggcggcggcggcagcagcggcaggagggcagagatggaacccacctttccccagggtatggttatgttcaaccaccgtcttcccccggtcaccagcttcacccggccggcggggtcggccgcccctcccccgcaatgcgtgttatcctcctctacctccgcagccccggccgctgagcccccccctccgccagccccggacatgactttcaagaaggagccggcggcgtcagccgcggccttcccctcgcagaggacctcctgggggttcttgcagtctttggttagcatcaaacaggagctgaagagaggtctccaggcctaggaggcggtgaaggggggagtcacggcgtcatccaggacctcagtattctccaccagcatgtccagcagcaaccagcccagcaccaccgtgacgtattactcagcagcagtagcaggactgatgaccaccatggcactgaggagccaaagcaggacactaatgtcaaaaaggcaaaaaggccaaagccagaatctcagggaatcaaagccaagaggaagccaagtgcatcttccaaaccttctttggttggagatggagaaggtgccatcctctccccaagtcagaaacctcatatctgtgatcactgtagtgctgctttccgaagctcctatcacctgcggagacatgtcctcattcatacaggagaaagacctttccagtgcagccagtgtagtatgggtttcattcagaaatacctactacagagacatgagaaaattcatagtagagagaagccatttggatgtgatcagtgcagcatgaagtttattcagaagtaccatatggagagacacaagaggacacatagtggagaaaagccatataagtgtgacacttgccaacagtatttttcaaggactgatagattgttgaagcacaggcgcacatgtggtgaagtcatagttaaaggagccactagtgcagaacctgggtcatcaaaccataccaatatgggtaatctggctgtgttgtctcagggaaatacaagttcttcaaggagaaaaacaaagtcaaaaagcatagctattgaaaataaggaacagaagaccggtaaaacaaatgaatcgcaaatttcaaataatataaacatgcagagttactcagtagaaatgcctaccgtgtcttccagtggaggcataattggcactggaatagatgaactgcagaagagggtgccaaaattgatctttaagaaaggaagcagaaagaatacagataaaaactaccttaactttgtgtcaccattaccagacatagtaggacagaaatccttgtctggaaaaccaagtggctcacttggcatagtatcaaataatagtgtggagaccattggtcttctccaaagtacaagtggcaaacaaggtcagataagtagtaattatgatgatgccatgcagttttcaaagaaaagaagatatttaccaactgccagcagcaacagtgccttttctataaacgtaggacacatggtctcccaacagtctgtcattcagtctgcaggtgtcagtgttttggacaatgaggcaccattgtcacttattgactcctcagctctaaatgctgaaattaaatcttgtcatgacaagtctggaattcctgatgaggttttacaaagtattttggatcaatactccaacaaatcagaaagccagaaagaggatcctttcaatattgcagaaccacgagtggatttacacacctcaggagaacactcagaattggttcaagaagaaaatttgagcccaggcacccaaacaccttcaaatgataaagcaagtatgttgcaagaatactccaaatacctccaacaggcttttgaaaaatccactaatgcaagttttactcttggacacggtttccaatttgtcagtttgtcttcacctctccacaaccacactttgtttccagaaaaacaaatatacactacgtctcctttggagtgtggtttcggccaatctgttacctcagtgttgccatcttcattgccaaagcctccttttgggatgttgtttggatctcagccaggtctttatttgtctgctttggatgctacacatcagcagttgacaccttcccaggagctggatgatctgatagattctcagaagaacttagagacttcatcagccttccagtcctcatctcagaaattgactagccagaaggaacagaaaaacttagagtcttcaacaggctttcagattccatctcaggagttagctagccagatagatcctcagaaagacatagagcctagaacaacgtatcagattgagaactttgcacaagcgtttggttctcagtttaagtcgggcagcagggtgccaatgacctttatcactaactctaatggagaagtggaccatagagtaaggacttcagtgtcagatttctcagggtatacaaatatgatgtctgatgtaagtgagccatgtagtacaagagtaaagacacccaccagccagagttacaggtaaggtcccaaaagtggccaggctggaggtcttctaatgtaattttgttttattttgagaacactgccattggaatgtttctacacgatcctattaagaataatgtgatgccctttcaatgcaacttttcatatttagtttattttgttagcgtgattttagctctgtttgtattatgatttttaatcaaaatcaatagattaaaaatagtttgacattcaaagtgacaatgtttagcaatcaaatttacatgtatagatcgtcagggaatagcccaaatgttttaaacgc

SEQ ID NO: 99705 - protein, 580 aa, Artificial Sequence
  derived and/or modified sequence
MVLVGTQDAISAANPRVIDDSRARKLSTDLKRCTYYETCATYGLNVERVFQDVAQKVVALRKKQQLAIGPCKSLPNSPSHSAVSAASIPAVHINQATNGGGSAFSDYSSSVPSTPSISQRELRIETIAASSTPTPIRKQSKRRSNIFTSRKGADLDREKKAAECKVDSIGSGRAIPIKQGILLKRSGKSLNKEWKKKYVTLCDNGLLTYHPSLHDYMQNIHGKEIDLLRTTVKVPGKRLPRATPATAPGTSPRANGLSVERSNTQLGGGTEAEESFEFVVVSLTGQTWHFEASTAEERELWVQSVQAQILASLQGCRSAKDKTRLGNQNAALAVQAVRTVRGNSFCIDCDAPNPDWASLNLGALMCIECSGIHRHLGAHLSRVRSLDLDDWPPELLAVMTAMGNALANSVWEGALGGYSKPGPDACREEKERWIRAKYEQKLFLAPLPSSDVPLGQQLLRAVVEDDLRLLVMLLAHGSKEEVNETYGDGDGRTALHLSSAMANVVFTQLLIWYGVDVRSRDARGLTPLAYARRAGSQECADILIQHGCPGEGCGLAPTPNREPANGTNPSAELHRSPSLL

SEQ ID NO: 99706 - DNA, 1233 bp, Artificial Sequence
  derived and/or modified sequence
atgcagaacatccacggcaaggagatcgacctgctgagaaccaccgtgaaggtgcccggcaagagactgcccagagccacccccgccaccgcccccggcaccagccccagagccaacggcctgagcgtggagagaagcaacacccagctgggcggcggcaccgccagcggccccgccgaggtgctgagcagcagccccaagctggaccccccccccagcccccacagcaacagaaagaagcacagaagaaagaagagcaccggcacccccagacccgacggccccagcagcgccaccgaggaggccgaggagagcttcgagttcgtggtggtgagcctgaccggccagacctggcacttcgaggccagcaccgccgaggagagagagctgtgggtgcagagcgtgcaggcccagatcctggccagcctgcagggctgcagaagcgccaaggacaagaccagactgggcaaccagaacgccgccctggccgtgcaggccgtgagaaccgtgagaggcaacagcttctgcatcgactgcgacgcccccaaccccgactgggccagcctgaacctgggcgccctgatgtgcatcgagtgcagcggcatccacagacacctgggcgcccacctgagcagagtgagaagcctggacctggacgactggccccccgagctgctggccgtgatgaccgccatgggcaacgccctggccaacagcgtgtgggagggcgccctgggcggctacagcaagcccggccccgacgcctgcagagaggagaaggagagatggatcagagccaagtacgagcagaagctgttcctggcccccctgcccagcagcgacgtgcccctgggccagcagctgctgagagccgtggtggaggacgacctgagactgctggtgatgctgctggcccacggcagcaaggaggaggtgaacgagacctacggcgacggcgacggcagaaccgccctgcacctgagcagcgccatggccaacgtggtgttcacccagctgctgatctggtacggcgtggacgtgagaagcagagacgccagaggcctgacccccctggcctacgccagaagagccggcagccaggagtgcgccgacatcctgatccagcacggctgccccggcgagggctgcggcctggcccccacccccaacagagagcccgccaacggcaccaaccccagcgccgagctgcacagaagccccagcctgctgtag

SEQ ID NO: 99707 - DNA, 1743 bp, Artificial Sequence
  derived and/or modified sequence
atggtgctggtgggcacccaggacgccatcagcgccgccaaccccagagtgatcgacgacagcagagccagaaagctgagcaccgacctgaagagatgcacctactacgagacctgcgccacctacggcctgaacgtggagagagtgttccaggacgtggcccagaaggtggtggccctgagaaagaagcagcagctggccatcggcccctgcaagagcctgcccaacagccccagccacagcgccgtgagcgccgccagcatccccgccgtgcacatcaaccaggccaccaacggcggcggcagcgccttcagcgactacagcagcagcgtgcccagcacccccagcatcagccagagagagctgagaatcgagaccatcgccgccagcagcacccccacccccatcagaaagcagagcaagagaagaagcaacatcttcaccagcagaaagggcgccgacctggacagagagaagaaggccgccgagtgcaaggtggacagcatcggcagcggcagagccatccccatcaagcagggcatcctgctgaagagaagcggcaagagcctgaacaaggagtggaagaagaagtacgtgaccctgtgcgacaacggcctgctgacctaccaccccagcctgcacgactacatgcagaacatccacggcaaggagatcgacctgctgagaaccaccgtgaaggtgcccggcaagagactgcccagagccacccccgccaccgcccccggcaccagccccagagccaacggcctgagcgtggagagaagcaacacccagctgggcggcggcaccgaggccgaggagagcttcgagttcgtggtggtgagcctgaccggccagacctggcacttcgaggccagcaccgccgaggagagagagctgtgggtgcagagcgtgcaggcccagatcctggccagcctgcagggctgcagaagcgccaaggacaagaccagactgggcaaccagaacgccgccctggccgtgcaggccgtgagaaccgtgagaggcaacagcttctgcatcgactgcgacgcccccaaccccgactgggccagcctgaacctgggcgccctgatgtgcatcgagtgcagcggcatccacagacacctgggcgcccacctgagcagagtgagaagcctggacctggacgactggccccccgagctgctggccgtgatgaccgccatgggcaacgccctggccaacagcgtgtgggagggcgccctgggcggctacagcaagcccggccccgacgcctgcagagaggagaaggagagatggatcagagccaagtacgagcagaagctgttcctggcccccctgcccagcagcgacgtgcccctgggccagcagctgctgagagccgtggtggaggacgacctgagactgctggtgatgctgctggcccacggcagcaaggaggaggtgaacgagacctacggcgacggcgacggcagaaccgccctgcacctgagcagcgccatggccaacgtggtgttcacccagctgctgatctggtacggcgtggacgtgagaagcagagacgccagaggcctgacccccctggcctacgccagaagagccggcagccaggagtgcgccgacatcctgatccagcacggctgccccggcgagggctgcggcctggcccccacccccaacagagagcccgccaacggcaccaaccccagcgccgagctgcacagaagccccagcctgctgtag

SEQ ID NO: 99708 - DNA, 1233 bp, Artificial Sequence
  derived and/or modified sequence
atgcagaacatccacggcaaggagattgatctgttgagaacaaccgtgaaggtgccgggaaaacggctgcctcgggccacgcctgctactgcacccgggacctctccgagggcaaacggcctgtccgtggagcgctccaacactcagttggggggaggcaccgcatctgggcccgcggaggttctgtcttcctccccaaagctagacccaccaccttcccctcactccaacaggaagaagcaccgccgaaagaagagtaccggaacccctcgaccagatggcccttcctccgctaccgaagaagcagaagagtcattcgaatttgtagtggtgagtttaaccggccagacgtggcatttcgaggcctccaccgcagaagagagagagctgtgggtccaatctgtgcaagcacagattctggcgtctctgcaggggtgccggagcgccaaagataagactcggttgggaaatcaaaacgcagcgttggctgtccaggcagtgaggactgtacggggtaattccttctgtatcgattgcgatgctcccaatccggactgggcatccttaaatctcggggccctcatgtgtattgaatgttccgggatacacaggcacttaggggcccacctgagtagggtccgatccttagaccttgatgactggcccccagagctacttgcagtgatgaccgccatgggtaacgccttggctaactcagtctgggaaggtgcactcgggggctattctaaaccagggcctgacgcctgccgggaagagaaggagagatggattcgcgcaaagtatgaacagaagctcttccttgcgcccctcccgagttccgacgtaccactagggcagcaacttctgcgggctgtcgtggaggatgacctgcgcctcttggtgatgttgctggcgcatggatccaaagaagaggttaatgagacctacggggacggtgacggacgcactgcactgcacctgagcagcgctatggcaaatgtggtgttcacacagctcctgatatggtatggtgttgacgttagaagccgggacgccaggggactcacaccactcgcctatgctcggagagccggaagccaagaatgtgccgacatcctgattcagcacgggtgccccggtgagggatgcggcctggcccctacaccaaatagagaaccagctaacggtaccaatcccagtgccgagttgcacaggagtccatcccttctgtag

SEQ ID NO: 99709 - DNA, 1743 bp, Artificial Sequence
  derived and/or modified sequence
atggtgctcgtcgggacacaggatgcgatctctgccgccaatcctcgcgtaattgatgactccagagcccggaagctctcaacggatctgaagcgctgtacctattacgagacctgcgcgacttatggacttaacgtcgagcgtgtttttcaagacgtcgcccaaaaggtcgtggcgctgcgcaaaaaacaacaactggcaatcggcccctgtaaatcactgcctaactctccctcccattctgccgtctctgcagcctccattcccgcagtgcacattaatcaggcaacaaacggggggggttctgcattcagcgattattcctccagcgtgccatccactccttctatcagtcagcgcgaactccgcattgagacgatcgccgcttctagtactcctacccctatccggaaacagtctaagagacggagtaacatcttcaccagcagaaaaggcgccgacttggacagagagaaaaaagccgcagaatgtaaggtggatagcataggctctgggcgggctattcctataaagcagggtatcctcctgaagcggagtggcaagtctctgaataaggagtggaaaaaaaaatacgttacattatgtgacaacggactgcttacctaccatccgagcctgcacgattacatgcaaaacatccacggaaaagagattgacctgctgcgtactaccgtgaaagtcccggggaaacgtctgccccgagcgactcctgccactgcccccgggactagtcctcgggcaaacggattgtcagtcgagaggagcaatacccagctgggcggtggcaccgaggcggaagagagtttcgagtttgtagtagtgtccttaaccggccaaacatggcatttcgaagcctcaaccgccgaggaaagggagctatgggtccaaagcgtgcaagcccagattctggcctctctccagggatgcagaagcgccaaagacaaaacaaggcttggcaaccagaacgccgccctggcggtccaggccgtgagaaccgtgcgcggcaactccttttgcatcgattgcgacgctcccaacccagactgggcgagcctcaatctgggagctttaatgtgcatcgagtgctcgggtatacatagacacctgggcgcacatctttcccgtgtacggtccctagatctggacgattggccccccgagcttctggcggtcatgaccgccatgggaaacgccctggccaacagcgtgtgggagggtgctctgggtggctacagcaagcccggtcccgatgcctgtagggaagagaaggaacgctggatccgggctaagtatgagcaaaagctgtttttggcccccctgccttctagcgatgtcccgttggggcaacagctcttgcgggccgtggtggaagatgaccttaggttactggtcatgttgctagcacacgggtcaaaggaggaggtcaatgagacttatggcgacggagatggccgcacggcactgcacctgagctcagcgatggctaatgtagtatttacacagctgctgatttggtacggagtagatgtgcgttctagagatgcgcggggtctgacaccactagcctacgccagacgcgcaggatctcaggagtgtgctgatattttgattcagcacggctgcccgggcgaaggatgtggcctcgcccccacgcctaacagggaaccagccaacggaaccaatccatccgcagaattacatcgtagcccaagcctgctgtag

SEQ ID NO: 99710 - DNA, 1233 bp, Artificial Sequence
  derived and/or modified sequence
atgcagaacatccacggcaaggagattgacctgctgcggaccaccgtgaaggtgcctgggaagaggctgccccgggccaccccagccacagcccctggcaccagcccccgggccaacggcctgtctgtggagaggagcaacacccagctgggcggcggcacagccagcggccctgctgaggtgctgagcagcagccccaagctggaccccccacccagcccccacagcaacaggaagaagcacaggaggaagaagagcacaggcacccccaggccagatggccccagcagcgccacagaggaggccgaggagagctttgaatttgtggtggtgtccctgaccggccagacctggcactttgaggccagcacagctgaggagcgggagctgtgggtgcagagcgtgcaggcccagatcctggccagcctgcagggctgccgcagcgccaaggacaagacccggctgggcaaccagaatgctgccctggccgtgcaggccgtgaggacagtgcggggcaacagcttctgcatcgactgtgatgcccccaacccagactgggccagcctgaacctgggcgccctgatgtgcatcgagtgcagcggcatccaccgccacctgggcgcccacctgagccgggtgcgcagcctggacctggatgactggcccccagagctgctggccgtgatgacagccatgggaaatgccctggccaacagcgtgtgggagggcgccctgggcggctacagcaagccaggcccagatgcctgccgggaggagaaggagcgctggatccgggccaagtatgagcagaagctgttcctggcccccctgcccagcagtgatgtgcccctgggccagcagctgctgcgggctgtggtggaggatgacctgcggctgctggtgatgctgctggcccacggcagcaaggaggaggtgaatgagacctatggagatggagatggccgcacagccctgcacctgagcagcgccatggccaacgtggtgttcacccagctgctgatctggtatggagtggatgtgcgcagcagagatgcccggggcctgacccccctggcctatgcccggcgggccggcagccaggagtgtgccgacatcctgatccagcacggctgccctggagagggctgcggcctggcccccacccccaaccgggagcccgccaacggcaccaaccccagcgctgagctgcacaggagccccagcctgctgtag

SEQ ID NO: 99711 - DNA, 1743 bp, Artificial Sequence
  derived and/or modified sequence
atggtgctggtgggcacccaggatgccatctctgctgccaacccccgggtgattgatgacagccgggccaggaagctgagcacagacctgaagcgctgcacctactatgagacctgtgccacctacggcctgaatgtggagagggtcttccaggatgtggcccagaaggtggtggccctgaggaagaagcagcagctggccatcggcccctgcaagagcctgcccaacagccccagccacagcgctgtgtctgctgccagcatcccagctgtgcacatcaaccaggccaccaacggcggcggcagcgccttcagtgactacagcagctctgtgcccagcacccccagcatcagccagcgggagctgcgcatcgagaccatcgccgccagcagcacccccacccccatcaggaagcagagcaagaggaggagcaacatcttcaccagcaggaaaggagctgacctggaccgggagaagaaggctgctgagtgcaaggtggacagcatcggcagcggccgggccatccccatcaagcagggcatcctgctgaagaggtctgggaagagcctgaacaaggagtggaagaagaagtatgtgaccctgtgtgacaatggcctgctgacctaccaccccagcctgcatgactacatgcagaacatccacggcaaggagattgacctgctgcggaccaccgtgaaggtgcctgggaagaggctgccccgggccaccccagccacagcccctggcaccagcccccgggccaacggcctgtctgtggagaggagcaacacccagctgggcggcggcacagaggccgaggagagctttgaatttgtggtggtgtccctgaccggccagacctggcactttgaggccagcacagctgaggagcgggagctgtgggtgcagagcgtgcaggcccagatcctggccagcctgcagggctgccgcagcgccaaggacaagacccggctgggcaaccagaatgctgccctggccgtgcaggccgtgaggacagtgcggggcaacagcttctgcatcgactgtgatgcccccaacccagactgggccagcctgaacctgggcgccctgatgtgcatcgagtgcagcggcatccaccgccacctgggcgcccacctgagccgggtgcgcagcctggacctggatgactggcccccagagctgctggccgtgatgacagccatgggaaatgccctggccaacagcgtgtgggagggcgccctgggcggctacagcaagccaggcccagatgcctgccgggaggagaaggagcgctggatccgggccaagtatgagcagaagctgttcctggcccccctgcccagcagtgatgtgcccctgggccagcagctgctgcgggctgtggtggaggatgacctgcggctgctggtgatgctgctggcccacggcagcaaggaggaggtgaatgagacctatggagatggagatggccgcacagccctgcacctgagcagcgccatggccaacgtggtgttcacccagctgctgatctggtatggagtggatgtgcgcagcagagatgcccggggcctgacccccctggcctatgcccggcgggccggcagccaggagtgtgccgacatcctgatccagcacggctgccctggagagggctgcggcctggcccccacccccaaccgggagcccgccaacggcaccaaccccagcgctgagctgcacaggagccccagcctgctgtag

SEQ ID NO: 99712 - DNA, 1233 bp, Artificial Sequence
  derived and/or modified sequence
atgcagaacatccacggcaaggagatcgacctgctgcggaccaccgtcaaagtaccagggaagaggctacctcgcgctactcccgccacagcgccaggaacttcgcctagagccaatggcctcagcgttgaacggtcaaacacacagctgggcggaggcaccgcctccgggcccgccgaagtcttatcatcatctccaaagttagatcctcctccatccccacattctaataggaagaaacatcgccggaaaaagagtacagggacgccgagacctgatggcccgagcagcgctaccgaggaggcagaggagtctttcgagtttgtggtcgtctcactgactggtcagacttggcacttcgaagcctccacagccgaggagagggaactgtgggtgcagagcgtacaggcacaaatactagcgtcattgcaggggtgccgctccgctaaagataaaacacgcttgggtaaccagaacgcggctttggccgtccaggccgtgagaactgtgagggggaactctttctgtatagactgcgacgcccccaaccctgactgggcctcacttaacctcggcgcacttatgtgcattgagtgttctggcattcatagacacttgggagcccacctcagccgggtgaggtctttggacttggatgattggccccccgaattgctcgccgtcatgaccgctatgggaaatgccctagcgaatagtgtgtgggagggcgcgctgggggggtattccaagcctggtccggacgcctgccgagaggagaaggaacggtggatacgggccaagtatgagcagaagttgtttttggccccactcccaagcagcgacgttcctcttggtcagcaattgcttagggcagtcgtggaagatgatctcaggctgctggtaatgctgctagcccatggctccaaagaggaagttaacgaaacgtatggcgacggagatggacgcaccgccctccatttaagtagcgctatggcaaatgtggtctttacccagctcctgatttggtacggtgtggacgtgcggagtcgagatgcaagaggacttacccctcttgcttatgccagacgcgccggatctcaagaatgcgccgacatcctgatccagcacggctgtccaggcgaaggctgcggtctcgcccccaccccaaatcgtgagcccgccaatggcactaacccttccgcggagctgcaccgttccccttctcttctgtag

SEQ ID NO: 99713 - DNA, 1743 bp, Artificial Sequence
  derived and/or modified sequence
atggtgctggtgggcacccaggacgccatcagcgccgccaaccccagagtgatcgacgacagcagggcgcgcaaactctcaactgatttgaagcgctgtacttattatgagacatgtgcgacatatggcttgaatgtggagcgcgtatttcaggacgtcgcccagaaggttgtagcgctgcggaagaaacagcagcttgcaatcggaccctgtaaatctctgcctaactcacctagccactccgcggtgagtgccgcctccattcctgcagtccacattaatcaggccacaaatggcgggggctccgcgttttccgactacagtagctccgttcccagtactccctcaataagccaacgcgaacttagaatagaaactattgccgcttctagcacccccacaccaataagaaaacagtctaagcgccgcagtaacattttcaccagtcgaaagggggctgatctagatcgcgagaaaaaggccgcagagtgcaaggtggactcaatcggcagcggacgcgcaatcccgatcaaacaggggatcttgcttaagcggtcaggcaagtccctcaacaaggagtggaagaaaaaatacgtgacactgtgtgataacgggctgctgacctaccacccttccctgcacgattacatgcaaaacattcatgggaaggaaatagatctcctcaggaccacagttaaagtcccagggaagagacttccacgcgccacccccgccacggcgcccgggacttcccctcgagctaatggactgtccgtggaacgctcaaacactcaactgggaggaggaactgaagcagaagagtctttcgagttcgttgtggttagtctgaccggccaaacctggcactttgaggctagtaccgccgaagaacgagagctgtgggtccaatcggtgcaggcccagatattagcatccctgcaggggtgtagaagcgccaaagacaaaacaagacttggaaatcagaacgctgccctggccgtacaggcagtacgcaccgtgaggggtaatagcttctgcattgattgcgacgcgccaaatccggattgggccagcctgaacctgggcgcgctcatgtgcattgaatgctctggcatccaccgacacctgggcgcacatctgtcgcgagtgagatcactggatctagatgactggcccccggagcttcttgccgtaatgaccgccatgggtaacgctctggccaacagcgtttgggaaggcgcgcttggtgggtattccaagccaggcccagatgcatgccgagaggaaaaggagaggtggatccgcgcaaagtacgaacagaaactctttctggccccattaccttctagcgatgtaccattggggcagcagctgctgagggctgtggtcgaggatgacctgaggctcttagtgatgctgctggcacacggcagtaaggaggaggtgaatgagacctatggagatggcgatggccgcaccgcactccacctgtcctctgccatggccaacgtcgtgttcactcaactgctcatctggtatggcgtcgatgtgagatctagagacgctcggggcttgacgcccttggcctatgccaggcgcgccggatctcaagagtgtgccgatattcttattcagcatggctgccctggcgaaggctgtggcctcgcgccgacaccgaacagagagccggcgaatggtactaatcccagtgctgaactgcacaggtcgccaagccttctatag

SEQ ID NO: 99714 - DNA, 1233 bp, Artificial Sequence
  derived and/or modified sequence
atgcagaacatacacggcaaagagatcgacttgctcaggactactgtgaaggttccaggaaagcgtcttcccagagccactcctgctaccgcacctggaacaagtcctcgtgctaatggcttatccgtcgagcgctccaatacacaactcggaggtgggacggctagtggacccgcagaggtgctcagttcttcacctaagctagacccacctcccagtccccactctaaccgcaaaaaacatagacgaaagaaatcaaccggcacccccagacccgacggtccctcttcagcaacagaggaggctgaagagtcatttgagtttgtggtcgtatcgctgaccgggcagacctggcacttcgaagcatccaccgctgaggaaagggagctatgggtgcagtcagtacaagcccaaatactcgcttctcttcagggatgtcggagcgcaaaggacaagaccaggttaggaaatcagaacgctgccttggctgtgcaagccgtacggactgtcaggggcaatagcttttgcattgactgtgatgctcctaacccagattgggctagcctgaatttgggggcactgatgtgcattgagtgttccggcatccatcgccatttgggcgctcacttgagccgggtgcgtagcctggacctcgacgactggcccccagagctgcttgcagtcatgaccgccatgggtaatgctctggcaaatagcgtgtgggagggtgccttggggggatatagcaagccgggtccagatgcctgtcgcgaggaaaaggaaaggtggattagagccaaatatgagcaaaaactgtttctggcccctctgccttccagtgatgtgccactcgggcagcagctgttgagagcagtcgttgaagatgacctgcgcctgctcgttatgctcctggcacacggcagtaaggaagaggtcaatgagacttacggcgatggcgatggacgtacagctctccacctgtcaagcgcaatggccaatgttgtgttcacccagctactgatatggtatggcgtggacgtgagatccagagacgcgcgtggattgactccattggcctacgcccgtcgggctggatcacaggaatgcgcagatattcttatccagcacggatgccctggggaaggatgcggactggcccctaccccaaatagggaaccggctaatggtaccaacccatcggctgagctgcaccgttctccgtctcttctatag

SEQ ID NO: 99715 - DNA, 1743 bp, Artificial Sequence
  derived and/or modified sequence
atggttcttgtgggcactcaggatgccatcagtgccgcaaatcctagggtgatcgatgattcccgagcaaggaagcttagcactgatcttaaaaggtgcacgtactatgaaacatgtgctacctacggcttgaacgttgagagggtgtttcaggacgtggcccagaaggtggtcgcactccgcaagaagcaacagttagccatcgggccttgcaaatccctgccgaatagcccctcgcactctgccgtttctgccgctagtattccagccgtccacatcaatcaagccaccaacggcggaggatctgcatttagcgattatagttcttcagttcccagtacaccttctatctcacagcgagagttacgaattgagaccatcgctgcaagctcgacgcctaccccgatccggaagcagtctaagagacggtctaatatcttcactagtagaaaaggagccgacctggatagagagaaaaaagccgctgagtgcaaggtggacagtatcgggtcagggcgagcaatcccgatcaagcagggcattctcctgaagagaagtggcaagtcattgaataaagaatggaagaaaaaatacgtcactctgtgtgataatggcctgttaacttaccatccttcccttcatgattacatgcagaacattcacggtaaggaaattgatttgctgcggacaaccgtgaaggtcccagggaaacgcttgccgagggcaacgccggcaactgccccaggtacaagccccagagctaacggcctctctgttgagagatctaacacccaacttgggggaggcacggaggctgaagagtccttcgagttcgttgtcgtctcgttgactggccagacttggcatttcgaagctagcacggccgaagaacgtgaactgtgggtgcagagtgtccaggcccagattctcgccagtctacaagggtgtcgctcagccaaggataaaacacgcctcggcaatcaaaacgcagccttggccgtgcaggctgtgagaacggtgagagggaatagcttctgtattgattgcgatgcccctaatcctgattgggcttcactgaacctgggcgcattaatgtgcattgagtgctcaggcatacatagacatctgggtgctcatttaagtagagtccgcagtttagatctcgatgactggccccctgagctactcgccgtaatgactgcaatggggaacgccctggctaatagcgtatgggaaggcgcattgggaggatatagcaagccgggacccgatgcatgccgggaggagaaggagaggtggattagagccaaatacgagcagaagcttttcttggcaccactcccatcatcggacgtccctctgggccagcagcttctacgggctgtcgtggaggacgacctgcgacttctggtcatgctgcttgcacacggaagcaaggaagaagtgaacgaaacttacggcgacggcgatggacggaccgctttgcatctgtcaagtgccatggccaacgtagtctttacacagttgttgatctggtatggggtagacgtccgtagcagagatgcacggggactgacaccacttgcctatgccagacgggctggatctcaagagtgcgctgacattttgattcagcatgggtgcccaggcgagggatgcggcctcgcgccaaccccaaatcgggagcctgcgaatggcaccaatccaagtgcagaacttcacagatcgccctctctcctgtag

SEQ ID NO: 99716 - DNA, 2730 bp, Artificial Sequence
  derived and/or modified sequence
cttttaggagagcactgctgcagccggcagtggagagcctgggcagggagacagggagaaaactccggcagcagggtggtctctagggctgacctcggagcctggggacaggggagcctatgccgcactgaaggcgggacgctactcgtttgtgaacagccaggagtggacgctgagccgctccgtaccggagcttaaagtgggcatagtggggaacctgtctagcgggaagtcagccctggtgcaccgctatctgacggggacctatgtccaggaggagtcccctgaaggggggcggtttaagaaggagattgtggtggatggccagagttacctgctgctgatccgagatgaaggaggcccccctgagctccagtttgctgcctgggtggatgcagtggtgtttgtgttcagcctggaggatgaaatcagtttccagacggtgtacaactacttcctgcgtctctgcagcttccgcaacgccagcgaggtgcccatggtgcttgtgggcacgcaggatgccatcagcgctgcgaatccccgggttatcgacgacagcagagcccgcaagctctccacagatctgaagcggtgcacctactatgagacgtgcgcgacctacgggctcaatgtggagcgtgtcttccaggacgtggcccagaaggtagtggccttgcgaaagaagcagcaactggccatcgggccctgcaagtcactgcccaactcgcccagccactcggccgtgtccgccgcctccatcccggccgtgcacatcaaccaggccacgaatggcggcggcagcgccttcagcgactactcgtcctcagtcccctccacccccagcatcagccagcgggagctgcgcatcgagaccatcgctgcctcctccacccccacacccatccgaaagcagtccaagcggcgctccaacatcttcacgtctcggaagggtgctgacctggaccgggagaagaaggctgccgagtgcaaggtggacagcatcgggagcggccgcgccatccccatcaagcaggggatcctgctaaagcggagcggcaagtccctgaacaaggagtggaagaagaagtatgtgacgctctgtgacaacgggctgctcacctatcaccccagcctgcatgattacatgcagaacatccacggcaaggagattgacctgctgcggacaacggtgaaagtgccagggaagcgcctgccccgagccacacctgccacagccccgggcaccagcccccgtgccaacgggctgtccgtggagcggagtaacacacagctgggtgggggcacagaggcagaggagtcgtttgaatttgtggtggtgtccctcactgggcagacgtggcacttcgaggcttcaacggcggaggagcgggagctgtgggttcagagtgtgcaggcccagatccttgccagcctgcaaggctgccgcagtgccaaggacaagactcgactggggaaccagaacgcagctctggctgtgcaggccgtccgcaccgtccgcggcaacagcttttgtatcgactgcgatgcacccaatccagactgggccagcctgaacctgggtgccctgatgtgcattgagtgctcaggcatccaccgacacctgggggctcacctgtcccgggtgcgctcccttgacctcgatgactggccgcctgagctgctggctgtcatgactgccatgggcaatgccctcgccaacagcgtctgggagggggccttgggtggctactccaagccagggcctgatgcctgcagagaggagaaggaacgctggatacgggccaagtatgaacagaagctcttcctggccccactgccaagctcagatgtgccactggggcagcagctgctccgggccgtggtggaagatgacctgcggctgttggtgatgctcctggcacatggctccaaagaggaggtgaatgagacctatggggacggggacgggcggacggctctacatctctccagtgccatggccaacgttgtcttcacgcagctgctcatctggtacggggtggacgtgaggagccgggacgcccggggcctgactccactggcatatgctcgccgggccggcagccaggagtgtgcagacatcttgatccagcatggctgccctggggagggctgtggcttagcgcctacccccaacagagagcctgccaatggcaccaacccctctgctgagctgcaccgtagtcctagcctcctataaggcccaggaagagggcagaggggccagaaggactccatggcccaaagaccctcctccctgcaggcactgtgggaacagacacagagatggagaagcagggacatgctgagaggacgaagccaaggaaattagggaggagagtcaaagggatcaaggagagttggggatttgagctgcagcagagagggatgagggatttagccctctgccctaaggtgccattgaaaagggacaggacccttcggaggtgcctgtgaggagaggggagcaggacctctccctcctccagatccctgcctcctagtgccagcccctcacacgccttcatcctgaaacaggaagaggacggcaccaagttgggggtgctggatgaaagagacgaggggtgatctgtgagtcccatgtaaactttgtacattggaatatttatgtttgtgtacatatttgatgtgtgtgtgtatgatgagccaataaaccagactgtgtgcgtg

SEQ ID NO: 99717 - protein, 158 aa, Artificial Sequence
  derived and/or modified sequence
MAGLTDLQRLQARVEELERWVYGPGGARGSRKVADGLVKVQVALGNISSKRERVKILYKKIEDLIKYLDPEYIDRIAIPDASKLQFILAAVPEHAARLQRLAQIHIQQQDQCVEITEESKALLEEYNKTTMLLSKQFVQWDELLCQLEAATQVKPAEE

SEQ ID NO: 99718 - protein, 151 aa, Artificial Sequence
  derived and/or modified sequence
QRLQARVEELERWVYGPGGARGSRKVADGLVKVQVALGNISSKRERVKILYKKIEDLIKYLDPEYIDRIAIPDASKLQFILAAVPEHAARLQRLAQIHIQQQDQCVEITEESKALLEEYNKTTMLLSKQFVQWDELLCQLEAATQVKPAEE

SEQ ID NO: 99719 - DNA, 477 bp, Artificial Sequence
  derived and/or modified sequence
atggccggactaactgatctccaaaggctgcaagcacgagtggaggagctcgagcgctgggtgtatgggccggggggcgcccgaggctcccggaaagtggctgacggtctcgtgaaagtgcaggtcgctcttggtaatatatcaagtaaacgcgagagagtgaaaatcctgtataagaagatcgaggatctgataaaataccttgacccagaatatatagaccggatcgccattccagatgcaagcaaactccagtttatcctcgcagctgtaccagaacacgctgcccgacttcaacgcctggcacagatccatatccagcaacaggatcagtgtgtcgaaattactgaagagtccaaagctctcttggaggaatacaacaagactaccatgttactctccaagcagtttgtccagtgggatgagctgctctgtcagttagaggcagccacccaggtgaaacccgcagaagagtag

SEQ ID NO: 99720 - DNA, 456 bp, Artificial Sequence
  derived and/or modified sequence
cagcggttacaagctagggtagaggaactggaacgatgggtgtatggtccgggtggcgcgagggggtcacgcaaagtcgcggacggtctagtgaaagtgcaggtagcgctggggaacattagctctaaacgcgaacgcgtcaaaatactgtataaaaagattgaagacctgattaaatacctcgaccccgaatacatagatcggatcgcgatcccagatgcctccaaacttcagtttatcctggcggctgtacccgaacatgcggcaaggttgcagagactagcccaaattcacattcaacaacaggaccagtgtgtggagatcaccgaagaaagcaaagccctgttagaggaatacaacaagacaactatgctactgagcaagcaatttgtccagtgggacgaactgttgtgtcagctcgaggccgccacccaggttaagccagccgaggaatag

SEQ ID NO: 99721 - DNA, 477 bp, Artificial Sequence
  derived and/or modified sequence
atggccggcctgacagacctgcagaggctgcaggcccgggtggaggagctggagcgctgggtgtatggccctgggggcgcccggggcagcaggaaggtggctgatggcctggtgaaggtgcaggtggccctgggcaacatcagcagcaagcgggagcgggtgaagatcctgtacaagaagattgaggacctgatcaagtacctggaccctgagtacatcgaccgcatcgccatcccagatgccagcaagctgcagttcatcctggccgctgtgcctgagcacgccgcccggctgcagaggctggcccagatccacatccagcagcaggaccagtgtgtggagatcacagaggagagcaaggccctgctggaggagtacaacaagaccaccatgctgctgagcaagcagtttgtgcagtgggatgagctgctgtgccagctggaggccgccacccaggtgaagccagctgaggagtag

SEQ ID NO: 99722 - DNA, 456 bp, Artificial Sequence
  derived and/or modified sequence
cagaggctgcaggcccgggtggaggagctggagcgctgggtgtatggccctggaggagcccggggcagcaggaaggtggctgatggcctggtgaaggtgcaggtggccctgggcaacatcagcagcaagcgggagcgggtgaagatcctgtacaagaagattgaagatctcatcaagtacctggaccctgagtacatcgacagaattgccatcccagatgccagcaagctgcagttcatcctggccgctgtgcctgagcacgccgcccggctgcagaggctggcccagatccacatccagcagcaggaccagtgtgtggagatcacagaggagagcaaggccctgctggaggagtacaacaagaccaccatgctgctgagcaagcagtttgtgcagtgggatgagctgctgtgccagctggaggccgccacccaggtgaagccagctgaggagtag

SEQ ID NO: 99723 - DNA, 477 bp, Artificial Sequence
  derived and/or modified sequence
atggccggcctgaccgacctgcagcggctgcaggcccgggtggaggaattagaacgttgggtgtatggccccgggggcgctcgcgggtctagaaaggtcgcagacggtctggtgaaagtccaggttgccctcgggaatatctcctctaaacgcgaacgagtaaagatcctatataagaaaatcgaggacctcattaagtatctggatccagaatacattgaccggatcgcaatccctgacgcgagcaaactgcagtttatcttagcggcagtgcccgaacatgcagcgaggttacagcgattggcacaaatccacattcagcaacaagaccagtgtgtcgagataaccgaggagtccaaggccctgttagaagaatataacaaaactacgatgctgcttagcaagcagttcgttcaatgggatgagttgctttgtcaacttgaggcagcaacccaggtgaagccggcagaagagtag

SEQ ID NO: 99724 - DNA, 456 bp, Artificial Sequence
  derived and/or modified sequence
cagcggctgcaggcccgggtggaggagctggagcggtgggtgtacggacctggcggggcgcgcgggtcaaggaaggtagccgacggtctcgtcaaggtgcaggtagcactaggcaatatctcttctaaaagggagcgcgttaaaatactgtacaagaagatcgaggatctcatcaagtaccttgatcccgaatatatcgatagaatcgctattcctgacgcctccaaactgcaatttatactggccgccgtccccgagcatgctgcaaggctccagagactcgcacagattcacattcagcagcaagaccagtgcgtcgaaatcacagaggaatcaaaagccttgctggaggagtataataaaaccacaatgttactgtctaaacagttcgtgcagtgggatgagctgctgtgccagctcgaggccgctacccaggtcaagcccgccgaagagtag

SEQ ID NO: 99725 - DNA, 477 bp, Artificial Sequence
  derived and/or modified sequence
atggcgggacttaccgacctgcagcgcctccaggccagggtcgaggagctcgagcgctgggtctatgggcctggcggagcacggggatctcgcaaggtcgctgatggattagtgaaagtgcaagtggcattaggcaacatctcttctaaacgagaacgcgtgaagattctctacaaaaagattgaagaccttatcaagtatctggacccagaatatatcgatagaatcgcaatccccgatgcgtccaagctacaatttatcctggcagccgtgcccgagcatgccgctcgactgcagcggctggcacagattcacatccagcaacaagaccagtgtgtcgagataacagaagaaagtaaggctcttttggaagagtataataagaccaccatgctgctgtctaaacagtttgtgcagtgggatgagctgttgtgccagttggaagcagcaacccaagttaaaccggctgaagaatag

SEQ ID NO: 99726 - DNA, 456 bp, Artificial Sequence
  derived and/or modified sequence
cagaggctacaggccagggtggaggagcttgaacgatgggtttatggacccggaggcgcacgaggctctcgaaaggtggccgatgggttggtgaaggtgcaagttgcccttgggaatatctcctcgaaacgggagcgggtaaagattttgtacaagaaaatcgaggacctgatcaagtacttggacccagagtatattgatcggatagccataccagacgcctcaaaactccaattcatcctggccgctgtccccgagcacgcagctcgcctccagaggctggctcagatccatattcagcagcaggatcaatgtgtcgaaatcaccgaggagtctaaagcgctgctagaggagtacaacaaaaccaccatgctactgtcgaaacagttcgtgcagtgggatgagttgctctgccaacttgaggccgctacccaagtgaaacccgcagaggaatag

SEQ ID NO: 99727 - DNA, 477 bp, Artificial Sequence
  derived and/or modified sequence
atggccggcctgaccgacctgcagagactgcaggccagagtggaggagctggagagatgggtgtacggccccggcggcgccagaggcagcagaaaggtggccgacggcctggtgaaggtgcaggtggccctgggcaacatcagcagcaagagagagagagtgaagatcctgtacaagaagatcgaggacctgatcaagtacctggaccccgagtacatcgacagaatcgccatccccgacgccagcaagctgcagttcatcctggccgccgtgcccgagcacgccgccagactgcagagactggcccagatccacatccagcagcaggaccagtgcgtggagatcaccgaggagagcaaggccctgctggaggagtacaacaagaccaccatgctgctgagcaagcagttcgtgcagtgggacgagctgctgtgccagctggaggccgccacccaggtgaagcccgccgaggagtag

SEQ ID NO: 99728 - DNA, 456 bp, Artificial Sequence
  derived and/or modified sequence
cagagactgcaggccagagtggaggagctggagagatgggtgtacggccccggcggcgccagaggcagcagaaaggtggccgacggcctggtgaaggtgcaggtggccctgggcaacatcagcagcaagagagagagagtgaagatcctgtacaagaagatcgaggacctgatcaagtacctggaccccgagtacatcgacagaatcgccatccccgacgccagcaagctgcagttcatcctggccgccgtgcccgagcacgccgccagactgcagagactggcccagatccacatccagcagcaggaccagtgcgtggagatcaccgaggagagcaaggccctgctggaggagtacaacaagaccaccatgctgctgagcaagcagttcgtgcagtgggacgagctgctgtgccagctggaggccgccacccaggtgaagcccgccgaggagtag

SEQ ID NO: 99729 - DNA, 742 bp, Artificial Sequence
  derived and/or modified sequence
ggctgtttcctggccgaggtgggtcggtagtagcgatggcgggtctgactgacttgcagcggctacaggcccgagtggaagagctggagcgctgggtgtacgggccgggcggggcgcgcggctcacggaaggtggctgacggcctggtcaaggtgcaggtggctttggggaacatttccagcaagagggagagggtgaagattctctacaaaaagattgaagatctgatcaagtacctggatcctgagtacatcgaccgcattgccatacctgatgcctctaagctgcaattcatcctagcagccgttcctgagcatgctgcccgcctgcagcgcttggcccagatccacattcagcagcaggaccagtgtgtggaaatcactgaggagtccaaggctctcctggaggaatacaacaagactacaatgcttctctccaagcaattcgtgcagtgggatgagctactttgccagctagaggccgccacgcaagtgaagccagcagaggagtgatagctgctccccatcccaaagtgggcctgggcagtcaggctccagggccctatgccaacctgcctttgttacaaggcagaggaagctttgtatttattggcttcaaggcccacctctctgtactctgggctctaaagttggaggtcaggttacctgaggtttgcaatttgcaacacccaccctccccccaatcagtgttcttatttcagtgacaataaaccatagagatg

SEQ ID NO: 99730 - DNA, 687 bp, Artificial Sequence
  derived and/or modified sequence
cagcggctacaggcccgagtggaagagctggagcgctgggtgtacgggccgggcggggcgcgcggctcacggaaggtggctgacggcctggtcaaggtgcaggtggctttggggaacatttccagcaagagggagagggtgaagattctctacaaaaagattgaagatctgatcaagtacctggatcctgagtacatcgaccgcattgccatacctgatgcctctaagctgcaattcatcctagcagccgttcctgagcatgctgcccgcctgcagcgcttggcccagatccacattcagcagcaggaccagtgtgtggaaatcactgaggagtccaaggctctcctggaggaatacaacaagactacaatgcttctctccaagcaattcgtgcagtgggatgagctactttgccagctagaggccgccacgcaagtgaagccagcagaggagtgatagctgctccccatcccaaagtgggcctgggcagtcaggctccagggccctatgccaacctgcctttgttacaaggcagaggaagctttgtatttattggcttcaaggcccacctctctgtactctgggctctaaagttggaggtcaggttacctgaggtttgcaatttgcaacacccaccctccccccaatcagtgttcttatttcagtgacaataaaccatagagatga

SEQ ID NO: 99731 - DNA, 486 bp, Artificial Sequence
  derived and/or modified sequence
atggccggactcacggacctccagaggctgcaggctcgtgtagaagaactggaaagatgggtgtacggcccaggcggcgcccgcggtagcaggaaggtggctgatggtctcgtgaaagtgcaagtggctctaggcaatattagcagcaagcgtgagagagtgaaaatattatacaagaagattgaggatctcatcaaatatcttgatcctgagtacattgatcgtattgctattccagacgctagcaaactccagttcattttggccggaaacgcagggctgcacgtctatatgcatctccggatgtgggtggtcggcgaagtcaagcaccgggatggtctgagcatccagtcttcaggcggatacaaaccctggatgttgctgagtggtattgtggcttggttttgggtggaggatcctatggacccactcgtggatattgagtactctatcccattacatcaactccaggcaatggtcccatag

SEQ ID NO: 99732 - DNA, 315 bp, Artificial Sequence
  derived and/or modified sequence
atggccggtctgacagatctccagaggttgcaggctagagtggaagaactggaacgctgggtgtacggacctggaggggccagagggtctcggaaagtggctgatggactcgtcaaggtacaggtggcgctaggcaatatcagttccaaaagagagagagtgaagatcctttacaagaaaatcgaagatctgattaaatacctggaccccgaatacattgacaggattgctatccccgacgccagcaaactgcaattcatcctagccgaaaggagctccctaagtttcccacgcctacactcgtggagcagatag

SEQ ID NO: 99733 - DNA, 519 bp, Artificial Sequence
  derived and/or modified sequence
atggctgggctgactgacctgcagaggcttcaggctagagttgaggaactagaaaggtgggtgtatggtcccggaggcgctagggggtctcgtaaagtggcagacggccttgtgaaagtgcaggttgccctggggaacatcagcagcaagcgtgagcgcgtgaaaattctctataaaaaaatcgaggacctcattaaatacctggatccagagtacatagacagaatcgccattccagacgcctctaaattgcagtttattctggccggcaacgctgggcttcatgtttacatgcatctgaggatgtgggtagtgggggaagttaagcacagagacggcctgtctatccaatcctccgggggatataagccgtggatgctcctgagtggaatagttgcatggttctgggtagaggacccaatggatcctctggtggatatcgaatactccattccattgcatcaactgcaggccatggtccctgctactgtcggggcgagccctgtattctaccagtag

SEQ ID NO: 99734 - DNA, 486 bp, Artificial Sequence
  derived and/or modified sequence
atggccggcctgacagacctgcagaggctgcaggcccgggtggaggagctggagcgctgggtgtatggccctgggggcgcccggggcagcaggaaggtggctgatggcctggtgaaggtgcaggtggccctgggcaacatcagcagcaagcgggagcgggtgaagatcctgtacaagaagattgaggacctgatcaagtacctggaccctgagtacatcgaccgcatcgccatcccagatgccagcaagctgcagttcatcctggccggaaatgccggcctgcacgtgtacatgcacctgaggatgtgggtggtgggggaggtgaagcacagagatggcctgagcatccagagcagcggcggctacaagccctggatgctgctgtctggaattgtggcctggttctgggtggaggaccccatggaccccctggtggacatcgagtacagcatccccctgcaccagctgcaggccatggtgccctag

SEQ ID NO: 99735 - DNA, 315 bp, Artificial Sequence
  derived and/or modified sequence
atggccggcctgacagacctgcagaggctgcaggcccgggtggaggagctggagcgctgggtgtatggccctgggggcgcccggggcagcaggaaggtggctgatggcctggtgaaggtgcaggtggccctgggcaacatcagcagcaagcgggagcgggtgaagatcctgtacaagaagattgaggacctgatcaagtacctggaccctgagtacatcgaccgcatcgccatcccagatgccagcaagctgcagttcatcctggccgagaggagcagcctgtccttcccccggctgcacagctggagcaggtag

SEQ ID NO: 99736 - DNA, 519 bp, Artificial Sequence
  derived and/or modified sequence
atggccggcctgacagacctgcagaggctgcaggcccgggtggaggagctggagcgctgggtgtatggccctgggggcgcccggggcagcaggaaggtggctgatggcctggtgaaggtgcaggtggccctgggcaacatcagcagcaagcgggagcgggtgaagatcctgtacaagaagattgaggacctgatcaagtacctggaccctgagtacatcgaccgcatcgccatcccagatgccagcaagctgcagttcatcctggccggaaatgccggcctgcacgtgtacatgcacctgaggatgtgggtggtgggggaggtgaagcacagagatggcctgagcatccagagcagcggcggctacaagccctggatgctgctgtctggaattgtggcctggttctgggtggaggaccccatggaccccctggtggacatcgagtacagcatccccctgcaccagctgcaggccatggtgcctgccaccgtgggcgccagccctgtgttctaccagtag

SEQ ID NO: 99737 - DNA, 486 bp, Artificial Sequence
  derived and/or modified sequence
atggccggcctgaccgacctgcagcggctgcaggcccgggtggaggagctcgagagatgggtgtacggacccggtggggctagaggttcgaggaaggttgcagatggattggtcaaggtgcaggtagccctggggaatatatcttccaaaagagagcgcgtcaaaatcctgtataagaaaatcgaggacctcatcaagtacctggaccctgaatacatagaccggattgccatccccgacgcatctaagctccagtttattctggccggaaacgccggcctacatgtgtatatgcacctgaggatgtgggtcgtaggcgaagtgaagcatcgggacggactgagtatacagtctagcggcgggtacaagccttggatgctcctgtcaggaatcgtggcctggttttgggtggaagaccccatggatccgctggtcgatatcgaatactcaatacctcttcatcagttacaggccatggtaccttag

SEQ ID NO: 99738 - DNA, 315 bp, Artificial Sequence
  derived and/or modified sequence
atggccggcctgaccgacctgcagcggctgcaggcccgggtggaggagctggaaaggtgggtgtacggcccaggcggcgccagaggctcaaggaaggtggcggatggcttggttaaagtgcaagtggcattgggcaacatttcatcaaagagggagagggtgaagatcctgtataagaaaattgaggatttgatcaagtatctggatccggagtacatcgaccgtatcgccattcccgacgcatcaaaattacagttcatccttgctgagcggtcttccctgtcctttccccgcctccatagttggagtagatag

SEQ ID NO: 99739 - DNA, 519 bp, Artificial Sequence
  derived and/or modified sequence
atggccggcctgaccgacctgcagcggctgcaggcccgggtggaggagctggagcggtgggtatatggccctggcggtgcccgaggttcacgtaaggtggcagacggactcgtgaaggtgcaggttgcgttagggaatattagcagtaaacgcgaacgcgtcaagatattatacaagaagattgaggacttaattaagtatctagaccctgaatatatcgataggatagctatcccagatgccagcaagctccagttcattcttgctggaaatgcaggactgcacgtgtatatgcacctgaggatgtgggtggtcggagaagtgaagcatcgagacgggttgagtattcaaagctctggaggatataaaccctggatgctgctgtctggtatagtggcctggttttgggtagaggaccccatggatccattggtcgatatagaatattctatacccctgcaccagttgcaggccatggttccggctacggtaggggccagcccagtgttctaccagtag

SEQ ID NO: 99740 - DNA, 486 bp, Artificial Sequence
  derived and/or modified sequence
atggcagggctgaccgatctccagcggttacaggccagagtggaggagcttgagagatgggtctacggcccaggaggagctcgcggatccaggaaggtcgcagatgggctggtgaaggttcaagtggctctcgggaatatcagtagtaagcgtgagcgggtcaaaattctatataaaaaaattgaggacttaattaagtacctggaccctgaatacatagacagaatagctatccccgacgccagtaagttacagttcatcctagctggaaatgccggtctccacgtttatatgcacctccgaatgtgggtagtgggcgaggtaaagcaccgcgacgggctgagtattcagtcctccggtggttacaagccctggatgctgctgagcggaattgtcgcctggttctgggttgaagatccgatggatccattggtggacatcgaatatagcatccccctgcaccaacttcaggccatggttccatag

SEQ ID NO: 99741 - DNA, 315 bp, Artificial Sequence
  derived and/or modified sequence
atggccggactgacagacctacagaggctgcaagcgagggtcgaggagctggaaaggtgggtctatgggccaggtggagctcgcggatcccgcaaagtggccgacggactggtgaaagttcaggtagccctgggcaacatttcttctaaacgggaacgggtgaagatcctctataagaaaatagaggatctcattaagtacctggaccctgaatacatagatcggattgccatcccagacgcatcaaagttacagtttatcctggccgagcggtcctcactgtcattccctaggcttcactcatggtctcgatag

SEQ ID NO: 99742 - DNA, 519 bp, Artificial Sequence
  derived and/or modified sequence
atggccggtctgacagatttgcagcggctccaggctcgggttgaggagctcgaaagatgggtttacggacccggaggagccagaggttcacggaaagtggctgatggattggtgaaagtgcaagtcgcactaggtaatatcagttcaaaacgtgagagagttaaaatcttgtacaaaaagattgaagatctgatcaagtatctcgatcccgagtacatagacagaattgcaatccctgatgcctccaaacttcagttcatcctggccggaaatgccggtctgcatgtgtatatgcacctaaggatgtgggtggtcggtgaggtcaaacaccgagatggcctgagcattcaatctagcgggggttataagccctggatgctcctatctggcatcgtagcctggttttgggtcgaagatcctatggatcctctagtcgacatagagtattctattcctctgcaccagctccaggcaatggttcctgcaaccgtaggcgcttcacctgtgttctatcagtag

SEQ ID NO: 99743 - DNA, 486 bp, Artificial Sequence
  derived and/or modified sequence
atggccggcctgaccgacctgcagagactgcaggccagagtggaggagctggagagatgggtgtacggccccggcggcgccagaggcagcagaaaggtggccgacggcctggtgaaggtgcaggtggccctgggcaacatcagcagcaagagagagagagtgaagatcctgtacaagaagatcgaggacctgatcaagtacctggaccccgagtacatcgacagaatcgccatccccgacgccagcaagctgcagttcatcctggccggcaacgccggcctgcacgtgtacatgcacctgagaatgtgggtggtgggcgaggtgaagcacagagacggcctgagcatccagagcagcggcggctacaagccctggatgctgctgagcggcatcgtggcctggttctgggtggaggaccccatggaccccctggtggacatcgagtacagcatccccctgcaccagctgcaggccatggtgccctag

SEQ ID NO: 99744 - DNA, 315 bp, Artificial Sequence
  derived and/or modified sequence
atggccggcctgaccgacctgcagagactgcaggccagagtggaggagctggagagatgggtgtacggccccggcggcgccagaggcagcagaaaggtggccgacggcctggtgaaggtgcaggtggccctgggcaacatcagcagcaagagagagagagtgaagatcctgtacaagaagatcgaggacctgatcaagtacctggaccccgagtacatcgacagaatcgccatccccgacgccagcaagctgcagttcatcctggccgagagaagcagcctgagcttccccagactgcacagctggagcagatag

SEQ ID NO: 99745 - DNA, 519 bp, Artificial Sequence
  derived and/or modified sequence
atggccggcctgaccgacctgcagagactgcaggccagagtggaggagctggagagatgggtgtacggccccggcggcgccagaggcagcagaaaggtggccgacggcctggtgaaggtgcaggtggccctgggcaacatcagcagcaagagagagagagtgaagatcctgtacaagaagatcgaggacctgatcaagtacctggaccccgagtacatcgacagaatcgccatccccgacgccagcaagctgcagttcatcctggccggcaacgccggcctgcacgtgtacatgcacctgagaatgtgggtggtgggcgaggtgaagcacagagacggcctgagcatccagagcagcggcggctacaagccctggatgctgctgagcggcatcgtggcctggttctgggtggaggaccccatggaccccctggtggacatcgagtacagcatccccctgcaccagctgcaggccatggtgcccgccaccgtgggcgccagccccgtgttctaccagtag

SEQ ID NO: 99746 - DNA, 482 bp, Artificial Sequence
  derived and/or modified sequence
atggcgggtctgactgacttgcagcggctacaggcccgagtggaagagctggagcgctgggtgtacgggccgggcggggcgcgcggctcacggaaggtggctgacggcctggtcaaggtgcaggtggctttggggaacatttccagcaagagggagagggtgaagattctctacaaaaagattgaagatctgatcaagtacctggatcctgagtacatcgaccgcattgccatacctgatgcctctaagctgcaattcatcctagcaggtaatgctggactacatgtgtacatgcatctgaggatgtgggtcgtcggggaggttaagcacagagatggcctctccatccagtcttctggtggatacaagccctggatgctgctctctggaattgtggcctggttctgggttgaggatcctatggatcctctagtagacattgagtacagtatacctctgcaccagctgcaggccatggtgcc

SEQ ID NO: 99747 - DNA, 3877 bp, Artificial Sequence
  derived and/or modified sequence
gactgacgtcccgccctctggctgtttcctggccgaggtgggtcggtagtagcgatggcgggtctgactgacttgcagcggctacaggcccgagtggaagagctggagcgctgggtgtacgggccgggcggggcgcgcggctcacggaaggtggctgacggcctggtcaaggtgcaggtggctttggggaacatttccagcaagagggagagggtgaagattctctacaaaaagattgaagatctgatcaagtacctggatcctgagtacatcgaccgcattgccatacctgatgcctctaagctgcaattcatcctagcaggtaatgctggactacatgtgtacatgcatctgaggatgtgggtcgtcggggaggttaagcacagagatggcctctccatccagtcttctggtggatacaagccctggatgctgctctctggaattgtggcctggttctgggttgaggatcctatggatcctctagtagacattgagtacagtatacctctgcaccagctgcaggccatggtgccagccacagtgggagctagtccagtgttctatcaatagtttgcctcttggattttccttcagaaccttcctcacttctgctcactagacagaggagcttctaggaaagggtaggggcagagagcattgccattaaagaacagagagagtattggcatgagtttcaacatctttctttcatgtgagaaagctctgcagtgtcagagttctaggcaggaactattgccttggcaatgtctgctaatcagtcagccattctataagctagggttttttgagcttcgttattcatccaaaagatgtataatgatcatctactctgatccaggttctttcctaagtgaggaagcatacagtggtgaaccagaaagtccctgccctcatgggcacagccagagctaggggagacagggtccctgcttcagggacctgagcttataacccagatgggagatcagtctcccaggagactgatcagtgcaatgcagcactgaggactgggtaaggatgggccactcctgctaaaagggctgtcagagttcccaaagggctcttggtcaattgccatcgctcaagcaccaagtttagatattctcctgcactgactcttgagtccagcctctccatccctccctgtggcactgcctcaggaattgtgcatccacttgcatatgaatggttgcacagtctcctaaatcatactcttgaccctaatctttcccttcctgcatgtggttcagtctcaccctcacaaaaacatgttcccaacatgtcactttgcctactttggaacctcagtgtatcctgccttgctaggataaagtcctaattccatagtctgccattcaaagcctttcagtcggccgggtctaccctcccatccaactctgtttcctgtgctctccctactccagttcagctaattgaattctttctcctctactaattgacaggcattcctgcctctaagcatttgcacgtaacagtcctctctcttgaatacccttcccactctatggatttcagtgcattgaaatcccgtgtgcatacagggcctagcccagatcctgctctcctcactggactcttccattactgtcccagctctcctccagcatataattgtctatgcctctgagagccactgagcagaacctgcctggcgtagtctgccacatatctcttttagaccttcctggggacccttgggtgtggggatccaagtctgaagtattttgtattttgtggcctaggaggtgctccctgagtttgttgataggaggctagaagaagaggtcttgaagttaaaccttggagaaaggtgggatttggagaaattgagaggctcattaggctcagatgggtcagacctgaggcatccaggagagttgggggcaggatggaaatgtgcacctagagaagggggcagtggacagagtcactgtccaaagctctaggacctagccatctcccttgccaggtcctcaggcccttacatgggctgattagcaatgcccaggtttgcttcactgcaactatcttgtccatttttgctttagaggagcagtttatcctttcccaggttgcactcctggagcaggtgaatgccttggtgcccatgctggacagtgctcacatcaaaggtatctctctggggttatagcttcactactctggttggggaggtaggtggatggatgggcaagactttcctgtgtttcaggttgtgtggattcgggttgggtctgttccttatcttttttttttttttttggacagagtcgtactctgtcacccaggctggagtgcagtggcatgatcttgactcactgcaaccgctgcctcctggttcaaacaaacttcccaccttgcctcccaagtagctaggattacaggtgtgtgccaccacacctggctatttttagtagagacggggtttcaccatgttgtccaggctggtctcaaactcctggccccatgtgatccacctgcctcggcctctcagagtgctgggattacaggcgtgagctactgtgcctggcctgttccttatctttatcctcaccctgaggtacttgccacatccaccaattaaaattaccaggatagagagcccagttttaggacctcaggcaatttgggcctgagaacactagcctaagctctagcagtccccagctctggggattccttctgccttctacctacccccaagcatctcttcttcaaggtgctgcagaacccagattttactatcagagtctctgccaggtccatgaatgtatgtgaattctttctgctgcactgctgagagcagtccctgggcctggactttgacaagcagatagtggctttaattgaatccagatatccatcttgtctgtctgtggaggtatttttcccagctccccctccctacccctgatcagctgcccgctgagtatctgacagccttaagctttgagcccagcatggtggccaagccttggcgtgttggattccagcttagggacctggcatccatcttcagactccctgttccctaagccaggcagacctgcccccgctgggctgagagcaaagggacaggtcctataatagccaaagctctctttacctggtcctgcttatagcactggggtgggggtagggagcaacactgggaaccccaaggttttgtcttctcctcgggacatgtatcttcccctcccctatgggtcctggagtaagactggagtgggcagggagccccactgccacctccagctgcagcagtcgatgaagtctggcgtttgtttagcttctccactcaatactctaatcctgccaaagacctaatagactattgagcagtcccgggggagggcacaagcatcatccagcagtgtgtgttgtgttttacagccgttcctgagcatgctgcccgcctgcagcgcttggcccagatccacattcagcagcaggaccagtgtgtggaaatcactgaggagtccaaggctctcctggaggaatacaacaagactacaatgcttctctccaagcaattcgtgcagtgggatgagctactttgccagctagaggccgccacgcaagtgaagccagcagaggagtgatagctgctccccatcccaaagtgggcctgggcagtcaggctccagggccctatgccaacctgcctttgttacaaggcagaggaagctttgtatttattggcttcaaggcccacctctctgtactctgggctctaaagttggaggtcaggttacctgaggtttgcaatttgcaacacccaccctccccccaatcagtgttcttatttcagtgacaataaaccatagagatg

SEQ ID NO: 99748 - DNA, 677 bp, Artificial Sequence
  derived and/or modified sequence
gtgggtcggtagtagcgatggcgggtctgactgacttgcagcggctacaggcccgagtggaagagctggagcgctgggtgtacgggccgggcggggcgcgcggctcacggaaggtggctgacggcctggtcaaggtgcaggtggctttggggaacatttccagcaagagggagagggtgaagattctctacaaaaagattgaagatctgatcaagtacctggatcctgagtacatcgaccgcattgccatacctgatgcctctaagctgcaattcatcctagcagagaggagcagtttatcctttcccaggttgcactcctggagcaggtgaatgccttggtgcccatgctggacagtgctcacatcaaagccgttcctgagcatgctgcccgcctgcagcgcttggcccagatccacattcagcagcaggtatgggaggggagatgactagaagcgaagatggaggtggcgcagcacctcatcccaactcatgccacctggggaagcagcttcaggcctttctgttgtaacctcagcagaaactttggggtttatcctttatcttgcatatgccccagggaggtaaagggacttgcctaggttcatgtacaaactttctgcttccagagcaggactttattgggacaccataaggttgaggctgggaggtacccaa

SEQ ID NO: 99749 - protein, 279 aa, Artificial Sequence
  derived and/or modified sequence
MNSCLWDISRYGPNSWRSYLENLENLFQCLGQVLPESCLLVWNTAMPVGEEVTGGFLPPKLRRQKATFLKNEVVKANFHSATEARKHNFDVLDLHFHFRHARENLHWDGVHWNGRVHRCLSQLLLAHVADAWGVELPHRHPVGEWIKKKKPGPRVEGPPQANRNHPALPLSPPLPSPTYRPLLGFPPQTILSSRINSIAIQMSPHQPMQVSSSKTILWLVLSCLCPSSPHPVISGLPQWYIGVLAGIVPVAPIRPGDSGLDLQREGPQPILSQGLNRRT

SEQ ID NO: 99750 - protein, 432 aa, Artificial Sequence
  derived and/or modified sequence
MILLRASEVRQLLHNKFVVILGDSVHRAVYKDLVLLLQKDRLLTPGQLRARGELNFEQDELVDGGQRGHMHNGLNYREVREFRSDHHLVRFYFLTRVYSDYLQTILKELQSGEHAPDLVIMNSCLWDISRYGPNSWRSYLENLENLFQCLGQVLPESCLLVWNTAMPVGEEVTGGFLPPKLRRQKATFLKNEVVKANFHSATEARKHNFDVLDLHFHFRHARENLHWDGVHWNGRVHRCLSQLLLAHVADAWGVELPHRHPVGEWIKKKKPGPRVEGPPQANRNHPALPLSPPLPSPTYRPLLGFPPQRLPLLPLLSPQPPPPILHHQGMPRFPQGPPDACFSSDHTFQSDQFYCHSDVPSSAHAGFFVEDNFMVGPQLPMPFFPTPRYQRPAPVVHRGFGRYRPRGPYTPWGQRPRPSKRRAPANPEPRPQ

SEQ ID NO: 99751 - protein, 167 aa, Artificial Sequence
  derived and/or modified sequence
MILLRASEVRQLLHNKFVVILGDSVHRAVYKDLVLLLQKDRLLTPGQLRARGELNFEQDELVDGGQRGHMHNGLNYREVREFRSDHHLVRFYFLTRVYSDYLQTILKELQSGEHAPDLVIMNSCLWDISRYGPNSWRSYLENLENLFQCLGQVLPESCLLVWNTAMP

SEQ ID NO: 99752 - protein, 168 aa, Artificial Sequence
  derived and/or modified sequence
MILLRASEVRQLLHNKFVVILGDSVHRAVYKDLVLLLQKDRLLTPGQLRARGELNFEQDELVDGGQRGHMHNGLNYREVREFRSDHHLVRFYFLTRVYSDYLQTILKELQSGEHAPDLVIMNSCLWDISRYGPNSWRSYLENLENLFQCLGQVLPESCLLVWNTAMPV

SEQ ID NO: 99753 - protein, 58 aa, Artificial Sequence
  derived and/or modified sequence
MILLRASEVRQLLHNKFVVILGDSVHRAVYKDLVLLLQKDRLLTPGQLRARGELNFEQ

SEQ ID NO: 99754 - DNA, 840 bp, Artificial Sequence
  derived and/or modified sequence
atgaacagctgcctgtgggacatcagcagatacggccccaacagctggagaagctacctggagaacctggagaacctgttccagtgcctgggccaggtgctgcccgagagctgcctgctggtgtggaacaccgccatgcccgtgggcgaggaggtgaccggcggcttcctgccccccaagctgagaagacagaaggccaccttcctgaagaacgaggtggtgaaggccaacttccacagcgccaccgaggccagaaagcacaacttcgacgtgctggacctgcacttccacttcagacacgccagagagaacctgcactgggacggcgtgcactggaacggcagagtgcacagatgcctgagccagctgctgctggcccacgtggccgacgcctggggcgtggagctgccccacagacaccccgtgggcgagtggatcaagaagaagaagcccggccccagagtggagggccccccccaggccaacagaaaccaccccgccctgcccctgagcccccccctgcccagccccacctacagacccctgctgggcttccccccccagaccatcctgagcagcagaatcaacagcatcgccatccagatgagcccccaccagcccatgcaggtgagcagcagcaagaccatcctgtggctggtgctgagctgcctgtgccccagcagcccccaccccgtgatcagcggcctgccccagtggtacatcggcgtgctggccggcatcgtgcccgtggcccccatcagacccggcgacagcggcctggacctgcagagagagggcccccagcccatcctgagccagggcctgaacagaagaacctag

SEQ ID NO: 99755 - DNA, 1299 bp, Artificial Sequence
  derived and/or modified sequence
atgatcctgctgagagccagcgaggtgagacagctgctgcacaacaagttcgtggtgatcctgggcgacagcgtgcacagagccgtgtacaaggacctggtgctgctgctgcagaaggacagactgctgacccccggccagctgagagccagaggcgagctgaacttcgagcaggacgagctggtggacggcggccagagaggccacatgcacaacggcctgaactacagagaggtgagagagttcagaagcgaccaccacctggtgagattctacttcctgaccagagtgtacagcgactacctgcagaccatcctgaaggagctgcagagcggcgagcacgcccccgacctggtgatcatgaacagctgcctgtgggacatcagcagatacggccccaacagctggagaagctacctggagaacctggagaacctgttccagtgcctgggccaggtgctgcccgagagctgcctgctggtgtggaacaccgccatgcccgtgggcgaggaggtgaccggcggcttcctgccccccaagctgagaagacagaaggccaccttcctgaagaacgaggtggtgaaggccaacttccacagcgccaccgaggccagaaagcacaacttcgacgtgctggacctgcacttccacttcagacacgccagagagaacctgcactgggacggcgtgcactggaacggcagagtgcacagatgcctgagccagctgctgctggcccacgtggccgacgcctggggcgtggagctgccccacagacaccccgtgggcgagtggatcaagaagaagaagcccggccccagagtggagggccccccccaggccaacagaaaccaccccgccctgcccctgagcccccccctgcccagccccacctacagacccctgctgggcttccccccccagagactgcccctgctgcccctgctgagcccccagccccccccccccatcctgcaccaccagggcatgcccagattcccccagggcccccccgacgcctgcttcagcagcgaccacaccttccagagcgaccagttctactgccacagcgacgtgcccagcagcgcccacgccggcttcttcgtggaggacaacttcatggtgggcccccagctgcccatgcccttcttccccacccccagataccagagacccgcccccgtggtgcacagaggcttcggcagatacagacccagaggcccctacaccccctggggccagagacccagacccagcaagagaagagcccccgccaaccccgagcccagaccccagtag

SEQ ID NO: 99756 - DNA, 504 bp, Artificial Sequence
  derived and/or modified sequence
atgatcctgctgagagccagcgaggtgagacagctgctgcacaacaagttcgtggtgatcctgggcgacagcgtgcacagagccgtgtacaaggacctggtgctgctgctgcagaaggacagactgctgacccccggccagctgagagccagaggcgagctgaacttcgagcaggacgagctggtggacggcggccagagaggccacatgcacaacggcctgaactacagagaggtgagagagttcagaagcgaccaccacctggtgagattctacttcctgaccagagtgtacagcgactacctgcagaccatcctgaaggagctgcagagcggcgagcacgcccccgacctggtgatcatgaacagctgcctgtgggacatcagcagatacggccccaacagctggagaagctacctggagaacctggagaacctgttccagtgcctgggccaggtgctgcccgagagctgcctgctggtgtggaacaccgccatgccctag

SEQ ID NO: 99757 - DNA, 507 bp, Artificial Sequence
  derived and/or modified sequence
atgatcctgctgagagccagcgaggtgagacagctgctgcacaacaagttcgtggtgatcctgggcgacagcgtgcacagagccgtgtacaaggacctggtgctgctgctgcagaaggacagactgctgacccccggccagctgagagccagaggcgagctgaacttcgagcaggacgagctggtggacggcggccagagaggccacatgcacaacggcctgaactacagagaggtgagagagttcagaagcgaccaccacctggtgagattctacttcctgaccagagtgtacagcgactacctgcagaccatcctgaaggagctgcagagcggcgagcacgcccccgacctggtgatcatgaacagctgcctgtgggacatcagcagatacggccccaacagctggagaagctacctggagaacctggagaacctgttccagtgcctgggccaggtgctgcccgagagctgcctgctggtgtggaacaccgccatgcccgtgtag

SEQ ID NO: 99758 - DNA, 177 bp, Artificial Sequence
  derived and/or modified sequence
atgatcctgctgagagccagcgaggtgagacagctgctgcacaacaagttcgtggtgatcctgggcgacagcgtgcacagagccgtgtacaaggacctggtgctgctgctgcagaaggacagactgctgacccccggccagctgagagccagaggcgagctgaacttcgagcagtag

SEQ ID NO: 99759 - DNA, 840 bp, Artificial Sequence
  derived and/or modified sequence
atgaattcctgtttgtgggatatcagccggtacggccccaacagttggcgatcctatctggaaaatctcgagaatctttttcagtgtttaggccaggtgctgccagaatcttgcctgctggtgtggaacaccgctatgccagtgggtgaggaagttactggaggttttctcccccctaagcttagacgtcagaaggccacttttctcaaaaatgaagtcgttaaggccaattttcacagtgcgaccgaagcacggaaacacaacttcgacgttctcgacctgcactttcatttccggcacgctcgggagaatctccattgggacggggttcattggaatggacgggttcatcgatgtctgtcccagctgctcctggctcatgtcgccgacgcctggggagtcgagctacctcatcggcatcctgtgggtgagtggataaagaagaaaaaacccggtcctagagtcgagggtccccctcaggctaataggaatcaccccgcccttccactgtccccgccgctaccgtctccaacatataggcctctgctaggcttcccccctcagaccattctcagtagccggatcaactctattgcaattcagatgtccccccaccaacccatgcaggtatcaagtagtaaaacaattttatggctggtgctatcatgcctctgcccttcaagtccccaccccgtcataagtggattaccccagtggtatatcggtgtgctggctgggatagtgcccgttgctcccatcaggcctggggattcgggtctcgacctgcagcgcgaaggcccccagccaattctctcacagggcctgaaccgtcggacttag

SEQ ID NO: 99760 - DNA, 1299 bp, Artificial Sequence
  derived and/or modified sequence
atgatacttctaagagcttctgaagtgagacagctgctgcacaacaaatttgtggtgatcctgggggactcagtgcatagagcagtttacaaggacttggtgctgctcctgcaaaaagataggttactgacaccaggccagttgcgggcccgcggcgaattaaatttcgaacaggacgagctcgtggatggtggccagcgcgggcacatgcacaacggtctgaattaccgcgaagtcagagaattccggtccgatcaccatctagtccggttctactttctaacaagggtttacagtgactatctgcagaccatcctaaaggagctgcagtccggagaacacgcgccagacctggtcattatgaactcctgcctgtgggatatatcgcgttacggccctaattcctggaggagctatttagagaacctggaaaacctgttccaatgcctaggacaagtgctacccgaaagctgtctgctggtttggaacaccgccatgcctgtcggcgaggaggtgacgggcggcttcctccctccaaagctcagacggcagaaagccaccttcctgaaaaatgaggtggtcaaggccaatttccacagtgctactgaggcccgaaagcacaacttcgatgtcctggacctccactttcattttagacacgcacgcgaaaatctacactgggatggcgtacactggaatgggcgtgtgcatagatgcctgtcccagcttctgttggcccacgtcgccgatgcctggggagtggaactcccccacagacatcccgtcggagaatggattaagaagaaaaagcccggtccccgtgttgaagggcctcctcaggcgaatcggaatcacccagcactgcccctctccccacccctgcccagtcccacctacaggccactgctcggcttccccccacaaaggttgcctctgttacccctcctcagtccgcagcccccccctccgatcctacaccaccaagggatgccccgctttccccagggccctccagatgcttgcttctcctcagaccacactttccagtctgaccagttctattgccattcagatgtgccctcatccgctcacgcaggctttttcgttgaggacaacttcatggtgggaccccaactcccgatgcctttctttcctaccccaaggtatcagcgtcctgccccagtcgtccaccgaggctttggacgatatcgcccacgaggtccatacacgccttggggtcagaggcctaggccaagcaagaggcgcgctcccgccaaccctgagccccggcctcagtag

SEQ ID NO: 99761 - DNA, 1299 bp, Artificial Sequence
  derived and/or modified sequence
atgatcttgcttcgggcctctgaggtgcggcagctcctccataacaaatttgtggttattctgggtgactctgtccatagggccgtctacaaggacctcgtgctccttctacagaaagataggctgctaactcctggtcaactaagggcaagaggcgaactgaattttgaacaagacgaacttgttgatggcggacagcgagggcatatgcacaatggacttaattacagggaggtccgggagttccggagcgaccatcatctcgtcaggttctacttcttaacaagagtgtattcagactatttacagacaatcctaaaagagctacaatctggtgagcatgcccccgatttggttattatgaactcatgcttgtgggacattagccggtatggacccaactcctggcggtcttatttagaaaatctggagaacctgtttcagtgcctggggcaagtgcttccagagtcgtgcttactggtttggaacactgccatgcctgtgggggaagaggtcacaggcggattcctccctcccaagctgcgtcgacaaaaagcaacatttttaaagaatgaagtcgttaaggctaatttccactccgccaccgaggcccggaaacataacttcgacgttttagacctgcatttccatttccggcacgcccgcgagaatctgcactgggacggggtacactggaatgggagagtccaccgttgtctgagccagctgctgttggcccatgtcgccgatgcctggggagtcgagctgccccatcggcatcccgtgggggagtggataaagaaaaagaaacctggtccccgtgtcgaggggcctcctcaggctaaccggaatcatcctgcgctacctctaagcccacccctcccatctcccacctaccggcctctcctgggctttcctccacagaggctgccacttctgcctctcctgtccccccaacctccccctcctatcctgcaccatcaggggatgccaaggtttccgcagggccctcccgacgcttgcttttcgtcagaccacacatttcagtctgatcagttttattgtcacagtgacgtcccctccagcgcccatgctggcttcttcgtggaggataacttcatggtcggacctcagctgccgatgcctttcttcccaaccccaaggtaccaacgccccgccccagtggtgcacagggggtttggacgctatcggccacgcggcccatatactccatggggacagcggccccgaccttccaagagaagggctcccgccaatccagagcccagaccccagtag

SEQ ID NO: 99762 - DNA, 504 bp, Artificial Sequence
  derived and/or modified sequence
atgatccttcttcgagctagcgaagtccgccagctgttgcataacaagttcgtggtaatccttggggactctgtgcacagagccgtatacaaggacctggtcctgctgctccagaaggataggctacttacacctgggcagctccgggcccgcggcgagctcaacttcgagcaagacgagctcgttgatgggggccaacgggggcatatgcacaacggactcaattacagagaagtccgcgagttcagaagcgatcaccatttggtgcgcttctactttctgacgcgtgtgtacagcgattatttacagaccatactgaaggaactccagtcaggggagcacgcccccgacttagttattatgaacagttgcttatgggatatctcccgctatgggccgaattcctggcgctcttatctggaaaaccttgagaacctttttcaatgcctcggccaggtgcttccagaaagttgcctgctggtctggaacactgccatgccctag

SEQ ID NO: 99763 - DNA, 507 bp, Artificial Sequence
  derived and/or modified sequence
atgattctactgcgagcgtcagaagtgcggcagttgctgcataataagtttgtcgtgattctaggggactcagtgcatcgcgcagtatacaaggatctcgtgcttctgcttcagaaggaccgccttctgacgccaggacagcttagagctcgcggagagttgaactttgagcaggacgaactggtagatggcggacagcgaggacatatgcacaacggcttgaactaccgagaggtgcgagaatttaggtccgaccaccatctcgttcgtttctatttcctgaccagagtgtattccgattacctgcagacgattctgaaggaactccagtccggcgaacacgctcctgatctagtgataatgaatagttgcttatgggatatcagtaggtacggaccaaacagttggcgtagctacctagagaatctggaaaacctgttccagtgtttgggacaggtactccctgagagctgtctcctggtgtggaacaccgcaatgcctgtgtag

SEQ ID NO: 99764 - DNA, 177 bp, Artificial Sequence
  derived and/or modified sequence
atgatccttttgagggccagcgaggtgcgacaactgctgcacaataaattcgttgtcatccttggcgatagcgtacaccgggccgtatacaaggatcttgttctcttgctgcagaaggatcgcctgctgacaccaggccagctgcgcgcccggggggagctgaatttcgaacagtag

SEQ ID NO: 99765 - DNA, 840 bp, Artificial Sequence
  derived and/or modified sequence
atgaattcctgcctctgggacatctccaggtatggtccgaactcctggagaagctacctggagaacctggagaacctgttccagtgcctgggccaggtgctgcccgagtcttgcctcctggtgtggaacacggccatgcctgtgggcgaggaagtcaccgggggttttcttccgcccaagctccggcggcagaaggccaccttcctgaaaaacgaagtggtcaaagccaacttccacagcgccaccgaggcacgtaaacataacttcgatgtactggacttgcatttccacttccgccacgcgagggagaacctgcactgggacggggtgcactggaatggacgtgtgcaccgctgcctctcccagctgctgctggcccacgtggccgacgcctggggtgtggagctgccccaccgccaccccgtgggcgagtggatcaagaagaaaaaacctggcccgagagtcgaagggccgccccaggccaacagaaatcacccggccttacctctgtccccacccttaccttcccccacataccgccccctgcttgggttcccaccccagaccatactttccagtcggatcaattctattgccattcagatgtcccctcatcagcccatgcaggtttcttcgtcgaagacaattttatggttggtcctcagctgcctatgcccttcttccccacaccccgttatcagcggcctgccccagtggtacataggggttttggcaggtatcgtccccgtggcccctatacgccctggggacagcggcctcgaccttcaaagagaagggccccagccaatcctgagccaaggcctcaatagacggacctag

SEQ ID NO: 99766 - DNA, 2071 bp, Artificial Sequence
  derived and/or modified sequence
attgtttaatcaaaggaagagtcaaaataagctacacccagattactgagaaaggtgaaatgaaaacaagctcaaaaccaaattccaggaagatgctgtctttgtattgacttaccatttcatgttttcacacatgtcaaagtcttgaagcttcggtcattagtcttccgcttcctaaagcaagaaactaaatgctgacttgtgtcgtttgccccagatgccaccggaaatgtcatcttctccccagacgctggcttgcaagcacagcagcacccagaggctaacctatttcccctatagcccaagctctgagatctcccgtctggtcacaatgatctacaggagaggaagaaagctatctagggacgagatctagaatcaactgagagagatgcttaaaaatcaccagttactttaatgaccatccgcagagccatcctgtgcaaaggaaggagctaggctgtgcgccctgggcgtcatgatccttctgcgggcctccgaagtgcggcagctgcttcacaataagttcgtggtcatcctgggggactctgtgcatagggcagtatacaaggacctggtgcttctgctgcagaaggaccgcctgctcactcccgggcagcttagagcaaggggggagctgaacttcgaacaagatgagctggtggacggaggccagcggggccacatgcacaacggccttaactaccgtgaggtccgcgagttccgctccgaccaccatctggtacgtttttacttcctcacccgcgtgtactccgattacctccagaccatcttgaaagagctgcagtcgggcgagcacgcccccgacctggtcatcatgaattcctgcctctgggacatctccaggtatggtccgaactcctggagaagctacctggagaacctggagaacctgttccagtgcctgggccaggtgctgcccgagtcttgcctcctggtgtggaacacggccatgcctgtgggcgaggaagtcaccgggggttttcttccgcccaagctccggcggcagaaggccaccttcctgaaaaacgaagtggtcaaagccaacttccacagcgccaccgaggcacgtaaacataacttcgatgtactggacttgcatttccacttccgccacgcgagggagaacctgcactgggacggggtgcactggaatggacgtgtgcaccgctgcctctcccagctgctgctggcccacgtggccgacgcctggggtgtggagctgccccaccgccaccccgtgggcgagtggatcaagaagaaaaaacctggcccgagagtcgaagggccgccccaggccaacagaaatcacccggccttacctctgtccccacccttaccttcccccacataccgccccctgcttgggttcccaccccagcgcttgccgctgctcccgctcctgtccccacagcctcctcctcccattctccatcaccagggaatgccccggttcccacagggtcccccagatgcctgtttttcctcagaccatactttccagtcggatcaattctattgccattcagatgtcccctcatcagcccatgcaggtttcttcgtcgaagacaattttatggttggtcctcagctgcctatgcccttcttccccacaccccgttatcagcggcctgccccagtggtacataggggttttggcaggtatcgtccccgtggcccctatacgccctggggacagcggcctcgaccttcaaagagaagggccccagccaatcctgagccaaggcctcaatagacggacctaggccttatttcctctttatgaacatggattggacagatctgacacttcctttccattgcttggcctgaacagactgaccttgttaacttaagcctggagtccatgcctcgtcttccttttgttcattgctgttaccaagaaagccaaggaagagcagcctgactcattcttcttggctgcagcctcttccccacttcctgggagtgacccagcgttattcctgcctcctcactcctattctctttgcctttgtgtaaaaataaaatggaaataaacaagttgcac

SEQ ID NO: 99767 - DNA, 2328 bp, Artificial Sequence
  derived and/or modified sequence
gccggctctcaactttgaggagtttcaagcagccgcggcggcagcagcagccctggacgcagcagccaagctcttcgctggctcccgggggctctcccgggttcctctcattgcaggctgaaggtaatgagaggccctaagatcccagaggatgccataagaggaaaagtcaggggagtgttgaagactctgcctcctacaaatatccgtgaacataccacaccagcaagaacaataagagccaagggtctgaattgtttaatcaaaggaagagtcaaaataagctacacccagattactgagaaaggtgaaatgaaaacaagctcaaaaccaaattccaggaagatgctgtctttgtattgacttaccatttcatgttttcacacatgtcaaagtcttgaagcttcggtcattagtcttccgcttcctaaagcaagaaactaaatgctgacttgtgtcgtttgccccagatgccaccggaaatgtcatcttctccccagacgctggcttgcaagcacagcagcacccagaggctaacctatttcccctatagcccaagctctgagatctcccgtctggtcacaatgatctacaggagaggaagaaagctatctagggacgagatctagaatcaactgagagagatgcttaaaaatcaccagttactttaatgaccatccgcagagccatcctgtgcaaaggaaggagctaggctgtgcgccctgggcgtcatgatccttctgcgggcctccgaagtgcggcagctgcttcacaataagttcgtggtcatcctgggggactctgtgcatagggcagtatacaaggacctggtgcttctgctgcagaaggaccgcctgctcactcccgggcagcttagagcaaggggggagctgaacttcgaacaagatgagctggtggacggaggccagcggggccacatgcacaacggccttaactaccgtgaggtccgcgagttccgctccgaccaccatctggtacgtttttacttcctcacccgcgtgtactccgattacctccagaccatcttgaaagagctgcagtcgggcgagcacgcccccgacctggtcatcatgaattcctgcctctgggacatctccaggtatggtccgaactcctggagaagctacctggagaacctggagaacctgttccagtgcctgggccaggtgctgcccgagtcttgcctcctggtgtggaacacggccatgcctgtgggcgaggaagtcaccgggggttttcttccgcccaagctccggcggcagaaggccaccttcctgaaaaacgaagtggtcaaagccaacttccacagcgccaccgaggcacgtaaacataacttcgatgtactggacttgcatttccacttccgccacgcgagggagaacctgcactgggacggggtgcactggaatggacgtgtgcaccgctgcctctcccagctgctgctggcccacgtggccgacgcctggggtgtggagctgccccaccgccaccccgtgggcgagtggatcaagaagaaaaaacctggcccgagagtcgaagggccgccccaggccaacagaaatcacccggccttacctctgtccccacccttaccttcccccacataccgccccctgcttgggttcccaccccagcgcttgccgctgctcccgctcctgtccccacagcctcctcctcccattctccatcaccagggaatgccccggttcccacagggtcccccagatgcctgtttttcctcagaccatactttccagtcggatcaattctattgccattcagatgtcccctcatcagcccatgcaggtttcttcgtcgaagacaattttatggttggtcctcagctgcctatgcccttcttccccacaccccgttatcagcggcctgccccagtggtacataggggttttggcaggtatcgtccccgtggcccctatacgccctggggacagcggcctcgaccttcaaagagaagggccccagccaatcctgagccaaggcctcaatagacggacctaggccttatttcctctttatgaacatggattggacagatctgacacttcctttccattgcttggcctgaacagactgaccttgttaacttaagcctggagtccatgcctcgtcttccttttgttcattgctgttaccaagaaagccaaggaagagcagcctgactcattcttcttggctgcagcctcttccccacttcctgggagtgacccagcgttattcctgcctcctcactcctattctctttgcctttgtgtaaaaataaaatggaaataaacaagttgcacagaa

SEQ ID NO: 99768 - DNA, 796 bp, Artificial Sequence
  derived and/or modified sequence
caatgatctacaggagaggaagaaagctatctagggacgagatctagaatcaactgagagagatgcttaaaaatcaccagttactttaatgacaagaaactagaatgtgtttaatgctaaaaagaaggatccaggccaaggagggtaaagaaaatgcagaatgcaaattatcccctcactgggggatatccgggagcgaagtccctgagctgctgaggaagctttacgcctaaggagccatccgcagagccatcctgtgcaaaggaaggagctaggctgtgcgccctgggcgtcatgatccttctgcgggcctccgaagtgcggcagctgcttcacaataagttcgtggtcatcctgggggactctgtgcatagggcagtatacaaggacctggtgcttctgctgcagaaggaccgcctgctcactcccgggcagcttagagcaaggggggagctgaacttcgaacaagatgagctggtggacggaggccagcggggccacatgcacaacggccttaactaccgtgaggtccgcgagttccgctccgaccaccatctggtacgtttttacttcctcacccgcgtgtactccgattacctccagaccatcttgaaagagctgcagtcgggcgagcacgcccccgacctggtcatcatgaattcctgcctctgggacatctccaggtatggtccgaactcctggagaagctacctggagaacctggagaacctgttccagtgcctgggccaggtgctgcccgagtcttgcctcctggtgtggaacacggccatgcctg

SEQ ID NO: 99769 - DNA, 732 bp, Artificial Sequence
  derived and/or modified sequence
caaagatgtttcctttctttttcaaagcaagaaactagaatgtgtttaatgctaaaaagaaggatccaggccaaggagggtaaagaaaatgcagaatgcaaattatcccctcactgggggatatccgggagcgaagtccctgagctgctgaggaagctttacgcctaaggagccatccgcagagccatcctgtgcaaaggaaggagctaggctgtgcgccctgggcgtcatgatccttctgcgggcctccgaagtgcggcagctgcttcacaataagttcgtggtcatcctgggggactctgtgcatagggcagtatacaaggacctggtgcttctgctgcagaaggaccgcctgctcactcccgggcagcttagagcaaggggggagctgaacttcgaacaagatgagctggtggacggaggccagcggggccacatgcacaacggccttaactaccgtgaggtccgcgagttccgctccgaccaccatctggtacgtttttacttcctcacccgcgtgtactccgattacctccagaccatcttgaaagagctgcagtcgggcgagcacgcccccgacctggtcatcatgaattcctgcctctgggacatctccaggtatggtccgaactcctggagaagctacctggagaacctggagaacctgttccagtgcctgggccaggtgctgcccgagtcttgcctcctggtgtggaacacggccatgcctgt

SEQ ID NO: 99770 - DNA, 476 bp, Artificial Sequence
  derived and/or modified sequence
tttaatgctaaaaagaaggatccaggccaaggagggtaaagaaaatgcagaatgcaaattatcccctcactgggggatatccgggagcgaagtccctgagctgctgaggaagctttacgcctaaggagaagaggaaactggttcagaactgtgggcagccagcccaagagcacgcagctgtccaggggcagagtccacgtctggcttctttgtctggagttgaaagccagatcaccaccttctgccatccgcagagccatcctgtgcaaaggaaggagctaggctgtgcgccctgggcgtcatgatccttctgcgggcctccgaagtgcggcagctgcttcacaataagttcgtggtcatcctgggggactctgtgcatagggcagtatacaaggacctggtgcttctgctgcagaaggaccgcctgctcactcccgggcagcttagagcaaggggggagctgaacttcgaacaag

SEQ ID NO: 99771 - DNA, 840 bp, Artificial Sequence
  derived and/or modified sequence
atgaacagctgcctgtgggacatcagccgctatggccccaacagctggaggagctacctggagaacctggagaacctcttccagtgcctgggccaggtgctgcctgagagctgcctgctggtgtggaacacagccatgcctgtgggggaggaggtgactggaggcttcctgccccccaagctgcggcggcagaaggccaccttcctgaagaatgaggtggtgaaggccaacttccacagcgccacagaggccaggaagcacaactttgatgtgctggacctgcacttccacttcagacatgcccgggagaacctgcactgggatggagtgcactggaatggccgggtgcaccgctgcctgagccagctgctgctggcccacgtggctgatgcctggggcgtggagctgccccaccgccaccctgtgggggagtggatcaagaagaagaagccaggcccccgggtggagggccccccccaggccaacagaaaccacccagccctgcccctgagcccccccctgcccagccccacctaccggcccctgctgggcttccccccccagaccatcctgagcagccgcatcaacagcatcgccatccagatgagcccccaccagcccatgcaggtgagcagcagcaagaccatcctgtggctggtgctgagctgcctgtgccccagcagcccccaccctgtgatcagcggcctgccccagtggtacatcggcgtgctggccggcatcgtgcctgtggcccccatccggcctggggacagcggcctggacctgcagcgggagggcccccagcccatcctgagccagggcctgaacagaagaacatag

SEQ ID NO: 99772 - DNA, 1299 bp, Artificial Sequence
  derived and/or modified sequence
atgatcctgctgcgggccagcgaggtgcggcagctgctgcacaacaagtttgtggtgatcctgggggacagcgtgcacagagctgtgtacaaggacctggtgctgctgctgcagaaggaccggctgctgaccccaggccagctgcgggcccggggggagctgaactttgagcaggatgagctggtggatggcggccagaggggccacatgcacaacggcctgaactaccgggaggtgcgggagttcagaagtgaccaccacctggtgcgcttctacttcctgaccagggtgtacagcgactacctgcagaccatcctgaaggagctgcagagcggggagcacgccccagacctggtgatcatgaacagctgcctgtgggacatcagccgctatggccccaacagctggaggagctacctggagaacctggagaacctcttccagtgcctgggccaggtgctgcctgagagctgcctgctggtgtggaacacagccatgcctgtgggggaggaggtgactggaggcttcctgccccccaagctgcggcggcagaaggccaccttcctgaagaatgaggtggtgaaggccaacttccacagcgccacagaggccaggaagcacaactttgatgtgctggacctgcacttccacttcagacatgcccgggagaacctgcactgggatggagtgcactggaatggccgggtgcaccgctgcctgagccagctgctgctggcccacgtggctgatgcctggggcgtggagctgccccaccgccaccctgtgggggagtggatcaagaagaagaagccaggcccccgggtggagggccccccccaggccaacagaaaccacccagccctgcccctgagcccccccctgcccagccccacctaccggcccctgctgggcttccccccccagaggctgcccctgctgcccctgctgagcccccagcccccaccacccatcctgcaccaccagggcatgccccgcttcccccagggccccccagatgcctgcttcagcagtgaccacaccttccagagcgaccagttctactgccacagtgatgtgcccagcagcgcccatgctggcttctttgtggaggacaacttcatggtgggcccccagctgcccatgcccttcttccccaccccccgctaccagaggcctgcccctgtggtgcaccggggcttcggccgctaccggccccggggcccctacaccccctggggccagaggccccggcccagcaagagaagagccccagccaaccctgagccccggccccagtag

SEQ ID NO: 99773 - DNA, 504 bp, Artificial Sequence
  derived and/or modified sequence
atgatcctgctgcgggccagcgaggtgcggcagctgctgcacaacaagtttgtggtgatcctgggggacagcgtgcacagagctgtgtacaaggacctggtgctgctgctgcagaaggaccggctgctgaccccaggccagctgcgggcccggggggagctgaactttgagcaggatgagctggtggatggcggccagaggggccacatgcacaacggcctgaactaccgggaggtgcgggagttcagaagtgaccaccacctggtgcgcttctacttcctgaccagggtgtacagcgactacctgcagaccatcctgaaggagctgcagagcggggagcacgccccagacctggtgatcatgaacagctgcctgtgggacatcagccgctatggccccaacagctggaggagctacctggagaacctggagaacctcttccagtgcctgggccaggtgctgcctgagagctgcctgctggtgtggaacacagccatgccctag

SEQ ID NO: 99774 - DNA, 507 bp, Artificial Sequence
  derived and/or modified sequence
atgatcctgctgcgggccagcgaggtgcggcagctgctgcacaacaagtttgtggtgatcctgggggacagcgtgcacagagctgtgtacaaggacctggtgctgctgctgcagaaggaccggctgctgaccccaggccagctgcgggcccggggggagctgaactttgagcaggatgagctggtggatggcggccagaggggccacatgcacaacggcctgaactaccgggaggtgcgggagttcagaagtgaccaccacctggtgcgcttctacttcctgaccagggtgtacagcgactacctgcagaccatcctgaaggagctgcagagcggggagcacgccccagacctggtgatcatgaacagctgcctgtgggacatcagccgctatggccccaacagctggaggagctacctggagaacctggagaacctcttccagtgcctgggccaggtgctgcctgagagctgcctgctggtgtggaacacagccatgcctgtgtag

SEQ ID NO: 99775 - DNA, 177 bp, Artificial Sequence
  derived and/or modified sequence
atgatcctgctgcgggccagcgaggtgcggcagctgctgcacaacaagtttgtggtgatcctgggggacagcgtgcacagagctgtgtacaaggacctggtgctgctgctgcagaaggaccggctgctgaccccaggccagctgcgggcccggggggagctgaactttgagcagtag

SEQ ID NO: 99776 - DNA, 840 bp, Artificial Sequence
  derived and/or modified sequence
atgaacagctgcctgtgggacatcagccggtacggccccaacagctggaggtcatatctggaaaacttggagaacttattccaatgcttaggacaggttctgcctgaatcgtgcctattagtgtggaacacagcgatgcccgtgggggaggaggtcaccggaggtttcttgccccccaaactgcggcgccaaaaggctaccttcttaaaaaatgaagtcgtgaaggcaaactttcattccgccacggaggcaagaaaacacaacttcgacgtactggatcttcattttcacttccgtcacgcgagagagaacctgcattgggatggtgtccactggaacggacgagtgcatcggtgcctgtcccagttattgctggcccatgttgccgatgcatggggcgtagagctgcctcaccggcatcctgttggggagtggataaagaaaaagaaaccaggcccacgcgtcgagggccccccacaagcgaatcgtaaccatcctgccctccctctgtcccccccccttccatcgccgacatatcgaccgctgctgggatttccaccacagaccatcctaagctctcgaataaactctatcgcgatccagatgagcccccaccaacctatgcaggtgtcaagttccaaaaccattctatggttggtcctgtcctgtctgtgcccaagctcaccgcacccagtcatttctggactccctcaatggtatattggggtgctggcaggcattgtacccgtggctccgattaggcccggtgattctggtcttgaccttcagcgtgaagggcctcaaccaatcttgagtcaggggctaaaccgcaggacatag

SEQ ID NO: 99777 - DNA, 1299 bp, Artificial Sequence
  derived and/or modified sequence
atgatcctgctgcgggccagcgaggtgcggcagctgctgcacaacaaattcgttgtcatccttggcgacagcgtacaccgggcagtgtacaaagacctggttcttctcctccagaaagacaggcttctaacaccagggcagctgagggcaagaggggaactgaacttcgagcaggacgagttggtggacggcgggcaaagagggcacatgcacaatggcctgaactatcgtgaggtgcgtgagtttcggtctgaccatcacttggtcaggttctacttcctgaccagggtctactcagattacttacaaacaattttgaaagaactgcagtccggagaacacgcccccgacttggtgattatgaactcctgcctgtgggatatttcccgttacggcccgaactcttggcggtcctacctggagaatctcgagaacttgttccagtgtttgggccaggtcctgcccgagagttgcctccttgtgtggaatactgcaatgcctgtcggtgaagaggtcaccgggggttttctgccaccaaagttgcggcggcagaaagcaaccttcctcaagaatgaagtagtaaaagctaactttcactcggcaaccgaagcacgaaagcataacttcgacgtcctggacctccacttccattttagacatgctcgcgagaatctccactgggatggggttcactggaacggtcgggtgcaccgctgcctcagccagctactcctcgcacacgtcgccgatgcctggggagtcgagttgccccataggcatcctgttggggaatggattaaaaaaaagaaacccgggcccagagtggaaggtccaccacaggccaaccggaatcatccagctctgcccctcagcccgccactgccctcacctacttacagaccccttctaggatttccgccgcaacgcctcccacttcttccgttactgtccccccagccccctccgccgatccttcaccaccagggtatgccgaggtttccccagggcccaccggacgcttgtttcagttctgatcataccttccagtcagaccagttctattgtcacagcgacgttccatcaagcgctcatgccgggttttttgtggaggacaattttatggtgggaccgcagcttcctatgccctttttccccacccctcgataccagagacctgcccctgtggtgcataggggattcgggcgttatagaccccgtggtccctacacaccatggggccagcgccccaggcccagcaagcgaagagcacctgctaatcctgagcctcggccgcaatag

SEQ ID NO: 99778 - DNA, 1299 bp, Artificial Sequence
  derived and/or modified sequence
atgatcctgctgcgggccagcgaggtgcggcagctgctgcacaacaaattcgtcgtcatcctgggtgattccgtgcatcgcgctgtatacaaggatctagtgcttctcctgcagaaagatcgactactcaccccgggccaactccgggctcgcggagaactgaactttgagcaggacgaattagtagacgggggccaacggggacacatgcacaacggactcaactatagggaggttcgcgagttccgcagcgatcaccatctagtccgcttctacttcttgacccgtgtgtactccgattacctccagaccattctgaaagagctccaatcaggtgagcacgctcctgaccttgtgattatgaactcctgtctttgggacattagcagatacggaccaaacagctggcggtcatatctcgaaaatctcgaaaacctgttccagtgtttgggccaggttctgcccgagtcatgtttactcgtctggaacaccgctatgcccgttggggaggaggttacaggaggattcctgccacctaagttgcggagacaaaaagccacatttctgaagaatgaagtcgtgaaagccaatttccacagcgcaacagaagcccgtaagcacaactttgacgttctggacctacacttccactttcgacatgcacgggaaaacctccactgggatggagtgcattggaacggacgtgtgcaccgctgcctttcccaattgctgttggcccacgttgcagatgcttggggagtagagttgccacatcgccaccctgtgggggaatggataaagaaaaagaagcccggcccccgcgtagagggcccacctcaggcgaacagaaaccatcccgctcttcccctcagcccacctctgcccagcccaacctacaggcctttgctgggttttccaccccaacgtctgcctctcctgccactgctgagcccacaacctccccctcctatcctccatcaccagggcatgcctaggtttccccaagggcctcctgacgcatgcttcagtagtgatcacacctttcaatcagatcagttctactgtcattcggacgttccaagttcagcccatgcggggtttttcgttgaagataactttatggttggtccccaactgcccatgcccttctttccaacacctcgttaccaacgaccggcgcccgtggtgcatcgggggttcggcaggtacagaccgagaggcccctacacaccatggggacaaagaccacggccatccaagcggcgcgccccagctaatccagagccaaggccacaatag

SEQ ID NO: 99779 - DNA, 504 bp, Artificial Sequence
  derived and/or modified sequence
atgatcctgctgcgggccagcgaggtgcggcagctgctgcacaacaagttcgtggtgatcctaggggatagcgtacacagagccgtgtacaaagacctcgtgctgctcttgcagaaagacaggctcctgacccccgggcagctgcgggcccgtggtgaacttaattttgaacaggatgagctagtggatgggggtcagcggggccacatgcacaatggactgaattatcgggaagtgagagagttcagaagcgaccaccaccttgtgaggttttactttttaacccgagtttattccgactacctgcaaacgatcctgaaggaactgcaatccggggaacacgcaccggatctggtgattatgaactcatgtctctgggacatcagtcggtacgggcctaatagctggaggtcctatctcgagaacctggaaaacctgtttcagtgtttgggacaggtattgcctgaaagctgcctcctggtttggaataccgcgatgccatag

SEQ ID NO: 99780 - DNA, 507 bp, Artificial Sequence
  derived and/or modified sequence
atgatcctgctgcgggccagcgaggtgcggcagctgctgcacaacaaattcgtggtgatattaggagacagtgtacacagggcagtgtacaaagacctggtgcttttgctacagaaggaccggctcttaacacccggtcagcttcgcgcccggggggagcttaactttgagcaggatgagctagtggacggtggccagcgtggacatatgcacaacggtttgaattatcgagaggtgcgcgagttccggtctgatcaccacttagtgcgtttctactttctcacaagagtttacagtgattatctccaaacaattctgaaggagctccagagcggcgaacacgcccctgacttggtgattatgaactcctgtctttgggacatctcacgttacgggcccaactcctggcgctcctacttggaaaacctcgaaaatctgtttcagtgcttgggacaggtgctccccgaaagctgtttactggtctggaataccgcgatgcctgtgtag

SEQ ID NO: 99781 - DNA, 177 bp, Artificial Sequence
  derived and/or modified sequence
atgatcctgctgcgggccagcgaggtgcggcagctgctgcacaacaaattcgtcgtgatcttgggtgatagcgtgcacagggcagtttataaggatctggtccttctgctgcagaaggacaggttgctcactccgggccagttgagggcccgaggcgagctgaattttgaacagtag

SEQ ID NO: 99782 - DNA, 840 bp, Artificial Sequence
  derived and/or modified sequence
atgaattcttgtctgtgggatataagcagatatgggccaaatagctggagatcttacttagagaatctggagaatctgttccagtgccttgggcaggtcttgcccgagtcatgcctcttggtgtggaataccgctatgccggttggggaagaagtgacaggaggatttcttccgccaaaactcagaaggcagaaagcaacctttctgaagaacgaggtggtaaaggcaaattttcacagcgccacggaggctagaaaacataactttgacgtcctggacctccatttccactttcgccatgcgagagagaaccttcattgggatggcgtccactggaatggaagagttcatcggtgcctgtcccaactgcttctggcccatgtggcagatgcatggggagtagagctaccccatcggcaccccgtgggagagtggatcaagaaaaagaagccagggccacgcgtcgagggcccaccacaggccaaccggaaccacccagctttaccactgtcacccccactacccagtcccacctaccggccattattggggttcccgccacaaacgatcctcagttctcgcatcaatagtatagctatccagatgtccccccaccagcctatgcaggtatccagttcgaaaacgattctctggctagtgctcagctgtctctgtcctagtagcccgcaccccgtgatctcgggacttccccagtggtatatcggggtgctcgcaggtattgttcctgtcgctcctatccgcccaggcgattctgggcttgacctgcaaagagagggtccgcagcccatcctcagccagggactgaacaggaggacatag

SEQ ID NO: 99783 - DNA, 1299 bp, Artificial Sequence
  derived and/or modified sequence
atgatactactgcgagcgtctgaagtaaggcagctactgcacaacaaattcgtggtaatactaggtgacagcgtgcaccgcgcagtgtataaagatcttgtgttgctgctgcagaaagacaggctgttaactcctggtcagttgagagcacgcggagaattaaactttgagcaagatgagctggtggatggcggacaaaggggtcacatgcataatggcctcaactatagggaagtgcgggaattccgcagtgatcatcacctggtccggttctacttcctaacccgagtatattccgactatttacagacaatacttaaggagctgcagtctggcgagcatgcccctgatctggtgattatgaacagctgcctgtgggacatttcacgctatggtcccaattcttggcggtcctatttagaaaacttggagaacctcttccaatgccttgggcaggtgcttcctgagtcttgcctgctggtgtggaataccgctatgcctgtgggagaggaggtgaccggtggattcctgccaccaaagctgcgacgccagaaggccaccttccttaagaatgaggttgtcaaagccaactttcatagcgcaaccgaagcacggaagcataactttgacgtccttgatctccactttcatttccgccatgctcgggaaaacctccactgggacggcgtgcattggaatggtagagtgcatagatgtctttctcagctcttgcttgcgcatgtcgccgatgcctggggggtagagctcccccatcgccatcccgtgggggaatggatcaagaaaaagaagcccggaccccgagtagagggcccaccacaggcgaacaggaatcaccccgcactacccctgtcacccccactgccctcccctacctaccgacccctgctaggttttccaccacagaggctcccactgttgcccctgctgagtccacagccaccacctcccatccttcaccatcagggcatgcccagattcccccaaggtccacctgatgcttgcttttcaagcgaccatacgtttcagtctgaccagttctactgtcactcagacgtgccctcttcggctcacgccggattcttcgtcgaggacaattttatggtaggcccacagctgcccatgccgttctttccaacgccacgataccagaggccggctcccgttgtgcatcgcggttttgggaggtaccgccctagggggccatatacgccttggggacagcggccacggccttccaagaggcgcgcaccagccaaccccgaaccccgaccacagtag

SEQ ID NO: 99784 - DNA, 1299 bp, Artificial Sequence
  derived and/or modified sequence
atgatacttctgcgggcatcagaggtgcgccagcttttgcacaataagttcgtggtgatcctgggcgacagcgtgcatcgcgctgtatataaggacctcgtcctccttcttcagaaggataggctactcaccccaggacagctcagggctcggggagagctcaatttcgaacaagacgagttagtggatggtgggcagcgaggccacatgcacaacggtttaaactaccgcgaagtgagagaatttcgctccgaccaccatctggtgcgcttctactttctgactagggtctacagtgattacctccagaccatcctcaaggaactccagtcaggagaacacgccccagacttagttataatgaatagctgcctgtgggatatcagccgctacggtccgaacagctggcggtcctatctcgagaatctggagaatctgttccagtgtctgggacaggtgttacccgaatcctgtctcctcgtgtggaatactgctatgcccgtgggggaagaagtcacgggtggattcctgccccctaagctccgaaggcagaaagcaacatttcttaagaatgaagtggttaaggcaaacttccacagcgccacagaggcaagaaaacacaatttcgatgttctggaccttcatttccacttccggcatgcacgggagaacttgcattgggacggtgtgcactggaacggcagagtgcatcgctgtctgtcacagctcttactggcccatgtggccgacgcctggggcgtagaactgccccatcgccatcccgttggagaatggatcaaaaagaaaaaaccagggcctcgggtggaggggcctccgcaggccaatcgtaaccaccctgccctgcctctcagcccccctctcccctctccaacatataggcctttactcggctttcctccacagcggctgccactgctgcccttattatccccacaacctcctccaccaattcttcatcaccagggaatgccacgtttcccccagggtccacccgacgcctgcttcagcagcgatcacaccttccagtcagatcagttttactgtcactcagacgtgccatcttccgctcatgctggattcttcgttgaggacaatttcatggtgggtccgcagcttccgatgcctttctttccgacccctaggtaccaacggccagcaccggtagtccaccgaggcttcggtcgctatcgcccaagaggcccttatacgccctggggtcaaaggccacggccaagcaaaagaagagcccctgccaatcccgagccgcgaccgcagtag

SEQ ID NO: 99785 - DNA, 504 bp, Artificial Sequence
  derived and/or modified sequence
atgatactgctgagagcctccgaagtgcgacagctgctgcataacaagtttgtcgtgatcctgggagacagcgtgcaccgcgctgtctataaggacctggttctgctgctccagaaagatagattgctgacaccaggacagctgagagcaagaggtgagctgaattttgagcaggacgaactggtagacggcggacagaggggacacatgcataacgggctgaactaccgggaggtgcgtgagtttagatctgaccatcacttggtgcgattttactttctaactcgagtctactctgactacctccaaactatactgaaagagctccagagcggagaacatgcacccgatctggtcatcatgaactcttgcctctgggacatttcccgatacggtcccaactcatggagatcctacctggagaatctggagaacctttttcagtgtcttgggcaggtccttcccgagagctgcttgttagtctggaacaccgctatgccttag

SEQ ID NO: 99786 - DNA, 507 bp, Artificial Sequence
  derived and/or modified sequence
atgatcctgctgagggcatccgaagtgagacagctgttgcataacaaattcgtagttattctgggcgattccgtccaccgcgctgtgtacaaagatttggtgctgctactgcagaaggacagactactgactcccggacagcttcgggctcggggtgaactaaactttgaacaggacgaactggttgatggaggacagcggggacacatgcacaatggccttaactacagggaagtcagggagtttcggagcgaccaccatctagttaggttctattttctgactcgcgtttattccgattatctccagaccattctgaaagaactgcaatcaggcgagcatgccccagacttggtgatcatgaactcatgcctctgggacatcagcaggtatggacctaattcttggagatcgtatctggagaacttggagaatctgtttcaatgtctgggacaagtgttaccagaatcctgcctccttgtttggaatacggctatgcctgtctag

SEQ ID NO: 99787 - DNA, 177 bp, Artificial Sequence
  derived and/or modified sequence
atgatcttgctacgggcatccgaagtccgccaactgctgcacaataaatttgtggtcattttgggggacagcgtgcacagggctgtgtacaaggatcttgtgctactgttgcagaaggaccggctgcttactcccggacagttgcgggcacgcggtgaattgaattttgaacaatag

SEQ ID NO: 99788 - protein, 410 aa, Artificial Sequence
  derived and/or modified sequence
MAAPSPSGGGGSGGGSGSGTPGPVGSPAPGHPAVSSMQGFQINFCEKAQSKRKALKLNFANPPFKSTARFTLNPNPTGVQNPHIERLRTHSIESSGKLKISPEQHWDFTAEDLKDLGEIGRGAYGSVNKMVHKPSGQIMAVKRIRSTVDEKEQKQLLMDLDVVMRSSDCPYIVQFYGALFREGDCWICMELMSTSFDKFYKYVYSVLDDVIPEEILGKITLATVKALNHLKENLKIIHRDIKPSNILLDRSGNIKLCDFGISGQLVDSIAKTRDAGCRPYMAPERIDPSASRQGYDVRSDVWSLGITLYELATGRFPYPKWNSVFDQLTQVVKGDPPQLSNSEEREFSPSFINFVNLCLTKDESKRPKYKELLKHPFILMYEERAVEVACYVCKILDQMPATPSSPMYVD

SEQ ID NO: 99789 - protein, 271 aa, Artificial Sequence
  derived and/or modified sequence
ICERIRSTVDEKEQKQLLMDLDVVMRSSDCPYIVQFYGALFREGDCWICMELMSTSFDKFYKYVYSVLDDVIPEEILGKITLATVKALNHLKENLKIIHRDIKPSNILLDRSGNIKLCDFGISGQLVDSIAKTRDAGCRPYMAPERIDPSASRQGYDVRSDVWSLGITLYELATGRFPYPKWNSVFDQLTQVVKGDPPQLSNSEEREFSPSFINFVNLCLTKDESKRPKYKELLKHPFILMYEERAVEVACYVCKILDQMPATPSSPMYVD

SEQ ID NO: 99790 - DNA, 1233 bp, Artificial Sequence
  derived and/or modified sequence
atggccgcccccagccccagcggcggcggcggcagcggcggcggcagcggcagcggcacccccggccccgtgggcagccccgcccccggccaccccgccgtgagcagcatgcagggcttccagatcaacttctgcgagaaggcccagagcaagagaaaggccctgaagctgaacttcgccaacccccccttcaagagcaccgccagattcaccctgaaccccaaccccaccggcgtgcagaacccccacatcgagagactgagaacccacagcatcgagagcagcggcaagctgaagatcagccccgagcagcactgggacttcaccgccgaggacctgaaggacctgggcgagatcggcagaggcgcctacggcagcgtgaacaagatggtgcacaagcccagcggccagatcatggccgtgaagagaatcagaagcaccgtggacgagaaggagcagaagcagctgctgatggacctggacgtggtgatgagaagcagcgactgcccctacatcgtgcagttctacggcgccctgttcagagagggcgactgctggatctgcatggagctgatgagcaccagcttcgacaagttctacaagtacgtgtacagcgtgctggacgacgtgatccccgaggagatcctgggcaagatcaccctggccaccgtgaaggccctgaaccacctgaaggagaacctgaagatcatccacagagacatcaagcccagcaacatcctgctggacagaagcggcaacatcaagctgtgcgacttcggcatcagcggccagctggtggacagcatcgccaagaccagagacgccggctgcagaccctacatggcccccgagagaatcgaccccagcgccagcagacagggctacgacgtgagaagcgacgtgtggagcctgggcatcaccctgtacgagctggccaccggcagattcccctaccccaagtggaacagcgtgttcgaccagctgacccaggtggtgaagggcgaccccccccagctgagcaacagcgaggagagagagttcagccccagcttcatcaacttcgtgaacctgtgcctgaccaaggacgagagcaagagacccaagtacaaggagctgctgaagcaccccttcatcctgatgtacgaggagagagccgtggaggtggcctgctacgtgtgcaagatcctggaccagatgcccgccacccccagcagccccatgtacgtggactag

SEQ ID NO: 99791 - DNA, 1233 bp, Artificial Sequence
  derived and/or modified sequence
atggccgcacccagcccttcaggaggtggaggcagcggcggaggatccgggagcggaacacctggccccgtgggctccccagctcccgggcaccctgccgtctcctctatgcagggattccagataaacttctgcgaaaaggcccagtcaaagcgaaaagccctcaagctaaactttgctaatcccccattcaagagcaccgccagatttactctgaaccctaatcctaccggtgtccagaatccacacatcgagagactccggactcacagcatagaaagtagtggaaagttaaagatttcacccgagcaacactgggattttaccgcagaagacctcaaggaccttggtgaaattggacggggcgcatacggcagtgtgaacaagatggtccataagccttctgggcaaattatggccgtgaagcgaatacgctcaactgtggatgagaaggagcaaaaacaactgttgatggatttagacgtggtgatgcgcagtagcgattgtccttacattgtgcagttctacggggcgctcttcagagagggcgactgttggatctgcatggagctaatgtctacttcctttgataaattttataaatacgtctacagcgtgctagatgacgtcatccccgaggagattctggggaagattacactggctacagttaaggccctcaaccacttgaaagaaaacctaaaaattatccacagggacattaagccttccaacattctactggatcgaagtggaaacattaaactttgcgatttcggcatatctggacagttggttgactctattgcaaaaactagggatgctggatgccggccatatatggcccccgagagaattgatccatctgcatcccgccagggctacgacgtgaggtcagacgtctggtccctcgggatcacactgtatgaactggctaccggtcgcttcccctaccccaagtggaacagcgtttttgatcaattgacccaggttgtcaagggagatccaccccagctgagcaacagcgaagaacgtgagttctctcccagttttatcaacttcgttaacctttgcttgacaaaggacgagtcaaagcgtcctaagtataaggagctgttgaagcacccatttatcctgatgtatgaggagagggcagtagaagtggcgtgctacgtatgtaagattctggatcagatgcctgccacaccatcaagcccgatgtacgtggattag

SEQ ID NO: 99792 - DNA, 1233 bp, Artificial Sequence
  derived and/or modified sequence
atggccgcccccagccccagcggcggcggcggcagcggcggcggcagcggcagcggcaccccaggccctgtgggcagccctgcccctggccaccctgctgtgtcctccatgcagggcttccagatcaacttctgtgagaaggcccagagcaagaggaaggccctgaagctgaactttgccaacccccccttcaagagcacagcccgcttcaccctgaaccccaaccccactggagtgcagaacccccacatcgagcggctgcggacccacagcattgagagcagcggcaagctgaagatcagccctgagcagcactgggacttcaccgctgaggacctgaaggacctgggggagatcggccgcggggcctacggctctgtgaacaagatggtgcacaagcccagcggccagatcatggctgtgaagaggatccgcagcacagtggatgagaaggagcagaagcagctgctgatggacctggatgtggtgatgaggagcagtgactgcccctacatcgtgcagttctacggggccctcttccgggagggggactgctggatctgcatggagctgatgagcaccagctttgacaagttctacaagtatgtgtacagcgtgctggatgatgtgattcctgaggagatcctgggcaagatcaccctggccaccgtgaaggccctgaaccacctgaaggagaacctgaagatcatccaccgggacatcaagcccagcaacatcctgctggacagaagtggcaacatcaagctgtgtgactttggcatcagcggccagctggtggacagcatcgccaagaccagagatgctggctgccggccctacatggcccctgagagaattgaccccagcgccagccggcagggctatgatgtgcggagtgatgtgtggagcctgggcatcaccctgtatgagctggccaccggccgcttcccctaccccaagtggaacagcgtgtttgaccagctgacccaggtggtgaagggggaccccccccagctgagcaacagcgaggagcgggagttcagccccagcttcatcaactttgtgaacctgtgcctgaccaaggatgagagcaagaggcccaagtacaaggagctgctgaagcaccccttcatcctgatgtatgaggagagagctgtggaggtggcctgctacgtgtgcaagatcctggaccagatgcctgccacccccagcagccccatgtatgtggactag

SEQ ID NO: 99793 - DNA, 1233 bp, Artificial Sequence
  derived and/or modified sequence
atggccgcccccagccccagcggcggcggcggcagcggcggcggcagcggttctggcacgccaggccctgtagggtcccctgctcccgggcacccagcggtcagcagtatgcaggggtttcagatcaacttctgtgagaaagcccagtccaagcgaaaggccctcaagctcaatttcgctaatcctcctttcaaaagtactgcccggtttaccctgaaccctaaccctacaggcgtgcagaacccacatatcgaacggctgaggacccattctatagaatcttccggcaaactcaagattagtcccgaacagcattgggattttaccgccgaggatctgaaggatttgggggagatcggacgcggtgcatacggcagcgttaacaagatggttcataagccctcggggcaaattatggcggttaagcgcattaggagtacagtggatgaaaaggagcagaagcagcttttaatggatctcgacgtcgtcatgcggtcatccgactgtccctacatcgttcaattttatggggctctgttccgagagggggattgctggatatgtatggaattgatgtccacatccttcgacaaattttataagtacgtctattccgtgctcgatgacgttatcccagaagagatcctcgggaagatcacgcttgccaccgtcaaggcacttaatcatctgaaagagaacttaaaaataatccatagggatattaagccgtctaatatccttctagatcggtccgggaacattaagctgtgcgacttcgggatctccggccagttagtagatagtattgccaaaacccgcgacgctgggtgcagaccctacatggctcccgaacgaatagatccgtccgcaagccgccagggatatgatgtcaggagcgacgtgtggtcactggggattaccctatacgagcttgctacaggccgcttcccgtaccccaagtggaattctgtgttcgatcagctgacccaggtcgtaaaaggcgaccctccccagttgtcaaactctgaagaaagggagttttctccttcttttataaattttgtgaacctgtgtctgacaaaagacgaatctaaacgacctaaatataaagaattgcttaaacatccgtttatcctgatgtacgaggagagggcggtcgaagtggcttgctatgtctgcaaaatcctggaccagatgccagccacacctagctcacccatgtatgtcgactag

SEQ ID NO: 99794 - DNA, 3772 bp, Artificial Sequence
  derived and/or modified sequence
ggccgtgcgagaggccgagcttgctgcattgcagccgccgcggcgccgctcggctcttcactcccaacaatggcggctccgagcccgagcggcggcggcggctccgggggcggcagcggcagcggcacccccggccccgtagggtccccggcgccaggccacccggccgtcagcagcatgcagggctttcagataaacttctgtgaaaaggcacaaagtaaacgcaaagcactgaagttgaattttgcaaatccacctttcaaatctacagcaaggtttactctgaatcccaatcctacaggagttcaaaacccacacatagagagactgagaacacacagcattgagtcatcaggaaaactgaagatctcccctgaacaacactgggatttcactgcagaggacttgaaagaccttggagaaattggacgaggagcttatggttctgtcaacaaaatggtccacaaaccaagtgggcaaataatggcagttaaaagaattcggtcaacagtggatgaaaaagaacaaaaacaacttcttatggatttggatgtagtaatgcggagtagtgattgcccatacattgttcagttttatggtgcactcttcagagagggtgactgttggatctgtatggaactcatgtctacctcgtttgataagttttacaaatatgtatatagtgtattagatgatgttattccagaagaaattttaggcaaaatcactttagcaactgtgaaagcactaaaccacttaaaagaaaacttgaaaattattcacagagatatcaaaccttccaatattcttctggacagaagtggaaatattaagctctgtgacttcggcatcagtggacagcttgtggactctattgccaagacaagagatgctggctgtaggccatacatggcacctgaaagaatagacccaagcgcatcacgacaaggatatgatgtccgctctgatgtctggagtttggggatcacattgtatgagttggccacaggccgatttccttatccaaagtggaatagtgtatttgatcaactaacacaagtcgtgaaaggagatcctccgcagctgagtaattctgaggaaagggaattctccccgagtttcatcaactttgtcaacttgtgccttacgaaggatgaatccaaaaggccaaagtataaagagcttctgaaacatccctttattttgatgtatgaagaacgtgccgttgaggtcgcatgctatgtttgtaaaatcctggatcaaatgccagctactcccagctctcccatgtatgtcgattgatatcgctgctacatcagactctagaaaaaagggctgagaggaagcaagacgtaaagaattttcatcccgtatcacagtgtttttattgctcgcccagacaccatgtgcaataagattggtgttcgtttccatcatgtctgtatactcctgtcacctagaacgtgcatccttgtaatacctgattgatcacacagtgttagtgctggtcagagagacctcatcctgctcttttgtgatgaacatattcatgaaatgtggaagtcagtacgatcaagttgttgactgtgattagatcacatcttaaattcatttctagactcaaaacctggagatgcagctactggaatggtgttttgtcagacttccaaatcctggaaggacacagtgatgaatgtactatgtctgaacatagaaactcgggcttgagtgagaagagcttgcacagccaacgagacacattgccttctggagctgggagacaaaggaggaatttactttcttcaccaagtgcaatagattactgatgtgatattctgttgctttacagttacagttgatgtttggggatcgatgtgctcagccaaatttcctgtttgaaatatcatgttaaattagaatgaatttatctttaccaaaaaccatgttgcgttcaaagaggtgaacattaaaatatagagacaggacagaatgtgttcttttctcctttaccagtcctatttttcaatgggaagactcaggagtctgccacttgtcaaagaaggtgctgatcctaagaatttttcattctcagaattcggtgtgctgccaacttgatgttccacctgccacaaaccaccaggactgaaagaagaaaacagtacagaaggcaaagtttacagatgtttttaattctagtattttatctggaacaacttgtagcagctatatatttccccttggtcccaagcctgatactttagccatcataactcactaacagggagaagtagctagtagcaatgtgccttgattgattagataaagatttctagtaggcagcaaaagaccaaatctcagttgtttgcttcttgccatcactggtccaggtcttcagtttccgaatctctttcccttcccctgtggtctattgtcgctatgtgacttgcgcttaatccaatattttgccttttttctatatcaaaaaacctttacagttagcagggatgttccttaccaaggatttttagccccaaatctctcatattcgctagtgtttaaaaggctaagaatagtggggcccagccgatgtggtaggtgataaagaggcatcttttctagagacacattggaccagatgaggatccgaaacggcagcctttacgttcatcacctgctagaacctctcgtagtccatcaccatttcttggcattggaattctactggaaaaaaatacaaaaagcaaaacaaaaccctcagcactgttacaagaggccatttaagtatcttgtgcttcttcacttacccattagccaggttctcattaggttttgcttgggcctccctggcactgaaccttaggctttgtatgacagtgaagcagcactgtgagtggttcaagcacactggaatataaaacagtcatggcctgagatgcaggtgatgccattacagaaccaaatcgtggcacgtattgctgtgtctcctctcagagtgacagtcataaatactgtcaaacaataaagggagaatggtgctgtttaaagtcacatccctgtaaattgcagaattcaaaagtgattatctctttgatctacttgcctcatttccctatcttctcccccacggtatcctaaactttagacttcccactgttctgaaaggagacattgctctatgtctgccttcgaccacagcaagccatcatcctccattgctcccggggactcaagaggaatctgtttctctgctgtcaacttcccatctggctcagcatagggtcactttgccattatgcaaatggagataaaagcaattctgactgtccaggagctaatctgaccgttctattgtgtggatgaccacataagaaggcaattttagtgtattaatcatagattattataaactataaacttaagggcaaggagtttattacaatgtatctttattaaaacaaaagggtgtatagtgttcacaaactgtgaaaatagtgtaagaactgtacattgtgagctctggttatttttctcttgtaccatagaaaaatgtataaaaattatcaaaaagctaatgtgcagggatattgccttatttgtctgtaaaaaatggagctcagtaacataactgcttcttggagctttggaatattttatcctgtattcttgtttgaattcctcctctatttaagatatatacatggaatcgaagtgtttatgtaatagttctatccttttgcctgcaggtcagttgtaataaatctaggatgtgatg

SEQ ID NO: 99795 - DNA, 1233 bp, Artificial Sequence
  derived and/or modified sequence
atggcagccccttctccctccggcggtggaggcagtgggggaggctctggatcaggaactcccggacctgtcggttccccggcacccggacacccggcagtaagtagtatgcaggggtttcagattaacttctgtgagaaggctcaatccaagaggaaggctttaaagttaaatttcgcaaacccaccttttaagagcaccgctagattcacacttaatccgaacccaacaggggtacaaaacccacatatagaacgcctaaggacacatagcatagagtccagcggtaagctgaaaattagccctgagcagcactgggactttacggccgaggatcttaaggacctgggggagatcggacgtggggcttatggcagtgtcaacaaaatggtccataagccttccgggcagatcatggctgtgaaaaggattcggagtacagttgatgaaaaagaacagaaacagcttctcatggacctcgacgtagtcatgcgttcatctgactgtccatatatagtccaattttatggagcccttttccgcgaaggagattgttggatctgtatggagttgatgtccacctcatttgataagttttataagtacgtttatagtgtactggacgatgtcatccccgaagagatcctgggtaaaattaccctcgctacggtgaaggcactcaatcaccttaaagaaaatctgaaaattatccaccgtgacattaaaccgtccaacatcttactcgaccggtcaggcaatatcaaactgtgtgactttgggatctcaggacagctggttgacagcatcgccaagaccagagacgccggatgccgcccttatatggcaccagaacgtattgatccaagcgcttcacgtcagggttatgacgtgaggagcgatgtgtggtccctgggcatcactctgtatgaactggccaccggtaggtttccttacccgaaatggaattccgtctttgaccagctgactcaagtggtgaagggtgatcctccacagttaagcaattctgaagaacgcgaattctcacctagcttcattaatttcgtcaacctttgtctaacaaaggacgagagcaaacgacctaagtacaaagagctcctcaagcatccattcatcttaatgtacgaagagcgagcggtcgaggttgcctgttacgtctgtaaaattctcgaccagatgccagccaccccctcaagccccatgtacgtggattag

SEQ ID NO: 99796 - protein, 436 aa, Artificial Sequence
  derived and/or modified sequence
MATRSCREKAQKLNEQHQLILSKLLREEDNKYCADCEAKGPRWASWNIGVFICIRCAGIHRNLGVHISRVKSVNLDQWTAEQIQCMQDMGNTKARLLYEANLPENFRRPQTDQAVEFFIRDKYEKKKYYDKNAIAITNKEKEKKKEEKKREKEPEKPAKPLTAEKLQKKDQQLEPKKSTSPKKAAEPTVDLLGLDGPAVAPVTNGNTTVPPLNDDLDIFGPMISNPLPATVMPPAQGTPSAPAAATLSTVTSGDLDLFTEQTTKSEEVAKKQLSKDSILSLYGTGTIQQQSTPGVFMGPTNIPFTSQAPAAFQGFPSMGVPVPAAPGLIGNVMGQSPSMMVGMPMPNGFMGNAQTGVMPLPQNVVGPQGGMVGQMGAPQSKFGLPQAQQPQWSLSQIMQKGDAVLQHSISAIYWPMTRWLKCPLVDESADGWHEYQ

SEQ ID NO: 99797 - DNA, 1311 bp, Artificial Sequence
  derived and/or modified sequence
atggcaacaaggagctgtagggagaaggctcagaaacttaatgaacagcaccagctgatcctgtctaagctccttagagaggaagataataagtattgcgctgactgcgaggccaagggtcctcgatgggcatcttggaacattggggtattcatatgcatacgatgtgcaggcattcatcgaaatttgggagtccatatttcgcgagttaaatccgtaaatctcgaccagtggactgccgagcagattcagtgcatgcaggatatgggtaacactaaggctcgattgctttatgaggccaaccttccagaaaatttccgaaggcctcaaaccgaccaggccgtagagttctttatcagggacaagtatgaaaagaaaaaatactacgataaaaacgcaatagctatcaccaacaaggaaaaagaaaaaaagaaagaggagaagaagcgcgagaaagaacctgaaaagcccgccaagcccctgacagccgaaaaactccaaaagaaggaccagcagctcgagcccaaaaagtcaacttcccccaaaaaggctgcagaaccaaccgttgacctcctaggtttggatggccccgccgttgcccctgtcaccaacggcaacacaacggtcccacctctgaacgacgatctcgatatattcgggcctatgatctctaaccctctgcccgcaacggttatgccccctgctcaagggacacctagtgccccggcagcagccacgttgtcaactgtcacctccggagatctcgacttattcactgagcagactactaaatccgaggaggtggccaagaaacaactgtccaaggatagcatactctcactctacgggactggaacaatccagcagcagtccactcccggcgtcttcatgggtccaaccaacatcccattcacgtcccaagccccagcagcttttcagggatttccttctatgggggttccagtgccggccgcccccggcctcataggtaacgttatgggtcagtcccccagcatgatggtcggaatgccgatgccgaatgggttcatgggtaatgcccagaccggagtgatgccgttaccacagaacgtggtcgggccccagggcgggatggtgggccagatgggggcacctcagtccaagtttggccttccccaggcccagcagccacagtggagcctctcacagatcatgcagaaaggcgacgctgttctgcagcactcaatctctgccatttattggcctatgactagatggctgaaatgtccactggtcgacgaatcggccgatggttggcacgaatatcaatag

SEQ ID NO: 99798 - DNA, 1311 bp, Artificial Sequence
  derived and/or modified sequence
atggccaccaggagctgccgggagaaggcccagaagctgaatgagcagcaccagctgatcctgagcaagctgctgcgggaggaggacaacaagtactgtgccgactgtgaggccaagggcccccgctgggcctcctggaacatcggggtcttcatctgcatccgctgtgccggcatccacaggaacctgggcgtgcacatcagccgggtgaagtctgtgaacctggaccagtggacagctgagcagatccagtgcatgcaggacatgggcaacaccaaggcccggctgctgtatgaggccaacctgcctgagaacttcagaagaccccagacagaccaggccgtggagttcttcatccgggacaagtatgagaagaagaagtactatgacaagaatgccatcgccatcaccaacaaggagaaggagaagaagaaggaggagaagaagcgggagaaggagcctgagaagccagccaagcccctgacagctgagaagctgcagaagaaggaccagcagctggagcccaagaagagcaccagccccaagaaggctgctgagcccaccgtggacctgctgggcctggatggccctgctgtggcccctgtgaccaacggcaacaccaccgtgccccccctgaatgatgacctggacatcttcggccccatgatcagcaaccccctgcctgccaccgtgatgcccccagcccagggcacccccagcgccccagctgctgccaccctgagcacagtgaccagcggggacctggacctcttcacagagcagaccaccaagtctgaggaggtggccaagaagcagctgagcaaggacagcatcctgagcctgtatggcaccggcaccatccagcagcagagcaccccaggagtcttcatgggccccaccaacatccccttcaccagccaggccccagctgccttccagggcttccccagcatgggcgtgcctgtgcctgctgcccctggcctgattggaaatgtgatgggccagagccccagcatgatggtgggcatgcccatgcccaacggcttcatgggaaatgcccagacaggagtgatgcccctgccccagaatgtggtgggcccccagggcggcatggtgggccagatgggcgccccccagagcaagtttggcctgccccaggcccagcagccccagtggagcctgagccagatcatgcagaagggagatgctgtgctgcagcacagcatcagcgccatctactggcccatgacccgctggctgaagtgccccctggtggatgagagcgcagatggctggcatgagtaccagtag

SEQ ID NO: 99799 - DNA, 1311 bp, Artificial Sequence
  derived and/or modified sequence
atggccacccggagctgccgggagaaggcccagaagctgaacgagcagcatcagctcatcttgagcaagctcctccgggaagaagataataaatactgtgccgattgcgaagcaaagggccctagatgggcaagttggaacataggcgtgttcatttgtattcgctgtgccggcatccaccgcaatctcggagtccatatctcacgggttaagagcgtgaatttggaccagtggactgcagaacagatccagtgtatgcaagatatgggtaacacaaaagcaaggctcctgtatgaggccaacttgcccgagaattttagacggcctcagactgaccaagcagtggaattttttatccgagacaagtatgagaagaaaaagtactatgataagaacgcaatcgccattactaacaaggagaaagaaaagaaaaaagaagagaaaaagcgagagaaagaaccagagaaaccggccaaaccactaaccgcagaaaagttgcagaagaaagaccagcagctggagcccaagaaatccacctccccaaaaaaagccgctgagcccacagtcgatcttctaggtctggacggacccgccgtcgcccctgtcaccaacggcaacactacggtgccacccctcaatgacgatctagatatctttgggcctatgatttcaaacccgctgccggctactgtgatgccacctgctcaggggactccttcagctccagcagctgccacactgtctacagtcaccagcggagatctcgacctgtttacagagcagacgacaaaatcagaagaggtagccaaaaagcaactcagtaaggactcaatcctgtccctgtatggaacgggcacaatccagcagcaatccactcccggagtttttatgggcccaaccaatatacctttcacttcccaggcacccgccgccttccaagggttcccgagtatgggcgtgccagtccccgcagcccctgggcttataggcaatgtaatgggccagtcccctagcatgatggtgggcatgcccatgcccaatgggttcatgggtaatgcacagacaggtgtcatgccactgccccagaatgtagttggaccccagggcggtatggtcggccagatgggtgcaccacagagtaagttcggcctgcctcaagcccaacagccacagtggtctctgtcacagataatgcagaaaggagacgcggtgctccagcactccatttccgctatctactggccgatgaccagatggctaaaatgccctctggttgatgagagcgcggacggatggcacgagtaccagtag

SEQ ID NO: 99800 - DNA, 1311 bp, Artificial Sequence
  derived and/or modified sequence
atggccacccggagctgtagagagaaagcccaaaaattgaatgagcagcatcagctgatactgtctaagctgctgcgggaagaggacaacaagtattgtgctgactgcgaagctaagggtccaagatgggctagttggaatatcggagtcttcatctgcatccgttgtgcgggtattcaccgtaatctgggagttcatataagccgggttaagagcgttaacctcgatcagtggacagcagaacagatacagtgtatgcaggatatggggaacactaaggccagactgctttacgaagcaaatttgccagaaaatttcaggcgtcctcagaccgatcaagccgtggagttctttattcgagataagtatgaaaagaaaaagtattatgataagaacgcaatcgcaatcacgaacaaggaaaaagagaagaaaaaggaagagaagaagagagagaaggagcctgaaaagcctgcaaagccgctcaccgcagaaaagttgcagaaaaaggaccagcagctcgaaccaaaaaagtcaacttcgcccaaaaaggccgcagagcctacagtagatctcttaggcttggatggacccgctgtagcccctgtgactaacgggaacactactgtccctcccttaaacgacgacttggacatatttggccctatgatctcgaaccccttgcctgctaccgttatgcccccagcacaaggaactccttccgcacccgcagctgcgaccctgtccacagtgaccagcggagatcttgacctgttcactgaacaaacaaccaaaagtgaagaggtggccaagaaacagctgagcaaggattcaattttatccctgtacggaacagggaccatacagcaacagtcgacaccgggtgttttcatgggaccaaccaacattcctttcacttcacaagctcctgctgcattccagggcttcccatcgatgggggtccccgtccccgcagcccctggactgatcggcaatgtaatgggacagtcccctagtatgatggtcggtatgccaatgcctaacggatttatggggaacgcccagactggagtgatgcccctgccacaaaacgttgtaggaccacagggaggcatggtaggacaaatgggtgctccccagtctaagtttgggctgccccaggcacaacagccacagtggtcactgtcccagatcatgcagaagggtgatgctgtgctgcaacacagcatctccgcaatttactggccaatgacacgatggctgaagtgcccacttgttgacgaatctgctgatggctggcacgaataccagtag

SEQ ID NO: 99801 - DNA, 2491 bp, Artificial Sequence
  derived and/or modified sequence
agtccccctccccctcccctcgccggctagggtggtgcgtgccggcaggccggtcaaggaggcgggacacgtcggcgctaccaccgccaccgccgccgccgcccctcctcccgttccagctgccgctgccgcttcctgggctgagtccgcccgcggtcccggcggcgccaggtgcgttcactctgcccggctccagccagcgtccgccgccgccgtagctgccccaggctccccgccccgctgccgagatggcgacgcgctcctgtcgggagaaggctcagaagctgaacgagcagcaccagctcatcctatccaagcttctgagggaggaggacaacaagtactgcgccgactgcgaggccaaaggtcctcgatgggcttcctggaatattggtgtgtttatttgcatcagatgtgctggaattcatagaaatcttggggttcatatatccagggtcaaatcagtcaacctagaccaatggacagcagaacagatacagtgcatgcaagatatgggaaatactaaagcaagactactctatgaagccaatcttccagagaactttcgaagaccacagacagatcaagcagtggaatttttcatcagagataaatatgaaaagaagaaatactacgataaaaatgccatagctattacaaataaagaaaaggaaaaaaaaaaggaagagaaaaagagagaaaaggagccagaaaagccggcaaaaccacttacagctgaaaagctgcagaagaaagatcagcaactggagcctaaaaaaagtaccagccctaaaaaagctgcggagcccactgtggatcttttaggacttgatggccctgctgtggcaccagtgaccaacgggaacacaacggtgccacccctgaacgatgatctggacatctttggaccgatgatttctaatcccttacctgcaactgtcatgcccccagctcaggggacaccctctgcaccagcagctgcaaccctgtctacagtaacatctggggatctagatttattcactgagcaaactacaaaatcagaagaagtggcaaagaaacaactttccaaagactccatcttatctctgtatggcacaggaaccattcaacagcaaagtactcctggtgtatttatgggacccacaaatataccatttacctcacaagcaccagctgcatttcagggctttccatcgatgggcgtgcctgtgcctgcagctcctggccttataggaaatgtgatgggacagagtccaagcatgatggtgggcatgcccatgcccaatgggtttatgggaaatgcacaaactggtgtgatgccacttcctcagaacgttgttggcccccaaggaggaatggtgggacaaatgggtgcaccccagagtaagtttggcctgccgcaagctcagcagccccagtggagcctctcacagataatgcagaagggtgatgctgttctccagcactccatcagtgcaatctactggccaatgacaaggtggttaaaatgtcctttagtagatgaatcagcagatggctggcatgagtatcagtagtgcaacccctactgcaggttttggccagccctccagcacaacagcaggatggtctggaagctcatcaggtcagactctcagcacacaactgtggaaatgaaaactgcaatacaagtttcatccagaactaccacctgacattccttgctgaaacgcatctagttcccctgtttattcatatgcatattttttttctttttacccatttgttcatattaagaatgatctgattgaccgtgttggtctgtactgattcaatttgatgtggtgaaaagcaggttgataaatcattttatgtcaagggcagctttgctcatatttcccatgatttcatgtactgcattatttgagaagctgctcaacttgcaaaatcagttttcctctcaataaaattatagctctaatgtttgcatataagggaagtagttatcatgttagtaatacctctaatagtataaaccccaccccaaaattagccagtaatcctgtaggaaggtactgtatgatcaaatgtttaatcatataaatagaatgtaaatgtctcactgagcactgttttctagtgtatcaaaatgctcttatttcatcattcacttcactgtgctgttgttatgatgtgcttaacagggaacgtgattagtgaaaggaagataaacgtggatgttactccaaaacttcgtttaatgaatgcttaaagaattcaaattttatctgcctctcttgtaatttggatctcttcttaatgtacatagtgctaacatgaagacctttttctgcactatatgcaaacagggtaactaactaaaacaaagccactttcaatcttcaatccttgaaggtatatctaggtttatgacagtaattgtgtttacattttatggtgcctagtattgacaaaatgttatttccctacattaaacatgactccatag

SEQ ID NO: 99802 - DNA, 1311 bp, Artificial Sequence
  derived and/or modified sequence
atggccaccagaagctgcagagagaaggcccagaagctgaacgagcagcaccagctgatcctgagcaagctgctgagagaggaggacaacaagtactgcgccgactgcgaggccaagggccccagatgggccagctggaacatcggcgtgttcatctgcatcagatgcgccggcatccacagaaacctgggcgtgcacatcagcagagtgaagagcgtgaacctggaccagtggaccgccgagcagatccagtgcatgcaggacatgggcaacaccaaggccagactgctgtacgaggccaacctgcccgagaacttcagaagaccccagaccgaccaggccgtggagttcttcatcagagacaagtacgagaagaagaagtactacgacaagaacgccatcgccatcaccaacaaggagaaggagaagaagaaggaggagaagaagagagagaaggagcccgagaagcccgccaagcccctgaccgccgagaagctgcagaagaaggaccagcagctggagcccaagaagagcaccagccccaagaaggccgccgagcccaccgtggacctgctgggcctggacggccccgccgtggcccccgtgaccaacggcaacaccaccgtgccccccctgaacgacgacctggacatcttcggccccatgatcagcaaccccctgcccgccaccgtgatgccccccgcccagggcacccccagcgcccccgccgccgccaccctgagcaccgtgaccagcggcgacctggacctgttcaccgagcagaccaccaagagcgaggaggtggccaagaagcagctgagcaaggacagcatcctgagcctgtacggcaccggcaccatccagcagcagagcacccccggcgtgttcatgggccccaccaacatccccttcaccagccaggcccccgccgccttccagggcttccccagcatgggcgtgcccgtgcccgccgcccccggcctgatcggcaacgtgatgggccagagccccagcatgatggtgggcatgcccatgcccaacggcttcatgggcaacgcccagaccggcgtgatgcccctgccccagaacgtggtgggcccccagggcggcatggtgggccagatgggcgccccccagagcaagttcggcctgccccaggcccagcagccccagtggagcctgagccagatcatgcagaagggcgacgccgtgctgcagcacagcatcagcgccatctactggcccatgaccagatggctgaagtgccccctggtggacgagagcgccgacggctggcacgagtaccagtag

SEQ ID NO: 99803 - protein, 273 aa, Artificial Sequence
  derived and/or modified sequence
MASAAAAEAEKGSPVVVGLLVVGNIIILLSGLSLFAETIWVTADQYRVYPLMGVSGKDDVFAGAWIAIFCGFSFFMVASFGVGAALCRRRSMVLTYLVLMLIVYIFECASCITSYTHRDYMVSNPSLITKQMLTFYSADTDQGQELTRLWDRVMIEQECCGTSGPMDWVNFTSAFRAATPEVVFPWPPLCCRRTGNFIPLNEEGCRLGHMDYLFTKAGVQWHNLSSLQRLPPGFKGFSHLSFQSSWDYRAASNTSATPSTATRGVSRGLGLPS

SEQ ID NO: 99804 - DNA, 822 bp, Artificial Sequence
  derived and/or modified sequence
atggccagcgccgccgccgccgaggccgagaagggcagccccgtggtggtgggcctgctggtggtgggcaacatcatcatcctgctgagcggcctgagcctgttcgccgagaccatctgggtgaccgccgaccagtacagagtgtaccccctgatgggcgtgagcggcaaggacgacgtgttcgccggcgcctggatcgccatcttctgcggcttcagcttcttcatggtggccagcttcggcgtgggcgccgccctgtgcagaagaagaagcatggtgctgacctacctggtgctgatgctgatcgtgtacatcttcgagtgcgccagctgcatcaccagctacacccacagagactacatggtgagcaaccccagcctgatcaccaagcagatgctgaccttctacagcgccgacaccgaccagggccaggagctgaccagactgtgggacagagtgatgatcgagcaggagtgctgcggcaccagcggccccatggactgggtgaacttcaccagcgccttcagagccgccacccccgaggtggtgttcccctggccccccctgtgctgcagaagaaccggcaacttcatccccctgaacgaggagggctgcagactgggccacatggactacctgttcaccaaggccggcgtgcagtggcacaacctgagcagcctgcagagactgccccccggcttcaagggcttcagccacctgagcttccagagcagctgggactacagagccgccagcaacaccagcgccacccccagcaccgccaccagaggcgtgagcagaggcctgggcctgcccagctag

SEQ ID NO: 99805 - DNA, 822 bp, Artificial Sequence
  derived and/or modified sequence
atggcttctgcagctgccgcagaagcagaaaaagggagtcctgtggttgtgggtctcctagtggttggtaacatcatcatactgctttcgggtctgtccctgtttgcagagactatttgggtgacggctgatcagtatcgcgtgtacccactgatgggcgtaagtggcaaagatgatgtgttcgccggagcatggatcgctatcttctgtggattttcattctttatggtggctagcttcggtgtcggcgcggctctgtgccggcgaagatccatggttctcacctatctggtgctgatgctgatagtgtatattttcgagtgtgcatcctgtattacatcgtatactcaccgtgactacatggtctctaatcctagcctgatcacgaaacaaatgctgaccttctactcagcagataccgatcagggacaagaactgaccaggctgtgggatcgggtaatgatcgaacaagagtgttgcgggacatcgggccctatggactgggtaaacttcactagcgcctttagggcggctacaccagaggtggtcttcccttggcctcccctctgctgccggcggaccggcaattttattccattgaatgaagagggatgtagactggggcacatggattatctgtttacaaaggctggcgtccagtggcacaatctctcatccctgcaaaggctgcccccgggatttaagggattcagccacttgtccttccagtcatcctgggactatcgagctgcctccaacacaagtgctacgcctagcactgccacccgaggtgtcagtcgtggcctcggactgccgtcttag

SEQ ID NO: 99806 - DNA, 822 bp, Artificial Sequence
  derived and/or modified sequence
atggccagcgctgctgctgctgaggccgagaagggcagccctgtggtggtgggcctgctggtggtgggcaacatcatcatcctgctgagcggcctgagcctgtttgctgagaccatctgggtgacagctgaccagtacagagtgtaccccctgatgggcgtgtctgggaaggatgatgtgtttgctggggcctggatcgccatcttctgtggcttctccttcttcatggtggccagctttggagtgggcgccgccctgtgcagaagaagatccatggtgctgacctacctggtgctgatgctgattgtgtacatctttgaatgtgccagctgcatcaccagctacacccaccgggactacatggtgagcaaccccagcctcatcaccaagcagatgctgaccttctacagcgctgacacagaccagggccaggagctgacccggctgtgggacagagtgatgattgagcaggagtgctgcggcaccagcggccccatggactgggtgaacttcaccagcgccttccgggccgccaccccagaggtggtgttcccctggccacccctgtgctgcagaagaacaggcaacttcatccccctgaatgaggagggctgccgcctgggccacatggactacctgttcaccaaggccggcgtgcagtggcacaacctgagcagcctgcagaggctgcccccaggcttcaagggcttcagccacctgtccttccagagctcctgggactaccgggccgccagcaacaccagcgccacccccagcacagccacccggggcgtgtcccggggcctgggcctgcccagctag

SEQ ID NO: 99807 - DNA, 822 bp, Artificial Sequence
  derived and/or modified sequence
atggccagcgccgccgccgccgaggccgagaagggcagccccgtggtggtggggctgttagtcgtcggcaatattatcatcctcctgagtggactctcactgttcgcagaaacgatttgggtgacggctgatcagtaccgcgtgtaccccctaatgggcgtatccggtaaggatgacgtcttcgcaggcgcgtggatcgcaattttctgcggatttagcttctttatggtagcctcatttggggttggggcagcactgtgccgccggaggagcatggtactcacgtacctcgtgttaatgctgatcgtttacatcttcgagtgtgcctcctgcataacaagttatacacatagagactacatggtatccaatccgagcctcatcactaagcagatgctgactttctattccgctgataccgaccagggacaagaattaacacgtctgtgggaccgggttatgatagagcaggagtgctgcgggacttcaggaccaatggattgggtgaacttcacaagcgccttcagggcagcgactccggaggtggtcttcccctggccacctctgtgttgtagacggacagggaacttcattcctctgaatgaggaaggatgtagactgggccatatggattacctttttactaaggccggggtccagtggcacaacttgtcatcactacagaggctgccaccagggtttaagggattcagccacttgagtttccagtcgtcatgggattatcgagctgcttccaacaccagcgcaacgccctctacggcaaccaggggcgtttcacgtggactcggattgccttcttag

SEQ ID NO: 99808 - DNA, 822 bp, Artificial Sequence
  derived and/or modified sequence
atggcgtccgctgcagccgcagaagccgaaaaggggtcacccgtggtggtgggactattggtggttgggaatattataatcttactcagtggcctaagcctttttgctgagaccatctgggtgactgctgatcagtaccgggtgtacccactcatgggcgtgtctggcaaagatgatgtcttcgccggagcctggatcgctattttttgcggattctcattcttcatggttgcctctttcggtgtgggcgctgcactttgtcgccgtcgctccatggtccttacttatctggttcttatgctgattgtctatattttcgagtgtgcaagctgcatcacgtcctacacccatcgggattatatggtgagcaacccctctttaatcaccaagcagatgctcacattctattctgcggacaccgatcaaggacaagagctgacccgtctctgggaccgagtcatgatagaacaagagtgctgcgggacgagcggcccaatggactgggtgaatttcacctcggcattccgtgctgccacccctgaagtggtgtttccatggccccctctgtgttgccgccgtactgggaactttattcccttaaacgaagagggatgccggttaggacatatggactacttgttcaccaaagcaggagtgcaatggcacaacttaagttcattgcagcggcttcccccaggcttcaagggattttcacatctctctttccaatccagctgggactatagggctgccagcaacactagcgctaccccatcgacagcaacccgaggagtttcacggggactgggtctcccaagctag

SEQ ID NO: 99809 - DNA, 1321 bp, Artificial Sequence
  derived and/or modified sequence
atggcgtctgcggcagcagcggaggccgagaagggatctccagttgtggtgggcctgctagttgtgggcaatatcattattctgctgtcaggcctgtccctgtttgctgagaccatatgggtgacagccgaccagtaccgtgtatacccactgatgggagtctcaggcaaggatgacgtcttcgctggtgcctggattgccatcttctgcggcttctccttcttcatggtagccagttttggtgtgggtgccgcactctgccgccgccggtccatggtcctcacgtacctggtgctcatgctcatcgtctacatcttcgagtgcgcctcctgcatcacgtcctacacccaccgtgactacatggtgtccaacccatccctgatcaccaagcagatgctgaccttctacagcgcggacaccgaccagggccaggagctgacccgcctctgggaccgcgtcatgattgagcaagaatgctgtggcacatctggtcccatggactgggtgaacttcacgtcagccttccgggcggccactccggaggtggtgttcccctggcccccactgtgctgtcgccggacgggaaacttcatccccctcaacgaggagggctgccgcctggggcacatggactacctgttcaccaaggctggagtacagtggcacaatctcagctcactgcagcgtctgcctcccgggttcaagggattctcccacctcagcttccagagcagctgggattacagggctgcttcgaacacatcggccacgccatcgacagctacacgtggggtatctcgtggtttgggtttgccatcctgatgtggacgctcccggtcatgctgatagccatgtatttctacaccatgctctgagggacaggaggggaaggcaacatacacaccccggactcctccgcatcctcctcctgcttcctccgctgggcctggatggctgcctcacctctcacctcccaacgtccctagcccttacgtccttccacttccaagatctttttccaggttcctgagccctactgtgtctcaggtgtgccctgaaaccccagggcttgtgtgcacatatccttagcccatctttcaagggacctctccatgatcccacctcccattcacagatacctctcttgtagctctctgacctcctccttcatggcaggcatcgccattcttgctgaaccgtttgtgattgccatttgagctctggaagcctctattgccatgagagttctgtcacggtcactttactgtccccatcatcacccagcacggggctaagcatatactagatagtcaataaataa

SEQ ID NO: 99810 - protein, 291 aa, Artificial Sequence
  derived and/or modified sequence
MERKRWECPALPQGWEREEVPRRSGLSAGHRDVFYYSPSGKKFRSKPQLARYLGGSMDLSTFDFRTGKMLMSKMNKSRQRVRYDSSNQVKGKPDLNTALPVRQTASIFKQPVTKITNHPSNKVKSDPQKAVDQPRQLFWEKKLSGLNAFDIAEELVKTMDLPKGLQGVGPGCTDETLLSAIASALHTSTMPITGQLSAAVEKNPGVWLNTTQPLCKAFMVTDEDIRKQEELVQQVRKRLEEALMADMLAHVEELARDGEAPLDKACAEDDDEEDEEEEEEEPDPDPEMEHV

SEQ ID NO: 99811 - DNA, 876 bp, Artificial Sequence
  derived and/or modified sequence
atggagcgcaagcgttgggagtgtcccgcccttcctcagggttgggaaagggaggaggtccctcggcgcagcgggctgagcgctggccacagggacgtgttttattacagcccatctggcaaaaagtttagaagcaagccccagctcgcccgatacctcggaggctctatggacctctccacttttgactttcgcacaggcaagatgctgatgtcgaaaatgaacaagtctaggcagcgcgtgcggtacgactcttcgaaccaggttaagggaaaacccgacttaaacaccgctttacctgtgcgccagacagccagtatctttaagcaaccagtgacaaaaatcaccaaccatccatcaaataaggtgaagtcggacccacagaaggccgtggatcagcccaggcaactcttctgggagaaaaaactgtctggactgaatgcctttgatatagctgaagagctcgtcaaaactatggatttgccaaagggtttgcagggggtcggtccagggtgtaccgacgagacactgctctctgccatagcaagtgcactgcatacctcaaccatgcctatcaccggccagctgtccgcagcggtggagaagaaccctggagtgtggttgaatacgacacagccgctctgtaaggccttcatggttactgatgaggatatccggaaacaagaagagttggttcagcaggtaagaaagaggctagaggaggccctgatggctgacatgttggcacacgtcgaggagctcgccagggacggcgaggcacccctcgacaaggcttgtgctgaggacgacgacgaggaggacgaagaggaggaagaggaagaacccgaccctgatcccgagatggagcacgtgtag

SEQ ID NO: 99812 - DNA, 876 bp, Artificial Sequence
  derived and/or modified sequence
atggagaggaagcgctgggagtgcccagccctgccccagggctgggagcgggaggaggtgccccggcgcagcggcctgtctgctggccacagagatgtgttctactacagccccagcggcaagaagttccgcagcaagccccagctggcccgctacctgggcggctccatggacctgagcacctttgacttcagaacaggcaagatgctgatgagcaagatgaacaagagccggcagagggtgcgctatgacagcagcaaccaggtgaagggcaagccagacctgaacacagccctgcctgtgcggcagacagccagcatcttcaagcagcctgtgaccaagatcaccaaccaccccagcaacaaggtgaagagtgacccccagaaggctgtggaccagccccggcagctgttctgggagaagaagctgagcggcctgaatgcctttgatattgctgaggagctggtgaagaccatggacctgcccaagggcctgcagggcgtgggccctggctgcacagatgagaccctgctgagcgccatcgccagcgccctgcacaccagcaccatgcccatcaccggccagctgtctgctgctgtggagaagaaccctggggtgtggctgaacaccacccagcccctgtgcaaggccttcatggtgacagatgaggacatcaggaagcaggaggagctggtgcagcaggtgaggaagaggctggaggaggccctgatggctgacatgctggcccacgtggaggagctggccagagatggagaggcccccctggacaaggcctgtgccgaggatgatgatgaagaagatgaggaggaggaggaggaggagccagaccctgaccctgagatggagcacgtgtag

SEQ ID NO: 99813 - DNA, 2559 bp, Artificial Sequence
  derived and/or modified sequence
gcgggccgaggagccgggcgcaatggagcggaagaggtgggagtgcccggcgctcccgcagggctgggagagggaagaagtgcccagaaggtcggggctgtcggccggccacagggatgtcttttactatagcccgagcgggaagaagttccgcagcaagccgcagctggcgcgctacctgggcggctccatggacctgagcaccttcgacttccgcacgggcaagatgctgatgagcaagatgaacaagagccgccagcgcgtgcgctacgactcctccaaccaggtcaagggcaagcccgacctgaacacggcgctgcccgtgcgccagacggcgtccatcttcaagcagccggtgaccaagattaccaaccaccccagcaacaaggtcaagagcgacccgcagaaggcggtggaccagccgcgccagctcttctgggagaagaagctgagcggcctgaacgccttcgacattgctgaggagctggtcaagaccatggacctccccaagggcctgcagggggtgggacctggctgcacggatgagacgctgctgtcggccatcgccagcgccctgcacactagcaccatgcccatcacgggacagctctcggccgccgtggagaagaaccccggcgtatggctcaacaccacgcagcccctgtgcaaagccttcatggtgaccgacgaggacatcaggaagcaggaagagctggtgcagcaggtgcggaagcggctggaggaggcgctgatggccgacatgctggcgcacgtggaggagctggcccgtgacggggaggcgccgctggacaaggcctgcgctgaggacgacgacgaggaagacgaggaggaggaggaggaggagcccgacccggacccggagatggagcacgtctagggcaggtgctgcggggccacgggggctccctggagtcgggtcctggcagtggggactgcctggtgaacacagatgtgcttgggatgacgggtgcctcccaagagcttcccatctccctagaagagcccaagcgtccccgtcccgtggagtcgctaaagccagccctccctgtcctttccagaggccctgccgagagcccgtgctgcctgctggagccgcctgcagacgcggtcctcggccccacgtgaaccaggctcggcggcgaagcccagccttggagacacccaggaggaaggccgtgctcctggctccctcctcggcccgtccccacttcccggggcctcggggcacacagctggggctgcccccacccgaaagaccctccacgctcgtcctctacagagtccggcttcgggaagtgccgggtgctcctgggccctgcctggctccctacgacctttgggctcgaggccagctcctccccatgcccgctgtcccagctccttgagactggagagcagccagcaggtgcccggcagctcggcgccacggcttgctgacagctgggagggtttctcggtctggaggcgtagttttgaaactcacatcacccactgtgcagcgtgaggacgggactctggtctgctgtggggggcatgcaggacggcgccactctctgccctgccatgcggctggtggtgccacagagcctcaccgtgcctgagtggcatgcccaggaggccgctctccttcagtaaatgtaacacagtcgaggcacgtcatcgggcagccttccctgtgtgccaacgccagccttcgcttctgaaaaccaaactccagccgctgccagtcgggacttggtcgcccggcgctgccagaatgctccactgccagccggcccccctgcctcggtttcccttctgtttagtggcgacacaggcacccagctttggggtggtgctgacgctcccaggggtgccaggagccactgggacagggtgaggctcccagacgctcctcgaggtgcccagctctccagggagcttctggcccaaggccgtctgagggatctgctccttaaccccccagtgccttggcgagggcaggttccaagccacagacgcctgccccgagtggactctgcggccagtccctggtgccctcctggccctgctgcccagtgagggctcctacgggtgggttcattggcctgggcccagcgagcccccacctgcattgaccttaggcccatagagagggcctgtcccggtgctgccccagccaggatctggtcgctgccccagggggactgatgggcagagtcgcccctgtggctggactgtgaccatccctgatggggcctgaccgcgggagctgaggaagcgccgctccaccgtctgccctccaaggacccgcatggaggcagtgggctggcagcttcctgctgctccctgtcagagtcaaagcacaaatcctcaggacgggctcaagggccagggcagccgagggaagctccaggtggggaccacgtcttcctgaggttggtgcccactggctgggaccctttgcagtggggtggcctcccctctgtctgcctggtggagggagccgtgggcgtggggacgtgactgaataaagccaccatgggtggatgtgcttgg

SEQ ID NO: 99814 - DNA, 876 bp, Artificial Sequence
  derived and/or modified sequence
atggagcggaagcggtgggagtgccccgccctgccccagggctgggaacgagaggaagtgccacgccgcagtggcctatccgctggacatagagacgtgttctactacagtccctctgggaaaaagttccgttcaaaaccccagcttgcccggtacctcgggggatcaatggacttaagtactttcgacttcaggactggaaagatgctgatgtccaaaatgaataagtctaggcagcgcgtaagatatgattcctctaaccaggttaaaggcaaaccagaccttaacactgccttgccggtcagacaaaccgcctctatctttaaacagccagtgacaaaaatcacaaatcatcctagcaacaaggtcaagtcagatcctcagaaggcagtggatcaacccagacagctattttgggagaaaaagctcagcgggctgaacgcatttgacattgcggaggagctcgttaagacaatggacctcccaaagggtctccaaggcgtgggacccggctgcaccgacgaaaccttgctctccgctatcgctagcgccctccacacaagcactatgcccattaccgggcaactctctgcagccgtggagaagaatcctggtgtgtggctgaatacgacgcagcccctgtgtaaggcctttatggtgaccgatgaggatatcagaaagcaggaagaacttgtgcagcaggtgaggaagcggctggaggaagccctcatggctgatatgctggcgcacgtggaagagctcgccagagatggggaagcccctctcgataaagcatgcgcggaagacgacgacgaggaagacgaagaggaagaggaagaggaacccgacccagatccggagatggagcatgtgtag

SEQ ID NO: 99815 - DNA, 876 bp, Artificial Sequence
  derived and/or modified sequence
atggagcgaaaaaggtgggaatgtcctgcgctgccccaggggtgggagagggaagaagttcccaggcgttcaggcttgtctgccggtcatcgcgacgtgttctattactccccttctggcaagaaatttagaagcaagccccagctcgcacggtatcttgggggaagtatggatctgtcgacatttgattttcgaacaggcaagatgctgatgtccaaaatgaataagagtcgccagcgtgtgcgctatgacagctcaaaccaggtgaagggcaagcctgacctcaacactgccctccctgtaagacagactgcttctatctttaagcaacccgtgacaaagattaccaaccatccgtctaataaggtcaaatcagatccacagaaggctgtcgaccaaccacgccagcttttctgggaaaagaaactgagcgggctgaatgctttcgacatcgctgaggaattggtcaagacaatggatctaccaaaggggctgcagggcgtgggacctggctgcactgatgagacgttactgtccgcgattgccagcgcactccataccagtacaatgccgatcacaggacaactgtccgctgctgtggaaaaaaaccctggagtctggttgaacaccactcaacccctctgtaaagcttttatggtgacagatgaggacatccgcaagcaggaagaattggtccagcaagtgagaaagaggctagaagaggcactgatggctgatatgctggcccacgtcgaggaacttgcaagggacggagaggcacccctggataaggcttgtgctgaagatgatgatgaggaggacgaggaagaggaagaggaggaacccgatccggacccagagatggagcacgtttag

SEQ ID NO: 99816 - DNA, 876 bp, Artificial Sequence
  derived and/or modified sequence
atggaaagaaagaggtgggagtgccccgcgttaccccagggctgggagagggaggaggtgccccgtcgttcagggctttccgccgggcatcgagatgtgttttattactcccccagtggtaagaaattcaggtccaaaccacagttagctcggtacctgggcggatcaatggatttgtccacattcgatttccgtacaggcaagatgttgatgagcaagatgaacaaaagcaggcagcgcgtgcgctacgactcatccaatcaggtaaaagggaagcccgacctgaataccgcccttccagtgagacagactgcatccattttcaaacagcccgtgactaaaattaccaaccatccttcaaacaaggttaagagcgaccctcaaaaggccgtcgaccaacccaggcagctgttctgggaaaagaagctttcaggcctcaatgcattcgatatcgccgaggagttggtaaagaccatggatctgcctaagggtctgcaaggggtgggcccaggctgtaccgatgagacccttctgagtgcaatagcctccgccttgcatacatccactatgccaatcaccggccagctgagtgcggccgtggaaaaaaaccctggagtgtggctgaataccacccagcccctgtgtaaagcctttatggtgaccgacgaagacatcagaaaacaggaagaactggtgcagcaggttcgaaagagactagaagaggcccttatggctgatatgctcgcacatgtggaagagctggccagagacggagaggcccctcttgataaagcttgtgcagaggatgatgacgaagaggatgaggaagaagaagaggaagagcctgacccagatcctgagatggagcacgtgtag

SEQ ID NO: 99817 - DNA, 876 bp, Artificial Sequence
  derived and/or modified sequence
atggaacgcaaaagatgggaatgtcccgcactgccccagggatgggaaagggaagaggtacctcgccgtagtggactgtcggcgggccaccgtgatgtcttctactattcgccgagcggcaaaaaatttaggtccaagcctcaacttgcacgatacctaggaggtagcatggatctgagcaccttcgactttaggaccgggaaaatgttaatgtccaaaatgaataagtccagacagcgcgttcgatatgatagctctaatcaagttaagggaaagcctgatcttaacactgccctgcctgttcggcagactgcaagcattttcaaacagccagtcacgaaaattaccaatcacccatctaataaagtcaaaagtgacccccaaaaagcagtggaccagccacgccaattattttgggaaaagaagttgtccggattaaacgcatttgacattgcagaagagctggtgaagacaatggatctgccaaaggggctccagggcgtcggaccggggtgtaccgatgagactttgttatccgcgatcgcttccgcacttcatacatctacaatgccaattacaggccagctctccgccgcagtggaaaaaaaccctggagtgtggctgaataccacccagcccctgtgtaaagcctttatggtgaccgacgaagacatcagaaaacaggaagaactggtgcagcaggttcgaaagagactagaagaggcccttatggctgatatgctcgcacatgtggaagagctggccagagacggagaggcccctcttgataaagcttgtgcagaggatgatgacgaagaggatgaggaagaagaagaggaagagcctgacccagatcctgagatggagcacgtgtag

SEQ ID NO: 99818 - DNA, 876 bp, Artificial Sequence
  derived and/or modified sequence
atggagagaaagagatgggagtgccccgccctgccccagggctgggagagagaggaggtgcccagaagaagcggcctgagcgccggccacagagacgtgttctactacagccccagcggcaagaagttcagaagcaagccccagctggccagatacctgggcggcagcatggacctgagcaccttcgacttcagaaccggcaagatgctgatgagcaagatgaacaagagcagacagagagtgagatacgacagcagcaaccaggtgaagggcaagcccgacctgaacaccgccctgcccgtgagacagaccgccagcatcttcaagcagcccgtgaccaagatcaccaaccaccccagcaacaaggtgaagagcgacccccagaaggccgtggaccagcccagacagctgttctgggagaagaagctgagcggcctgaacgccttcgacatcgccgaggagctggtgaagaccatggacctgcccaagggcctgcagggcgtgggccccggctgcaccgacgagaccctgctgagcgccatcgccagcgccctgcacaccagcaccatgcccatcaccggccagctgagcgccgccgtggagaagaaccccggcgtgtggctgaacaccacccagcccctgtgcaaggccttcatggtgaccgacgaggacatcagaaagcaggaggagctggtgcagcaggtgagaaagagactggaggaggccctgatggccgacatgctggcccacgtggaggagctggccagagacggcgaggcccccctggacaaggcctgcgccgaggacgacgacgaggaggacgaggaggaggaggaggaggagcccgaccccgaccccgagatggagcacgtgtag

SEQ ID NO: 99819 - protein, 259 aa, Artificial Sequence
  derived and/or modified sequence
MERKSPSGKKFRSKPQLARYLGGSMDLSTFDFRTGKMLMSKMNKSRQRVRYDSSNQVKGKPDLNTALPVRQTASIFKQPVTKITNHPSNKVKSDPQKAVDQPRQLFWEKKLSGLNAFDIAEELVKTMDLPKGLQGVGPGCTDETLLSAIASALHTSTMPITGQLSAAVEKNPGVWLNTTQPLCKAFMVTDEDIRKQEELVQQVRKRLEEALMADMLAHVEELARDGEAPLDKACAEDDDEEDEEEEEEEPDPDPEMEHV

SEQ ID NO: 99820 - DNA, 780 bp, Artificial Sequence
  derived and/or modified sequence
atggaacgtaaatccccctcaggaaaaaaattcagaagcaaacctcaactggctaggtatttgggcggcagcatggacttgagcacttttgattttcgtaccggcaagatgctgatgtcgaaaatgaataaatcaagacagcgcgtccggtatgactcctccaatcaggtgaaggggaaacctgacctaaataccgccctgcctgttcgccagacagcgtcaatcttcaagcagccagttacaaagatcacaaaccatccttcaaacaaagtcaagtctgatccgcagaaagcggtggaccagcccaggcaactattctgggagaaaaaactgtctggtctgaatgcgtttgacatcgccgaagagttggttaagaccatggacctgcccaagggactgcagggtgtcggtcctggatgtacagatgaaactctgttgagtgcgatcgcttccgccttgcacacctccaccatgcctattactggccagctgagtgcagctgtggaaaagaaccccggcgtgtggctcaacaccacacagccgctctgcaaggcattcatggtaaccgacgaggacatccgaaaacaggaggaactggtgcagcaggtgagaaagagactggaggaagcactgatggctgatatgctggcgcacgtagaggagctggctcgtgatggcgaggcgccccttgacaaggcctgtgccgaagacgacgatgaagaagatgaggaggaggaggaggaagagcccgaccctgacccagagatggagcacgtatag

SEQ ID NO: 99821 - DNA, 780 bp, Artificial Sequence
  derived and/or modified sequence
atggagaggaagagccccagcggcaagaagttccgcagcaagccccagctggcccgctacctgggcggctccatggacctgagcacctttgacttcagaacaggcaagatgctgatgagcaagatgaacaagagccggcagagggtgcgctatgacagcagcaaccaggtgaagggcaagccagacctgaacacagccctgcctgtgcggcagacagccagcatcttcaagcagcctgtgaccaagatcaccaaccaccccagcaacaaggtgaagagtgacccccagaaggctgtggaccagccccggcagctgttctgggagaagaagctgagcggcctgaatgcctttgatattgctgaggagctggtgaagaccatggacctgcccaagggcctgcagggcgtgggccctggctgcacagatgagaccctgctgagcgccatcgccagcgccctgcacaccagcaccatgcccatcaccggccagctgtctgctgctgtggagaagaaccctggggtgtggctgaacaccacccagcccctgtgcaaggccttcatggtgacagatgaggacatcaggaagcaggaggagctggtgcagcaggtgaggaagaggctggaggaggccctgatggctgacatgctggcccacgtggaggagctggccagagatggagaggcccccctggacaaggcctgtgccgaggatgatgatgaagaagatgaggaggaggaggaggaggagccagaccctgaccctgagatggagcacgtgtag

SEQ ID NO: 99822 - DNA, 2345 bp, Artificial Sequence
  derived and/or modified sequence
gaggcagctgaggcggcggcggcgagtgggggtccgggcggcggcggcgggcccggcggcgggccgaggagccgggcgcaatggagcggaagagcccgagcgggaagaagttccgcagcaagccgcagctggcgcgctacctgggcggctccatggacctgagcaccttcgacttccgcacgggcaagatgctgatgagcaagatgaacaagagccgccagcgcgtgcgctacgactcctccaaccaggtcaagggcaagcccgacctgaacacggcgctgcccgtgcgccagacggcgtccatcttcaagcagccggtgaccaagattaccaaccaccccagcaacaaggtcaagagcgacccgcagaaggcggtggaccagccgcgccagctcttctgggagaagaagctgagcggcctgaacgccttcgacattgctgaggagctggtcaagaccatggacctccccaagggcctgcagggggtgggacctggctgcacggatgagacgctgctgtcggccatcgccagcgccctgcacactagcaccatgcccatcacgggacagctctcggccgccgtggagaagaaccccggcgtatggctcaacaccacgcagcccctgtgcaaagccttcatggtgaccgacgaggacatcaggaagcaggaagagctggtgcagcaggtgcggaagcggctggaggaggcgctgatggccgacatgctggcgcacgtggaggagctggcccgtgacggggaggcgccgctggacaaggcctgcgctgaggacgacgacgaggaagacgaggaggaggaggaggaggagcccgacccggacccggagatggagcacgtctagggcagaggccctgccgagagcccgtgctgcctgctggagccgcctgcagacgcggtcctcggccccacgtgaaccaggctcggcggcgaagcccagccttggagacacccaggaggaaggccgtgctcctggctccctcctcggcccgtccccacttcccggggcctcggggcacacagctggggctgcccccacccgaaagaccctccacgctcgtcctctacagagtccggcttcgggaagtgccgggtgctcctgggccctgcctggctccctacgacctttgggctcgaggccagctcctccccatgcccgctgtcccagctccttgagactggagagcagccagcaggtgcccggcagctcggcgccacggcttgctgacagctgggagggtttctcggtctggaggcgtagttttgaaactcacatcacccactgtgcagcgtgaggacgggactctggtctgctgtggggggcatgcaggacggcgccactctctgccctgccatgcggctggtggtgccacagagcctcaccgtgcctgagtggcatgcccaggaggccgctctccttcagtaaatgtaacacagtcgaggcacgtcatcgggcagccttccctgtgtgccaacgccagccttcgcttctgaaaaccaaactccagccgctgccagtcgggacttggtcgcccggcgctgccagaatgctccactgccagccggcccccctgcctcggtttcccttctgtttagtggcgacacaggcacccagctttggggtggtgctgacgctcccaggggtgccaggagccactgggacagggtgaggctcccagacgctcctcgaggtgcccagctctccagggagcttctggcccaaggccgtctgagggatctgctccttaaccccccagtgccttggcgagggcaggttccaagccacagacgcctgccccgagtggactctgcggccagtccctggtgccctcctggccctgctgcccagtgagggctcctacgggtgggttcattggcctgggcccagcgagcccccacctgcattgaccttaggcccatagagagggcctgtcccggtgctgccccagccaggatctggtcgctgccccagggggactgatgggcagagtcgcccctgtggctggactgtgaccatccctgatggggcctgaccgcgggagctgaggaagcgccgctccaccgtctgccctccaaggacccgcatggaggcagtgggctggcagcttcctgctgctccctgtcagagtcaaagcacaaatcctcaggacgggctcaagggccagggcagccgagggaagctccaggtggggaccacgtcttcctgaggttggtgcccactggctgggaccctttgcagtggggtggcctcccctctgtctgcctggtggagggagccgtgggcgtggggacgtgactgaataaagccaccatgggtggatgtgcttgg

SEQ ID NO: 99823 - DNA, 780 bp, Artificial Sequence
  derived and/or modified sequence
atggagcggaagagccccagcggcaagaagttccggagcaagccccaattggcgcgatacttgggggggtctatggacctgagtacatttgactttcggactgggaagatgctgatgagcaaaatgaacaaaagtagacagcgggtgagatacgacagtagcaaccaagtgaagggcaagcctgacctgaacacggcactgccagtgcgacagactgctagcatttttaagcagcccgtaaccaaaatcacaaaccatcccagcaacaaggtgaagtctgatccacagaaggctgttgatcaaccacgccagctgttttgggagaaaaagctgtcgggcctgaacgcatttgacatcgcggaagagctcgtcaagaccatggacctgccgaagggcttgcagggggttggtcccggatgcactgacgaaacccttctctccgccatagcatcggccctgcatacctccacaatgcccatcacgggtcagctctcggcagccgtggagaaaaatcctggggtctggttgaatacaacgcaacctctgtgtaaagcatttatggtgacggatgaagatatccgcaagcaggaggaactggtacagcaggtcagaaagcggctggaggaggccctgatggcggacatgctggcccatgtcgaggagctcgcaagggacggcgaggctcctctggacaaagcttgtgccgaggatgacgacgaagaggacgaggaagaggaagaggaagaaccagaccccgaccccgagatggaacacgtttag

SEQ ID NO: 99824 - DNA, 780 bp, Artificial Sequence
  derived and/or modified sequence
atggaacgaaagagtccaagcgggaagaagtttcggagcaaaccgcagctggcgcgttatctgggcggatccatggacctctccacctttgactttaggactggtaaaatgctaatgagtaaaatgaataaaagtagacagcgagtccgatacgactcgtccaatcaggtgaagggaaagccagatttaaacacagccctacccgttaggcagaccgcctccatcttcaaacagccggtgacgaagatcactaaccaccccagcaacaaggtgaaaagcgacccgcaaaaagccgtggaccagccgcgacagcttttctgggagaagaagctctccggtttaaacgccttcgatatcgccgaagagctggttaaaaccatggacctgccgaagggcctccagggggtgggcccaggttgtaccgacgagacgttactgtccgccatcgcctcagcactgcatacttccactatgcccattacagggcaattgtccgccgctgtcgaaaagaatcccggagtctggcttaatactacacagccgctgtgcaaagcctttatggttactgacgaagatatcagaaaacaagaagagctagtccaacaggtgcggaagcggttggaggaggccctaatggccgatatgctggctcatgtagaggaattggctagagatggagaagccccactggataaggcttgcgccgaagacgacgatgaggaagacgaagaggaagaagaagaggaacctgaccctgatccagaaatggaacacgtgtag

SEQ ID NO: 99825 - DNA, 780 bp, Artificial Sequence
  derived and/or modified sequence
atggagagaaagagccccagcggcaagaagttcagaagcaagccccagctggccagatacctgggcggcagcatggacctgagcaccttcgacttcagaaccggcaagatgctgatgagcaagatgaacaagagcagacagagagtgagatacgacagcagcaaccaggtgaagggcaagcccgacctgaacaccgccctgcccgtgagacagaccgccagcatcttcaagcagcccgtgaccaagatcaccaaccaccccagcaacaaggtgaagagcgacccccagaaggccgtggaccagcccagacagctgttctgggagaagaagctgagcggcctgaacgccttcgacatcgccgaggagctggtgaagaccatggacctgcccaagggcctgcagggcgtgggccccggctgcaccgacgagaccctgctgagcgccatcgccagcgccctgcacaccagcaccatgcccatcaccggccagctgagcgccgccgtggagaagaaccccggcgtgtggctgaacaccacccagcccctgtgcaaggccttcatggtgaccgacgaggacatcagaaagcaggaggagctggtgcagcaggtgagaaagagactggaggaggccctgatggccgacatgctggcccacgtggaggagctggccagagacggcgaggcccccctggacaaggcctgcgccgaggacgacgacgaggaggacgaggaggaggaggaggaggagcccgaccccgaccccgagatggagcacgtgtag

SEQ ID NO: 99826 - protein, 516 aa, Artificial Sequence
  derived and/or modified sequence
MGFLKLIEIENFKSYKGRQIIGPFQRFTAIIGPNGSGKSNLMDAISFVLGEKTSNLRVKTLRDLIHGAPVGKPAANRAFVSMVYSEEGAEDRTFARVIVGGSSEYKINNKVVQLHEYSEELEKLGILIKARNFLVFQVKKYHRLKEEASKRAATLAQELEKFNRDQKADQDRLDLEERKKVETEAKIKQKLREIEENQKRIEKLEEYITTSKQSLEEQKKLEGELTEEVEMAKRRIDEINKELNQVMEQLGDARIDRQESSRQQRKAEIMESIKRLYPGSVYGRLIDLCQPTQKKYQIAVTKVLGKNMDAIIVDSEKTGRDCIQYIKEQRGEPETFLPLDYLEVKPTDEKLRELKGAKLVIDVIRYEPPHIKKALQYACGNALVCDNVEDARRIAFGGHQRHKTVALDGTLFQKSGVISGGASDLKAKARRWDEKAVDKLKEKKERLTEELKEQMKAKRKEAELRQVQSQAHGLQMRLKYSQSDLEQTKTRHLALNLQVGPGLQPCSPKAIHTFLA

SEQ ID NO: 99827 - protein, 289 aa, Artificial Sequence
  derived and/or modified sequence
  misc_feature (1)..(1): Xaa can be any naturally occurring amino acid
XWYTPTPFYSSLEAALLNFRPSAPVFRMLEVSIPTPHRYVRGKSNLMDAISFVLGEKTSNLRVKTLRDLIHGAPVGKPAANRAFVSMVYSEEGAEDRTFARVIVGGSSEYKINNKVVQLHEYSEELEKLGILIKARNFLVFQGAVESIAMKNPKERTALFEEISRSGELAQEYDKRKKEMVKAEEDTQFNYHRKKNIAAERKEAKQEKEEADRYQRLKDEVVRAQVQLQLFKLYHNEVEIEKLNKELASKNKEIEKDKKRMDKVEDELKEKKKELGKMMREQQQIEKEI

SEQ ID NO: 99828 - DNA, 1551 bp, Artificial Sequence
  derived and/or modified sequence
atgggcttcctgaagctgatcgagatcgagaacttcaagagctacaagggcagacagatcatcggccccttccagagattcaccgccatcatcggccccaacggcagcggcaagagcaacctgatggacgccatcagcttcgtgctgggcgagaagaccagcaacctgagagtgaagaccctgagagacctgatccacggcgcccccgtgggcaagcccgccgccaacagagccttcgtgagcatggtgtacagcgaggagggcgccgaggacagaaccttcgccagagtgatcgtgggcggcagcagcgagtacaagatcaacaacaaggtggtgcagctgcacgagtacagcgaggagctggagaagctgggcatcctgatcaaggccagaaacttcctggtgttccaggtgaagaagtaccacagactgaaggaggaggccagcaagagagccgccaccctggcccaggagctggagaagttcaacagagaccagaaggccgaccaggacagactggacctggaggagagaaagaaggtggagaccgaggccaagatcaagcagaagctgagagagatcgaggagaaccagaagagaatcgagaagctggaggagtacatcaccaccagcaagcagagcctggaggagcagaagaagctggagggcgagctgaccgaggaggtggagatggccaagagaagaatcgacgagatcaacaaggagctgaaccaggtgatggagcagctgggcgacgccagaatcgacagacaggagagcagcagacagcagagaaaggccgagatcatggagagcatcaagagactgtaccccggcagcgtgtacggcagactgatcgacctgtgccagcccacccagaagaagtaccagatcgccgtgaccaaggtgctgggcaagaacatggacgccatcatcgtggacagcgagaagaccggcagagactgcatccagtacatcaaggagcagagaggcgagcccgagaccttcctgcccctggactacctggaggtgaagcccaccgacgagaagctgagagagctgaagggcgccaagctggtgatcgacgtgatcagatacgagcccccccacatcaagaaggccctgcagtacgcctgcggcaacgccctggtgtgcgacaacgtggaggacgccagaagaatcgccttcggcggccaccagagacacaagaccgtggccctggacggcaccctgttccagaagagcggcgtgatcagcggcggcgccagcgacctgaaggccaaggccagaagatgggacgagaaggccgtggacaagctgaaggagaagaaggagagactgaccgaggagctgaaggagcagatgaaggccaagagaaaggaggccgagctgagacaggtgcagagccaggcccacggcctgcagatgagactgaagtacagccagagcgacctggagcagaccaagaccagacacctggccctgaacctgcaggtgggccccggcctgcagccctgcagccccaaggccatccacaccttcctggcctag

SEQ ID NO: 99829 - DNA, 870 bp, Artificial Sequence
  derived and/or modified sequence
tgatggtacacccccacccccttctacagcagcctggaggccgccctgctgaacttcagacccagcgcccccgtgttcagaatgctggaggtgagcatccccaccccccacagatacgtgagaggcaagagcaacctgatggacgccatcagcttcgtgctgggcgagaagaccagcaacctgagagtgaagaccctgagagacctgatccacggcgcccccgtgggcaagcccgccgccaacagagccttcgtgagcatggtgtacagcgaggagggcgccgaggacagaaccttcgccagagtgatcgtgggcggcagcagcgagtacaagatcaacaacaaggtggtgcagctgcacgagtacagcgaggagctggagaagctgggcatcctgatcaaggccagaaacttcctggtgttccagggcgccgtggagagcatcgccatgaagaaccccaaggagagaaccgccctgttcgaggagatcagcagaagcggcgagctggcccaggagtacgacaagagaaagaaggagatggtgaaggccgaggaggacacccagttcaactaccacagaaagaagaacatcgccgccgagagaaaggaggccaagcaggagaaggaggaggccgacagataccagagactgaaggacgaggtggtgagagcccaggtgcagctgcagctgttcaagctgtaccacaacgaggtggagatcgagaagctgaacaaggagctggccagcaagaacaaggagatcgagaaggacaagaagagaatggacaaggtggaggacgagctgaaggagaagaagaaggagctgggcaagatgatgagagagcagcagcagatcgagaaggagatctag

SEQ ID NO: 99830 - DNA, 1551 bp, Artificial Sequence
  derived and/or modified sequence
atgggctttctcaagttaatcgagatcgaaaactttaaaagttataagggaaggcagatcattggaccattccaaaggttcactgcaatcatcggcccgaacggatccggtaagtctaacctgatggatgctatctcatttgtattgggagagaagacaagcaatctcagagtgaaaacactgcgcgacttaattcatggagctcccgtgggtaagcctgcagctaatagagccttcgttagtatggtttactccgaggaaggtgctgaggacagaacctttgcaagagtcatcgtgggaggatcaagcgaatacaaaatcaataataaggtcgttcagctgcacgaatacagtgaagaactagagaaattgggcattcttatcaaagcaagaaatttcctggttttccaggtgaagaagtaccacaggctaaaggaagaagcctcaaaacgcgcagccacactggctcaggagcttgaaaagtttaacagggatcagaaagctgaccaggatcgtctggatctggaagaacgaaaaaaagtcgaaacggaggcaaagatcaaacagaaactccgggaaatcgaggagaaccagaagagaatcgaaaaattggaggagtacatcacaacgtctaagcagtctctcgaagagcagaagaaactcgaaggcgagttgacagaagaggtggagatggctaagcgaagaatcgacgagatcaacaaggaattaaatcaggtgatggagcagcttggagacgcaaggatcgatagacaagaatcaagtcgccaacaacgtaaagctgagattatggaatcaatcaagaggctgtatccagggtcagtatacggcaggctgattgacctgtgtcagcctacccaaaagaagtaccagatcgcagttaccaaagtactggggaagaatatggatgcaataatcgtggacagtgaaaagacgggtcgagattgtattcaatatattaaagagcaacgaggagagcctgaaacttttttacctttggattaccttgaggtgaagccgaccgacgagaagttgagggaactcaagggcgcaaagttagtcattgacgtgattcggtacgagcctcctcatattaaaaaagctttacagtatgcgtgtggaaacgccctggtctgcgataatgtggaggacgcccggcgaattgcatttggtggacatcagcgccataagaccgtcgcactggacggaacactttttcaaaagtccggggttatttcagggggcgccagcgatctcaaagccaaagccaggcgatgggacgagaaggccgtagataaactcaaggaaaaaaaagaaaggttaactgaagaactaaaagaacagatgaaagccaaaaggaaagaggccgagctccgccaggtccaatctcaggctcatggattgcagatgcgacttaagtacagtcagtcagatctggagcagaccaaaacgcgccatctcgcactcaacttgcaggtgggcccaggactgcagccatgttcccccaaagccatacacaccttcctggcgtag

SEQ ID NO: 99831 - DNA, 870 bp, Artificial Sequence
  derived and/or modified sequence
tagtggtacacccccacgcccttttacagtagcctggaggctgcactgttgaacttcagaccaagcgcacccgtctttcggatgctcgaagtaagcattcctactccccatcgctacgtcagaggaaaaagtaatttgatggatgctatcagttttgtgctcggcgagaagacatctaatcttagggtgaaaacactgcgtgatctgatccacggggccccagtcggcaaacccgccgctaatagggcttttgtctccatggtatactccgaggagggcgctgaggatcggaccttcgccagggtcattgtggggggaagctctgagtacaagataaataacaaggtagtgcagctgcatgaatacagcgaggagctcgagaaactgggaattctgattaaggcgcgcaacttcctggtgttccagggcgctgtggaaagtatcgccatgaagaaccctaaggagaggaccgccctgttcgaggagatatcacggtccggtgagctcgctcaagaatatgataaaagaaagaaagaaatggttaaagctgaggaagacacccagttcaattaccatagaaaaaaaaatatcgcagccgaaagaaaggaggccaaacaggaaaaggaagaagctgatcgctatcaacgattgaaggacgaagttgtccgggcccaggttcagttacagctttttaaactgtaccacaatgaagtcgaaattgagaagttaaataaggagttagcgagcaaaaataaggagattgaaaaagataagaagcggatggacaaggtggaggatgaacttaaggagaagaaaaaggaactgggaaagatgatgcgtgaacagcagcaaatagagaaggaaatctag

SEQ ID NO: 99832 - DNA, 1551 bp, Artificial Sequence
  derived and/or modified sequence
atgggcttcctgaagctgattgaaattgagaacttcaagagctacaagggccggcagatcatcggccccttccagcgcttcaccgccatcatcggccccaacggcagcggcaagagcaacctgatggatgccatcagctttgtgctgggggagaagaccagcaacctgcgggtgaagaccctgcgggacctgatccacggggcccctgtgggcaagccagctgccaacagagcctttgtgtccatggtgtacagcgaggagggcgctgaggacaggacctttgcccgggtcatcgtgggcggcagcagcgagtacaagatcaacaacaaggtggtgcagctgcacgagtacagcgaggagctggagaagctgggcatcctgatcaaggccaggaacttcctggtgttccaggtgaagaagtaccaccggctgaaggaggaggccagcaagagagctgccaccctggcccaggagctggagaagttcaacagagaccagaaggctgaccaggaccggctggacctggaggagaggaagaaggtggagacagaggccaagatcaagcagaagctgcgggagattgaggagaaccagaagagaattgagaagctggaggagtacatcaccaccagcaagcagagcctggaggagcagaagaagctggagggggagctgacagaggaggtggagatggccaagagaagaattgatgagatcaacaaggagctgaaccaggtgatggagcagctgggagatgccagaattgaccggcaggagagcagccggcagcagaggaaggccgagatcatggagagcatcaagaggctgtacccaggctctgtgtatggccgcctgattgacctgtgccagcccacccagaagaagtaccagattgctgtgaccaaggtgctgggcaagaacatggatgccatcatcgtggacagcgagaagacaggccgggactgcatccagtacatcaaggagcagagaggagagcctgagaccttcctgcccctggactacctggaggtgaagcccacagatgagaagctgcgggagctgaagggggccaagctggtgattgatgtgatccgctatgagcccccccacatcaagaaggccctgcagtatgcctgtggaaatgccctggtgtgtgacaacgtggaggatgcccggcgcatcgccttcggcggccaccagaggcacaagacagtggccctggatggcaccctcttccagaagtctggagtcatctctggaggagccagtgacctgaaggccaaggcccggcgctgggatgagaaggctgtggacaagctgaaggagaagaaggagcggctgacagaggagctgaaggagcagatgaaggccaagaggaaggaggccgagctgcggcaggtgcagagccaggcccacggcctgcagatgaggctgaagtacagccagagcgacctggagcagaccaagaccaggcacctggccctgaacctgcaggtgggccctggcctgcagccctgcagccccaaggccatccacaccttcctggcctag

SEQ ID NO: 99833 - DNA, 870 bp, Artificial Sequence
  derived and/or modified sequence
tgatggtacacccccacccccttctacagcagcctggaggccgccctgctgaacttccggcccagcgcccctgtgttcaggatgctggaggtgtccatccccaccccccacagatatgtgcggggcaagagcaacctgatggatgccatcagctttgtgctgggggagaagaccagcaacctgcgggtgaagaccctgcgggacctgattcatggagcccctgtgggcaagccagctgccaacagagcctttgtgtccatggtgtacagcgaggagggcgctgaggacaggacctttgcccgggtgattgtgggcggcagcagcgagtacaagatcaacaacaaggtggtgcagctgcacgagtacagcgaggagctggagaagctgggcatcctgatcaaggccaggaacttcctggtgttccagggcgctgtggagagcatcgccatgaagaaccccaaggagaggacagccctgtttgaggagatcagccgcagcggggagctggcccaggagtatgacaagaggaagaaggagatggtgaaggccgaggaggacacccagttcaactaccacaggaagaagaacattgctgctgagaggaaggaggccaagcaggagaaggaggaggccgaccgctaccagaggctgaaggatgaggtggtgcgggcccaggtgcagctgcagctgttcaagctgtaccacaatgaggtggagattgagaagctgaacaaggagctggccagcaagaacaaggagattgagaaggacaagaagaggatggacaaggtggaggatgagctgaaggagaagaagaaggagctgggcaagatgatgagggagcagcagcagatcgagaaggagatctag

SEQ ID NO: 99834 - DNA, 1551 bp, Artificial Sequence
  derived and/or modified sequence
atgggcttcctgaagctgatcgagatcgagaacttcaagagctacaagggtcgccagataatcgggccatttcagcgtttcacagctattatcggccctaacggttccggtaaaagtaacctcatggacgccattagtttcgttttgggagagaagacttctaatttgcgtgttaagactctaagggacctgatccacggggcgccggtggggaagcctgccgctaatagggcgtttgtcagcatggtctacagtgaggaaggcgcagaggacaggacgtttgccagagtaatcgtgggtggatcctctgagtacaaaataaataacaaggtggtacagcttcacgaatactccgaggagcttgaaaaactgggtatattgatcaaggcccgcaatttcctggtctttcaggtgaagaaataccaccggttgaaggaggaagcctccaaaagagccgccactctggctcaggaactcgaaaagtttaaccgggaccaaaaggcggaccaggacagacttgatctggaggagcggaaaaaggttgagaccgaagctaagattaaacagaagcttcgggagatcgaagaaaatcaaaaaagaattgagaagctggaagaatatattactacatcaaagcaatccctcgaggagcagaagaagctcgagggggaactgactgaggaggtggagatggctaagaggaggatcgacgagatcaacaaagaactaaatcaggtgatggagcaacttggagacgctcgaatcgacagacaggagtcttctcgtcagcagagaaaggccgaaataatggaaagtattaagcgattgtacccaggttcagtgtatggacggttgattgatctctgtcagcctactcaaaaaaagtaccaaattgcggtgacaaaggttctcgggaaaaacatggatgcaatcatcgtggactcagaaaaaaccggccgggactgtatccaatatatcaaggaacagaggggggaacccgagacgtttttacccctggactacctggaggtaaagcccaccgacgaaaaattaagggagctcaagggggcaaagttggtgatagatgtcatacgctatgagcctccccatattaaaaaggccctccaatatgcgtgtggaaatgccttagtatgtgataatgtggaagacgcccggcggattgctttcggcggccaccagcgacacaagaccgtcgctttagatgggaccctgtttcagaaatcaggtgtcatctcaggtggagccagtgacctgaaggccaaagcgaggcgctgggacgagaaagctgtcgacaagctcaaggagaaaaaggaacgactgaccgaagagctgaaggaacaaatgaaggcaaagcggaaggaggcagaactgagacaggttcagtcccaggcccacgggctccagatgcgacttaaatacagccagtccgacctcgaacagaccaagacccggcatttggctctgaaccttcaagtggggccgggcctgcagccctgctcccccaaagcaatccacacctttttagcctag

SEQ ID NO: 99835 - DNA, 870 bp, Artificial Sequence
  derived and/or modified sequence
tgatggtacacccccacccccttctacagcagcctggaggccgccctcctaaacttccggccttccgcacctgtgtttcggatgctcgaggtgtcaatacctactccacataggtatgttcgcggtaagtcgaacctgatggatgccatcagttttgtgttgggtgagaaaacctccaatctgcgcgtaaagacactgcgggacttgatacacggcgcgccagtgggaaagccagccgcgaaccgagctttcgtgtctatggtgtatagcgaagagggggctgaggacagaaccttcgccagggtaatagtggggggctccagcgagtataagatcaataacaaggttgtgcagttgcatgagtatagcgaggaactcgagaaactgggtattttaattaaggccagaaactttctggtgtttcaaggcgcagtagagtcaatcgctatgaaaaatccaaaagaacgcaccgcccttttcgaggagatcagccgcagtggggaattagcgcaggaatatgataagaggaagaaagagatggtaaaggccgaagaagatacccagtttaattatcataggaagaagaatatagctgctgaaaggaaagaggccaaacaagagaaggaggaggccgaccgctatcagcggctcaaagatgaggtagtgagagcccaggttcagctccagctgttcaaattgtatcacaatgaagtcgagatcgagaaactgaacaaggagttagcatctaaaaataaagaaattgagaaggacaagaaacgcatggacaaggttgaggacgaactaaaggagaagaagaaggagctgggcaagatgatgcgagaacagcaacaaatcgaaaaagagatctag

SEQ ID NO: 99836 - DNA, 1551 bp, Artificial Sequence
  derived and/or modified sequence
atgggattcctgaaattgatcgagatcgagaattttaagagctataaggggaggcaaattatcggaccatttcaacggtttacagcgataattggtcccaacggctccggaaaatccaacctcatggatgccatcagttttgtgttgggcgagaagaccagcaacctgagagtgaaaactctgcgggatctgattcatggagcgcctgtgggcaagcctgcagcaaatagggcattcgttagcatggtgtacagcgaggaaggtgctgaggacaggacgttcgctcgcgttattgtgggaggctcatcagagtacaagatcaacaacaaagtagtgcagctccacgaatattctgaggaactcgaaaagcttggtatactgatcaaggctcggaatttcctggtgtttcaagtgaaaaagtaccacagactcaaggaggaagcctccaagcgagcggctactttggctcaagagctcgaaaaatttaatagggaccagaaagctgatcaggacaggctagatctcgaggaaaggaagaaagtcgagaccgaagctaaaattaagcagaagctgcgggagatcgaggagaatcagaagaggattgaaaagttagaagaatacatcactacaagcaagcaaagcctcgaagaacaaaagaagcttgaaggggaactgaccgaagaggtcgagatggccaagcggcgaatcgatgaaatcaacaaagagttgaaccaggtgatggagcagctgggtgatgccagaatcgacagacaggagtcaagtaggcagcaaagaaaggcagaaatcatggagtctatcaaacgcctgtaccctggctcggtctacggcagattaatagatctgtgtcagccgacacagaagaaataccagatcgccgtgacgaaagttcttggtaagaatatggacgccattatagttgacagtgaaaaaacaggaagggattgcattcagtacatcaaagaacagaggggcgaaccagagactttcctgccattggattatctcgaggtgaagccaaccgatgagaagctgcgggaactgaaaggagcgaagctggtgatcgatgtgatccgctatgagccacctcacattaaaaaagcactgcagtatgcctgtggcaacgccctggtgtgcgataatgtcgaggacgcccgaagaatcgcgttcggcggtcatcagcggcacaagaccgttgcactcgacgggacactgtttcagaagagcggcgtaatcagtggaggtgccagcgacttgaaggcaaaggccagacgctgggacgaaaaggcggttgataaactgaaagagaaaaaagaaagattgacggaagagctcaaagaacaaatgaaggccaagaggaaagaggccgagctgcgacaggtacagtctcaggcgcacggtttgcagatgcggttaaaatattcccaaagcgacctggagcagactaaaacaaggcatctggccctcaatttgcaggtgggacccggactgcagccatgctcccctaaagctattcatacgtttctcgcttag

SEQ ID NO: 99837 - DNA, 870 bp, Artificial Sequence
  derived and/or modified sequence
tgatggtacacccctacccctttttactcatcattggaagcggcactcctgaattttcgcccttccgctcctgtattccgcatgcttgaagtgagtatccctacaccccatcgttacgtgcgtgggaagtctaatttgatggatgctatctctttcgttctcggggagaaaaccagcaacctccgggtgaagaccttaagagatttgattcacggcgcaccagtgggcaagcctgcggcaaaccgcgcatttgtgtcaatggtttactctgaggaaggagcagaagatagaaccttcgcgcgtgtgatcgtcgggggatcatccgagtacaagattaacaacaaagtcgtccagctgcatgaatattctgaggagttagaaaagttgggaatcctcattaaagcacgcaattttctggtgttccaaggggctgtggagtctatcgccatgaagaatccaaaagagcgcaccgccctatttgaagaaatttctagaagtggagaactggctcaagagtatgacaaaaggaagaaagagatggtgaaagctgaagaggatacccagttcaactatcacagaaagaagaacattgccgcagagcgaaaggaagccaaacaagagaaggaggaggctgacagataccaaagattgaaggacgaggtggttcgggcacaggttcagctgcaactctttaagctgtaccataatgaggtggagatagagaagcttaataaagaactggcctctaagaacaaagagattgagaaggataagaagaggatggacaaagtggaggacgaactaaaggagaaaaagaaggagctggggaagatgatgagggaacaacaacaaattgagaaggagatttag

SEQ ID NO: 99838 - DNA, 1761 bp, Artificial Sequence
  derived and/or modified sequence
agttctcgggcgtacggcgcggcctgtcctactgccgccggcgccgcggccgtcatggggttcctgaaactgattgagattgagaactttaagtcgtacaagggtcgacagattatcggaccatttcagaggttcaccgccatcattggacccaatggctctggtaagtcaaatctcatggatgccatcagctttgtgctaggtgaaaaaaccagcaacctgcgggtaaagaccctgcgggacctgatccatggagctcctgtgggcaagccagctgccaaccgggcctttgtcagcatggtctactctgaggagggtgctgaggaccgtacctttgcccgtgtcattgtaggaggttcttctgagtacaagatcaacaacaaagtggtccaactacatgagtacagtgaggaattagagaagttgggcattctcatcaaagctcgtaacttcctcgttttccaggtgaagaaataccaccggttgaaagaagaagccagcaagagagcagctaccctggcccaggagctggagaaattcaatcgagaccagaaagctgaccaggaccgtctggatctggaagaacggaagaaagtagagacagaggccaagatcaagcaaaagctgcgggaaattgaagagaatcagaagcggattgagaaactggaggaatacatcaccactagcaagcagtccctagaagagcagaagaagctagagggggagctgacagaggaggtggagatggccaagcggcgtattgatgaaatcaataaggagctgaaccaggtgatggagcagctaggggatgcccgcatcgaccgccaggagagcagccgccagcagcgaaaggcagagataatggaaagcatcaagcgcctttaccctggctctgtgtacggccgcctcattgacctatgccagcccacacaaaagaagtatcagattgctgtaaccaaggttttgggcaagaacatggatgccattattgtggactcggagaagacaggccgggactgtattcagtatatcaaggagcagcgtggggagcctgagaccttcttgcctcttgactacctggaggtgaagcctacagatgagaaactccgggagctgaagggggccaagctagtgattgatgtgattcgctatgagccacctcatatcaaaaaggccctgcagtatgcttgtggcaatgcccttgtctgtgacaacgtggaagatgcccgccgcattgcctttggaggccaccagcgccacaagacagtggcactggatggaaccctattccagaagtcaggagtgatctctggtggggccagtgacctgaaggccaaggcacggcgctgggatgagaaagcagtagacaagttgaaagagaagaaggagcgcttgacagaggagctgaaagagcagatgaaggcaaaacggaaagaggcagagctgcgtcaggtgcagtctcaggcccatggactgcagatgcggctcaagtactcccagagtgacctagaacagaccaagacacgacatctagccctgaatctgcaggtggggcctggccttcagccctgttctccaaaggccatccacacattcctggcctaggtttctctgggggtggggaacttgtttcacttccccgtctcctcccagcctgccgcagggagtcaggtatagcatagagtcagacagccaggggttcagagcttggctctgccttgagtatgacattaggcaagtattttcacctctcagtgtcaa

SEQ ID NO: 99839 - DNA, 868 bp, Artificial Sequence
  derived and/or modified sequence
attggtacactccaactcctttctactcttctctggaggcggcacttttgaatttcagacccagcgctccagtctttagaatgcttgaggtgtcgatccccaccccccaccgctatgtcagaggtaagtcaaatctcatggatgccatcagctttgtgctaggtgaaaaaaccagcaacctgcgggtaaagaccctgcgggacctgatccatggagctcctgtgggcaagccagctgccaaccgggcctttgtcagcatggtctactctgaggagggtgctgaggaccgtacctttgcccgtgtcattgtaggaggttcttctgagtacaagatcaacaacaaagtggtccaactacatgagtacagtgaggaattagagaagttgggcattctcatcaaagctcgtaacttcctcgttttccagggtgctgtggaatctattgccatgaagaaccccaaagagaggacagctctatttgaagagattagtcgttctggggagctggcgcaggagtatgacaagcgaaagaaggaaatggtgaaggctgaagaggacacacagtttaattaccatcgcaagaaaaatattgcggctgaacgcaaggaagcaaagcaggagaaagaagaggctgaccggtaccagcgcctgaaggatgaggtagtacgggctcaggtacagctgcagctctttaagctttaccataatgaagtggaaattgagaagctcaacaaggaactggcctcaaagaacaaggagatcgagaaggacaagaagcgtatggacaaggtggaggatgaactgaaggagaagaagaaggagctgggcaaaatgatgcgggagcagcagcagattgagaaggagatcaa

SEQ ID NO: 99840 - DNA, 396 bp, Artificial Sequence
  derived and/or modified sequence
atgggtaaaaagcttgatctcagcaagcttacagatgaggaggcccagcacgttctggaagtagtccagcgcgattttgatctgcgccggaaggaagaggagaggctggaggccctgaaggggaagatcaaaaaagagtcctctaaacgggaactactcagtgacacagcccatctgaatgagacccactgcgcacgctgcctccagccctatcagcttctcgtcaattctaaacggcagtgtctggagtgcggtctgtttacatgcaagagctgcgggcgtgtgcacccggaggagcagggatggatctgcgacccttgccacctcgctcgggtggttaagatcggctccctcgaatggtactatgagcatgtgaaggcccggttcaagagatag

SEQ ID NO: 99841 - DNA, 213 bp, Artificial Sequence
  derived and/or modified sequence
atgggcaagaaactggatctgagtaagctcacagacgaagaagcccagcacgttctggaggttgtacaacgagatttcgaccttcgtcggaaggaagaagagcgcttggaggctctgaagggaaaaatcaaaaaggaatcgtcaaaacgtgagttgctctctgacaccgcccatcttaacgagactcactgcgcaagatgtttgcagccttag

SEQ ID NO: 99842 - DNA, 396 bp, Artificial Sequence
  derived and/or modified sequence
atgggcaagaagctggacctgagcaagctgacagatgaggaggcccagcacgtgctggaggtggtgcagagggactttgacctgcggaggaaggaggaggagcggctggaggccctgaagggcaagatcaagaaggagagcagcaagcgggagctgctgagtgacacagcccacctgaatgagacccactgtgcccgctgcctgcagccctaccagctgctggtgaacagcaagaggcagtgcctggagtgtggcctcttcacctgcaagagctgtggccgggtgcaccctgaggagcagggctggatctgtgacccctgccacctggcccgggtggtgaagattggcagcctggagtggtactatgagcacgtgaaggcccgcttcaagaggtag

SEQ ID NO: 99843 - DNA, 213 bp, Artificial Sequence
  derived and/or modified sequence
atgggcaagaagctggacctgagcaagctgacagatgaggaggcccagcacgtgctggaggtggtgcagagggactttgacctgcggaggaaggaggaggagcggctggaggccctgaagggcaagatcaagaaggagagcagcaagcgggagctgctgagtgacacagcccacctgaatgagacccactgtgcccgctgcctgcagccctag

SEQ ID NO: 99844 - DNA, 744 bp, Artificial Sequence
  derived and/or modified sequence
attgattcacaacacccttatgtgtaactcccattactattctcatcatggagaagagagaaaaaagtcagtagaagattcagtaacaggtccaagatgacacagcttgtgggccacactcctagttggaattccgactcttgcagttggtttgagcccacatgcttaacctcacacacacacacaccattcagaaagaatatagaagacaccattaataatgattgctttctggtcatggagataggaaaactgaattgcaaaagcggttcctggagaacagaatgtgctggaccagggactgagcgtcccccggagagggtccggtgtgaccccgacaagaagcagaaatggggaagaaactggatctttccaagctcactgatgaagaggcccagcatgtcttggaagttgttcaacgagattttgacctccgaaggaaagaagaggaacggctagaggcgttgaagggcaagattaagaaggaaagctccaagagggagctgctttccgacactgcccatctgaacgagacccactgcgcccgctgcctgcagccctaccagctgcttgtgaatagcaaaaggcagtgcctggaatgtggcctcttcacctgcaaaagctgtggccgcgtccacccggaggagcagggctggatctgtgacccctgccatctggccagagtcgtgaagatcggctcactggagtggtactatgagcatgtgaaagcccgcttcaagaggt

SEQ ID NO: 99845 - DNA, 396 bp, Artificial Sequence
  derived and/or modified sequence
atgggcaagaagctggacctgagcaagctgaccgacgaggaggcccagcacgtgctggaggtggtgcaacgggatttcgatcttagaagaaaagaggaagaaagactggaggccctcaagggcaagattaagaaggagagtagcaagcgcgaactactctcagacactgctcacctcaatgaaacacactgtgctcggtgcctacagccttaccaactacttgtgaactccaagaggcagtgtctcgagtgtgggctcttcacctgcaagagctgtggcagggtgcatcccgaggaacagggatggatctgcgacccgtgtcacctggcccgcgtggtaaagataggatcattggagtggtactatgagcatgtcaaggcgaggttcaaacgatag

SEQ ID NO: 99846 - DNA, 213 bp, Artificial Sequence
  derived and/or modified sequence
atgggcaagaagctggacctgagcaagctgaccgacgaggaggcccagcacgtcctggaagtggttcagagagacttcgacctccgcagaaaagaggaggagcggctagaggcgctgaaaggcaagatcaaaaaggaatctagcaaaagagaactgttatcagacaccgcccaccttaatgaaactcactgcgcacggtgcctgcagccgtag

SEQ ID NO: 99847 - DNA, 396 bp, Artificial Sequence
  derived and/or modified sequence
atggggaagaaactggacctgtctaaactgacagacgaagaagcccaacatgttttggaagtggttcagcgtgatttcgatcttagaagaaaggaggaggagcggctagaggccctcaagggaaaaatcaaaaaagaatccagcaagcgggaactgctgtccgatacagcccatcttaacgaaacccactgtgccaggtgtctccagccctatcaactgctggtcaattccaaacggcagtgcctcgagtgtggacttttcacttgcaaatcctgtggcagggttcaccctgaggagcagggctggatctgcgatccttgtcacctggccagggtggtgaaaattggatccttggaatggtattacgagcatgttaaagccaggtttaagaggtag

SEQ ID NO: 99848 - DNA, 213 bp, Artificial Sequence
  derived and/or modified sequence
atgggcaaaaaactcgatcttagtaaactgacagacgaggaggcccagcatgttctcgaggtggttcagagagatttcgacttgcggagaaaagaagaagagcggcttgaggccctgaagggtaagatcaaaaaagagtcctccaaacgcgagcttttatccgacacggcccatcttaacgaaactcactgtgccagatgcttacaaccctag

SEQ ID NO: 99849 - DNA, 396 bp, Artificial Sequence
  derived and/or modified sequence
atgggcaagaagctggacctgagcaagctgaccgacgaggaggcccagcacgtgctggaggtggtgcagagagacttcgacctgagaagaaaggaggaggagagactggaggccctgaagggcaagatcaagaaggagagcagcaagagagagctgctgagcgacaccgcccacctgaacgagacccactgcgccagatgcctgcagccctaccagctgctggtgaacagcaagagacagtgcctggagtgcggcctgttcacctgcaagagctgcggcagagtgcaccccgaggagcagggctggatctgcgacccctgccacctggccagagtggtgaagatcggcagcctggagtggtactacgagcacgtgaaggccagattcaagagatag

SEQ ID NO: 99850 - DNA, 213 bp, Artificial Sequence
  derived and/or modified sequence
atgggcaagaagctggacctgagcaagctgaccgacgaggaggcccagcacgtgctggaggtggtgcagagagacttcgacctgagaagaaaggaggaggagagactggaggccctgaagggcaagatcaagaaggagagcagcaagagagagctgctgagcgacaccgcccacctgaacgagacccactgcgccagatgcctgcagccctag

SEQ ID NO: 99851 - protein, 403 aa, Artificial Sequence
  derived and/or modified sequence
MASPRTRKVLKEVRVQDENNVCFECGAFNPQWVSVTYGIWICLECSGRHRGLGVHLSFVRSVTMDKWKDIELEKMKAGGNAKFREFLESQEDYDPCWSLQEKYNSRAAALFRDKVVALAEGREWSLESSPAQNWTPPQPRTLPSMVHRVSGQPQSVTASSDKAFEDWLNDDLGSYQGAQGNRYVGFGNTPPPQKKEDDFLNNAMSSLYSGWSSFTTGASRFASAAKEGATKFGSQASQKASELGHSLNENVLKPAQEKVKEGKIFDDVSSGVSQLASKCQRRLCCHQSHCSAGHLGRAFCPVSWHEALCGQTGREEQASLLPPKHVVGALEVCARGCPRCHVPHTPGTAAEWPGRLCLSRESVVRDGGTSPPFFRGKQRAPWTAPRRATVIRTAVWTTSKTAT

SEQ ID NO: 99852 - DNA, 522 bp, Artificial Sequence
  derived and/or modified sequence
atgatggcacaattattccttctgcaggcaaacgccgttcttccgctaagtcacgaaataaaggtgaaacgccagattcggttgccagctccactgtacccaccagagcggaatgattccaggagttttcagatcccacaggacctgagagagaagggctgggaggaaggacaacagcacttcgctgggaaggccgctgatgcctttcccgcaccagtgcaattagaagggctggaggccggacagacaaccctggcttcccccgaggtcggtccgtggcgccctaagcgcctgtcaggagtgtgtctgctttcagccctgctcccggatccgtgcaagactaatggcaccttcttactgcagaagcaccatctcccatcactcttagccgtgatcttgtttcccgtgatcattcttaccggagcgtcttttgcacatttgttcgtcgccctgttcgtttctcaccttctgttgaaactgcccctgggggctggtatgaggatgcagcgtgatgccagatag

SEQ ID NO: 99853 - DNA, 1212 bp, Artificial Sequence
  derived and/or modified sequence
atggcctctcccagaacacggaaggtgttgaaagaggttagagtgcaggatgaaaataacgtttgctttgagtgtggggcgtttaaccctcagtgggtatccgtcacttacggaatctggatttgcctcgaatgttcaggtcgccacaggggcctgggcgtgcatctcagctttgtgaggtcggttacgatggacaaatggaaggacatcgagctggaaaagatgaaagccggcggaaacgccaagttcagagagttccttgagtcgcaggaagactatgatccatgttggtccctccaagagaagtacaatagtagggccgccgccctgttccgagacaaggttgtcgccctcgccgaagggagagagtggagtctggaatcttcccccgcgcagaactggactcccccacaacctcgcactctgcctagcatggtacaccgggtatcgggccaaccacagtcggtgacagcatcctcagacaaagcttttgaggattggctgaacgatgacttgggtagctatcagggggctcaagggaaccgctatgtgggctttgggaacaccccacctcctcagaagaaggaagacgacttcctcaataacgctatgtcctccctgtactctggatggagctctttcacaacgggggctagccggtttgcctctgctgccaaggagggagctacaaagtttggatcgcaagcctctcagaaggcaagcgagctgggccactctcttaacgagaacgtcctaaaaccggcacaagagaaggtcaaggaaggtaagatttttgatgatgtgtcttctggcgtgtcccagctggcctcaaaatgccaacggcgcctttgttgtcatcaaagtcattgcagcgcgggacatttggggagggcattctgccccgtctcttggcacgaggccctctgcggacagacaggcagagaagagcaggcttcactgctgccgcctaagcacgtggtcggtgcactggaggtttgcgcacgcggctgccccagatgccacgtcccacacacccctggtacagcggctgagtggcccggcaggctgtgcctgtcccgcgaatccgttgttcgcgacggagggaccagccctccattcttccggggtaagcagcgggccccgtggacagctcctcgtagggccacagttataagaacagcagtgtggaccacttctaaaactgctacatag

SEQ ID NO: 99854 - DNA, 786 bp, Artificial Sequence
  derived and/or modified sequence
atggccagcccccggacacggaaggtcctcaaagaagtgagagtgcaggacgagaataatgtttgtttcgagtgtggcgcctttaacccacaatgggttagtgtcacttacggaatatggatttgtctggaatgttctggtcgccacagggggctgggagtgcatctgagctttgtgagatcagtcacgatggacaaatggaaagacatagagctcgaaaaaatgaaagcaggcggcaatgctaagtttagggaatttctggaatctcaagaagactacgacccatgctggtccctgcaggagaaatacaacagtcgcgcggcagctctgttcagagataaggtcgtcgctttggcagagggcagagaatggtcactggagagcagccctgcacagaactggacaccgccgcaacctcgtaccttacctagtatggtacatagagtgagcggccagccccagagcgttactgcatcctccgataaagcatttgaagactggctcaacgatgacctcggaagctaccagggagcacagggtaatcgctacgtcgggttcggaaacacgcccccaccccaaaaaaaagaggacgatttccttaacaacgctatgtcttctctctactccggttggtcctcatttaccaccggcgcaagccggttcgcaagcgcagctaaagaaggcgccactaaattcggatctcaggcatcccaaaaggcaagcgaactaggccacagcctgaatgagaacgttctgaaaccggcccaggagaaagttaaagagtag

SEQ ID NO: 99855 - DNA, 3467 bp, Artificial Sequence
  derived and/or modified sequence
gggcgaccgggcgcatcctcattgcagtgcggcggccctacctcggccctggcctgaccccggcggccctgcccgcccctccctccagcatcatggccagcccaagaaccaggaaggttcttaaagaagtcagggtgcaggatgagaacaacgtttgttttgagtgtggcgcgttcaatcctcagtgggtcagtgtgacctacggcatctggatctgcctggagtgctcggggagacaccgcgggcttggggttcacctcagctttgtgcgctctgttactatggacaagtggaaggacattgagcttgagaagatgaaagctggtgggaatgctaagttccgagagttcctggagtctcaggaggattacgatccttgctggtccttgcaggagaagtacaacagcagagccgcggccctctttagggataaggtggtcgctctggccgaaggcagagagtggtctctggagtcatcacctgcccagaactggaccccacctcagcccaggacgctgccgtccatggtgcaccgagtctctggccagccgcagagtgtgaccgcctcctcggacaaggcttttgaagactggctgaatgatgacctcggctcctatcaaggggcccaggggaatcgctacgtggggtttgggaacacgccaccgcctcagaagaaagaagatgacttcctcaacaacgccatgtcctccctgtactcgggctggagcagcttcaccactggagccagccggtttgcctcggcagccaaggagggcgctacaaagtttggatcccaagcgagtcagaaggcgtccgagctgggccacagcctgaacgagaacgtcctcaagcctgcgcaggagaaggtgaaggagggaaagatttttgatgatgtctccagtggggtctctcagttggcgtccaagtgccagcgccgtctttgctgccatcagtcccactgctctgcgggccatttggggcgtgcattttgtcctgtttcctggcatgaggcgctctgcggacagacggggagggaagagcaggcctcgctcctcccccccaagcatgtggtgggagctcttgaggtctgtgcacgaggctgtcctcgctgccatgtcccgcacacacctggcaccgctgcagagtggccggggcgtctgtgtctgtccagggagtcggtagtaagggatggcgggacgtcaccacctttttttcggggaaagcagagggccccttggacagcccctcggagggccacagttatcagaacagcggtctggaccacttccaaaacagcaacatagaccagagcttctgggagacctttggaagtgctgagcccaccaagacccgcaagtccccgagcagcgacagctggacgtgcgcggacacctccaccgagaggaggagctcggacagctgggaggtgtggggctcggcctccaccaacaggaacagcaacagcgacggcggggagggcggggagggcaccaagaaggcagtgccgccggccgtgcccactgatgatggctgggacaaccagaactggtagggcccactgcgcccccgtccccagcgcccccgggcgacttcgtgtttgcactctgccctcgtcgttcctcctccttccatttgacccaagaatcagcaactgcagtgtgaggacagcgtctcgggaggcaggaccctagggagacccgggtgtgcgccgcctgcgcgtggggagtcttcggtgcgtgggggcggcttgctgtccagcctgtgtgggggccgtcccgtcccacactcccctgggcattcttggactcaaggccggggctctgcgtggcttgctgggaggtgggctgcagcacagaggcctgtgactgcgttccagcggccagttcactacgcagtatctctggggcctgggaccagccacgtgccgagctgtcagcgacgtgaggtgtcccttctcgttgagatatttaactttggttttgctctagttctttctttttgaagagagtgactggagtggtaaagatggaaatgctggaaatgatactggcgctcacgctgccatccgaccaccctcggctcccgagtccacgcctgcctgggcctgtgctgtcagacccgcgtcggtcgtaaccctctgtggctcccctgcatcagcaccgtcccaccaccaagttcaccaggttcaccagacacggcctccacaatagccacacccacacctgagctgttctcagtgctggaacttgaccatcctggaacaccctggaagaaaaaggagcgcagggtgggccctcggccctgatgcaggagggtgcgatagcggacgtggccaggcaggaggggccgggttcaggagctgagcaggggatgcctgtgcgtggtgcctgggtctagggaagctccagccccaggatggggctgccctgcacaccggtgcccgccacatgccaaccctcacctccccgaggactggatgatgtgctgccacgtgtgactcgtctcccttgtctgccctgtgtgaccctcagtcttggccagccatgcatgcgcccgaagctcgtgcagtttgtacgtgaggtgctctcctccctgccaccatgctcatcactctggccttggccatgctccctggtcaccccacttcccggtcgccgtctgcagcactcctggagcagcctgggcccttcagcccctgtgctcgtcccaccctagggactcagccacttgcagaacaggatgggaccgagatttcagcgagccctcctggcgcccggtcctccctgtgggcaccagccctcttggtagctggtgtggagggccggtgtccttggctgccacggagggatttgatcaccgaagcagccacctgctgtagttggacctgaggtcagaggcggggcatcagaggctcaaggtgctgagaagccaccgggaaagcagccagcacaaagggcccaggaagccagcccccgagagctgagcgtgggggtctttgagtgtctttctccaagctgagacgtgggcggccgcgtggtatctcccgagggctgcttggaccctggtgggctgagtgctccgaggaggggtggactccaccttggacagtgggatgtggtgttccacatgtgcctgtttccacgccagcaccttgacttggcagcatggagccaaggtctgtccccgcccaggagggtgccttcctcgggggtagggggacggcccactctgccccagggagtcccttttgatgggaagtgcagtcagcagcgtggaggtgtctgggccaccttcagaaggtggatgtggtggccgagaccccgtccacggagggtgatggcctttcccttctgcaggtgcgggcaggtgggcctgggaccggtgctggggcctctccttgctgtgtgtgagggcccaggtggaaggcgcggacctgacagcattccaataaagcatacgggaacatg

SEQ ID NO: 99856 - DNA, 995 bp, Artificial Sequence
  derived and/or modified sequence
acccgcaccccggatctggaatctcccaccggttacgggagtccagagggtccctgcccacgcacgtcgcctcccggggcgcgagcaggaccctgccccgtccgcttcaacacccttttcccgagctccttcggacccaggactcggcctggacacatcccagtcaggtggcctctgaagcccggtggggcttccaccccctaagaacatcatggccagcccaagaaccaggaaggttcttaaagaagtcagggtgcaggatgagaacaacgtttgttttgagtgtggcgcgttcaatcctcagtgggtcagtgtgacctacggcatctggatctgcctggagtgctcggggagacaccgcgggcttggggttcacctcagctttgtgcgctctgttactatggacaagtggaaggacattgagcttgagaagatgaaagctggtgggaatgctaagttccgagagttcctggagtctcaggaggattacgatccttgctggtccttgcaggagaagtacaacagcagagccgcggccctctttagggataaggtggtcgctctggccgaaggcagagagtggtctctggagtcatcacctgcccagaactggaccccacctcagcccaggacgctgccgtccatggtgcaccgagtctctggccagccgcagagtgtgaccgcctcctcggacaaggcttttgaagactggctgaatgatgacctcggctcctatcaaggggcccaggggaatcgctacgtggggtttgggaacacgccaccgcctcagaagaaagaagatgacttcctcaacaacgccatgtcctccctgtactcgggctggagcagcttcaccactggagccagccggtttgcctcggcagccaaggagggcgctacaaagtttggatcccaagcgagtcagaaggcgtccgagctgggccacagcctgaacgagaacgtcctcaagcctgcgcaggagaaggtgaaggagg

SEQ ID NO: 99857 - DNA, 1212 bp, Artificial Sequence
  derived and/or modified sequence
atggccagccccaggaccaggaaggtgctgaaggaggtgcgggtgcaggatgagaacaacgtgtgctttgaatgtggggccttcaacccccagtgggtgtctgtgacctacggcatctggatctgcctggagtgcagcggccgccaccggggcctgggcgtgcacctgagctttgtgcgctctgtgaccatggacaagtggaaggacatcgagctggagaagatgaaggccggcggcaatgccaagttccgggagttcctggagagccaggaggactatgacccctgctggagcctgcaggagaagtacaacagcagagctgctgccctcttccgggacaaggtggtggccctggccgagggccgggagtggagcctggagagcagccctgcccagaactggaccccaccccagcccaggaccctgcccagcatggtgcaccgggtgtctggccagccccagagcgtgacagccagcagtgacaaggcctttgaggactggctgaatgatgacctgggcagctaccagggcgcccagggcaacagatatgtgggcttcggcaacaccccaccaccccagaagaaggaggatgacttcctgaacaatgccatgagcagcctgtacagcggctggagcagcttcaccaccggggccagcagatttgccagcgctgccaaggagggcgccaccaagtttggcagccaggccagccagaaggccagcgagctgggccacagcctgaatgaaaatgtgctgaagccagcccaggagaaggtgaaggagggcaagatctttgatgatgtgagcagcggcgtgtcccagctggccagcaagtgccagaggcggctgtgctgccaccagagccactgcagcgctggccacctgggccgggccttctgccctgtgtcctggcatgaggccctgtgtggccagacaggccgggaggagcaggccagcctgctgccccccaagcacgtggtgggcgccctggaggtgtgtgcccggggctgcccccgctgccacgtgccccacaccccaggcacagctgctgagtggccaggccgcctgtgcctgagccgggagagcgtggtgagagatggcggcaccagcccccccttcttccggggcaagcagagggccccctggacagccccccggcgggccaccgtcatcagaacagctgtgtggaccaccagcaagacagccacctag

SEQ ID NO: 99858 - DNA, 786 bp, Artificial Sequence
  derived and/or modified sequence
atggccagccccaggaccaggaaggtgctgaaggaggtgcgggtgcaggatgagaacaacgtgtgctttgaatgtggggccttcaacccccagtgggtgtctgtgacctacggcatctggatctgcctggagtgcagcggccgccaccggggcctgggcgtgcacctgagctttgtgcgctctgtgaccatggacaagtggaaggacatcgagctggagaagatgaaggccggcggcaatgccaagttccgggagttcctggagagccaggaggactatgacccctgctggagcctgcaggagaagtacaacagcagagctgctgccctcttccgggacaaggtggtggccctggccgagggccgggagtggagcctggagagcagccctgcccagaactggaccccaccccagcccaggaccctgcccagcatggtgcaccgggtgtctggccagccccagagcgtgacagccagcagtgacaaggcctttgaggactggctgaatgatgacctgggcagctaccagggcgcccagggcaacagatatgtgggcttcggcaacaccccaccaccccagaagaaggaggatgacttcctgaacaatgccatgagcagcctgtacagcggctggagcagcttcaccaccggggccagcagatttgccagcgctgccaaggagggcgccaccaagtttggcagccaggccagccagaaggccagcgagctgggccacagcctgaatgaaaatgtgctgaagccagcccaggagaaggtgaaggagtag

SEQ ID NO: 99859 - DNA, 1212 bp, Artificial Sequence
  derived and/or modified sequence
atggccagcccccggacccggaaggtgctgaaggaggtgcgggtgcaagatgagaacaatgtatgcttcgagtgcggagcttttaacccacagtgggtcagcgtcacatacggcatttggatctgtttggaatgcagcggcagacacagggggttgggagtccatctgtccttcgtgagatcggtcactatggacaagtggaaagacatcgagctggagaagatgaaagcggggggcaacgccaaatttagagaattcttggagtcccaggaggactacgacccgtgctggagtcttcaagagaaatataacagtcgagcagcagcactgttccgcgacaaagtggtggctctggccgaaggacgggagtggtctctggagtcttcccccgcacagaactggacccccccccagcctcgaacactgccttccatggtgcacagggtgagcggccaacctcagagcgtcacagcatcctctgataaagcattcgaagattggttaaatgacgacctcggttcctaccaaggcgctcaggggaatcgatatgtgggcttcggaaacactccgcctccacagaagaaagaggatgattttctcaataacgctatgagctctctgtactctggctggagcagttttacaacaggagcttctcgtttcgcaagcgccgccaaggaaggggctaccaaatttggctctcaggccagccaaaaggcaagtgagttgggtcacagcttaaatgaaaacgtcctcaagcctgcccaggaaaaggtcaaggaaggaaaaattttcgacgatgtgagtagtggggtgagccagttggccagtaagtgccaacgtcgtttgtgctgccaccagagccattgctccgcaggacatctaggcagagccttttgtcctgtctcgtggcatgaagcactgtgcggacagacaggcagggaggagcaggcctctctgctcccacctaagcacgtggtaggtgccctcgaggtgtgcgccaggggctgtcccaggtgccacgtcccacacacccctggcaccgccgctgagtggccaggccggctgtgcctgagtcgggagagcgtggttcgggacgggggaacatcccccccgtttttccggggcaaacaacgggccccctggactgcacctcggcgcgcaactgttatacgaacagccgtgtggacaacttcgaagaccgccacatag

SEQ ID NO: 99860 - DNA, 786 bp, Artificial Sequence
  derived and/or modified sequence
atggccagcccccggacccggaaggtgctgaaggaggtgcgggtgcaagacgagaacaatgtgtgctttgagtgcggggccttcaatccccagtgggttagcgtgacttacggaatttggatttgccttgaatgttccgggaggcacaggggccttggcgtccatctctcttttgtgaggtcagtcaccatggacaagtggaaggacatagagcttgagaagatgaaagccggaggcaatgcgaaattcagagagtttctcgaatctcaggaagattacgatccgtgctggagtttgcaggagaagtataactcccgtgctgccgctttgtttagggataaagttgtcgccctggccgaaggcagggaatggtctctggagagcagcccggcccagaattggacaccaccccaaccaagaacactcccgtctatggtccacagggtttcaggtcagccacagtccgtcacagcctcgtcagacaaagcttttgaagactggctgaacgatgatctgggttcataccagggggcacagggcaacagatatgttggttttggtaacacgcccccaccccaaaaaaaggaggatgattttctgaataatgccatgtctagtttgtactctggttggagttcattcacgaccggggcatcccggttcgccagtgctgccaaggagggtgccacgaaattcggttctcaagccagccagaaggccagtgagctggggcactcactgaatgagaatgttctgaagcccgcccaggaaaaagttaaagaatag

SEQ ID NO: 99861 - DNA, 1212 bp, Artificial Sequence
  derived and/or modified sequence
atggccagccctaggactcggaaggtgctcaaggaagtacgcgttcaggatgagaacaatgtgtgttttgagtgcggtgcctttaatccccaatgggtgagcgtaacatacgggatttggatctgcctcgagtgttctggcagacaccgcggattgggtgtgcacctttctttcgtgaggtctgtcacaatggacaaatggaaggacatcgaactggagaaaatgaaagctggcggtaatgccaagttcagagaattcctggagtcccaggaggattacgacccttgttggtctctgcaagagaagtacaacagccgggcagctgccttgttcagggataaggttgtggccttagccgaagggcgagagtggtccctagaaagctcacctgcccagaactggacacctccccagccacgcactctgccctctatggtacacagggtatctggtcagccccagagcgtcacagcatcaagtgataaagccttcgaggactggctgaatgacgatctcggctcctatcaaggcgctcagggaaatcgttatgtggggtttgggaatacccctccgccacagaagaaggaggatgacttccttaacaacgcgatgagcagcctatatagtggatggtcaagcttcacaacaggggcatcacgctttgccagtgctgccaaggaaggagcaacaaagtttggctctcaagcatcccaaaaggcatccgagctggggcatagcctgaacgaaaacgttctgaaaccagcccaagagaaggtgaaagagggcaagatcttcgacgacgtgtcctccggcgtgtcacaacttgcaagtaaatgtcaacgtcgcctctgctgtcatcaaagccattgcagcgctggacacctgggtagggctttttgccccgtcagctggcacgaggctctgtgtgggcagactggaagggaggagcaagcgagcctactgccgcctaaacatgtggtaggggcactggaagtgtgcgctagggggtgcccgaggtgtcatgtgcctcacacacctggtacggctgctgagtggccgggaaggctttgtctgtctagggagagcgtcgtcagagatggcggtactagcccacctttttttcgagggaaacaaagggcaccttggactgcaccacggagagccacagtgatcagaactgcagtctggaccacctccaagacggctacctag

SEQ ID NO: 99862 - DNA, 786 bp, Artificial Sequence
  derived and/or modified sequence
atggccagtcccaggacacggaaggtactgaaggaagtgagagtacaggacgaaaacaatgtatgcttcgagtgtggtgccttcaatccacagtgggtttccgtcacatatggcatctggatttgcttggagtgtagcgggaggcacaggggcctgggcgtgcacttatcatttgtgcgatctgtcaccatggacaagtggaaagacatagagttggaaaaaatgaaggccggaggtaacgccaagttcagggagtttctcgagtcgcaggaggattacgatccatgctggagcctccaggagaagtataacagccgcgctgcggcactctttagagataaggtcgttgcgctggcagaagggcgtgagtggtcccttgaatcatcgcctgcccagaattggaccccgccacaacccagaaccctcccatctatggtgcacagagtctccggacagccccagtctgtgactgccagttccgacaaggcatttgaggactggctgaatgacgacctaggatcttatcagggggcacaggggaacaggtacgttggctttggcaacacacctcctccccagaaaaaggaagatgatttcttaaataatgccatgtcttcactctatagcggctggagcagctttacaaccggcgcatccaggtttgctagtgccgcaaaagagggggcaacgaaattcggatcgcaggccagccagaaggcctccgagctcgggcattcactcaacgagaatgtgctaaaacctgctcaggagaaagtgaaagaatag

SEQ ID NO: 99863 - DNA, 1212 bp, Artificial Sequence
  derived and/or modified sequence
atggccagccccagaaccagaaaggtgctgaaggaggtgagagtgcaggacgagaacaacgtgtgcttcgagtgcggcgccttcaacccccagtgggtgagcgtgacctacggcatctggatctgcctggagtgcagcggcagacacagaggcctgggcgtgcacctgagcttcgtgagaagcgtgaccatggacaagtggaaggacatcgagctggagaagatgaaggccggcggcaacgccaagttcagagagttcctggagagccaggaggactacgacccctgctggagcctgcaggagaagtacaacagcagagccgccgccctgttcagagacaaggtggtggccctggccgagggcagagagtggagcctggagagcagccccgcccagaactggacccccccccagcccagaaccctgcccagcatggtgcacagagtgagcggccagccccagagcgtgaccgccagcagcgacaaggccttcgaggactggctgaacgacgacctgggcagctaccagggcgcccagggcaacagatacgtgggcttcggcaacaccccccccccccagaagaaggaggacgacttcctgaacaacgccatgagcagcctgtacagcggctggagcagcttcaccaccggcgccagcagattcgccagcgccgccaaggagggcgccaccaagttcggcagccaggccagccagaaggccagcgagctgggccacagcctgaacgagaacgtgctgaagcccgcccaggagaaggtgaaggagggcaagatcttcgacgacgtgagcagcggcgtgagccagctggccagcaagtgccagagaagactgtgctgccaccagagccactgcagcgccggccacctgggcagagccttctgccccgtgagctggcacgaggccctgtgcggccagaccggcagagaggagcaggccagcctgctgccccccaagcacgtggtgggcgccctggaggtgtgcgccagaggctgccccagatgccacgtgccccacacccccggcaccgccgccgagtggcccggcagactgtgcctgagcagagagagcgtggtgagagacggcggcaccagcccccccttcttcagaggcaagcagagagccccctggaccgcccccagaagagccaccgtgatcagaaccgccgtgtggaccaccagcaagaccgccacctag

SEQ ID NO: 99864 - DNA, 786 bp, Artificial Sequence
  derived and/or modified sequence
atggccagccccagaaccagaaaggtgctgaaggaggtgagagtgcaggacgagaacaacgtgtgcttcgagtgcggcgccttcaacccccagtgggtgagcgtgacctacggcatctggatctgcctggagtgcagcggcagacacagaggcctgggcgtgcacctgagcttcgtgagaagcgtgaccatggacaagtggaaggacatcgagctggagaagatgaaggccggcggcaacgccaagttcagagagttcctggagagccaggaggactacgacccctgctggagcctgcaggagaagtacaacagcagagccgccgccctgttcagagacaaggtggtggccctggccgagggcagagagtggagcctggagagcagccccgcccagaactggacccccccccagcccagaaccctgcccagcatggtgcacagagtgagcggccagccccagagcgtgaccgccagcagcgacaaggccttcgaggactggctgaacgacgacctgggcagctaccagggcgcccagggcaacagatacgtgggcttcggcaacaccccccccccccagaagaaggaggacgacttcctgaacaacgccatgagcagcctgtacagcggctggagcagcttcaccaccggcgccagcagattcgccagcgccgccaaggagggcgccaccaagttcggcagccaggccagccagaaggccagcgagctgggccacagcctgaacgagaacgtgctgaagcccgcccaggagaaggtgaaggagtag

SEQ ID NO: 99865 - protein, 361 aa, Artificial Sequence
  derived and/or modified sequence
MRTTFVRSVTMDKWKDIELEKMKAGGNAKFREFLESQEDYDPCWSLQEKYNSRAAALFRDKVVALAEGREWSLESSPAQNWTPPQPRTLPSMVHRVSGQPQSVTASSDKAFEDWLNDDLGSYQGAQGNRYVGFGNTPPPQKKEDDFLNNAMSSLYSGWSSFTTGASRFASAAKEGATKFGSQASQKFWGHKQQPEPASELGHSLNENVLKPAQEKVKEGKIFDDVSSGVSQLASKGVGSKGWRDVTTFFSGKAEGPLDSPSEGHSYQNSGLDHFQNSNIDQSFWETFGSAEPTKTRKSPSSDSWTCADTSTERRSSDSWEVWGSASTNRNSNSDGGEGGEGTKKAVPPAVPTDDGWDNQNW

SEQ ID NO: 99866 - DNA, 1086 bp, Artificial Sequence
  derived and/or modified sequence
atgaggacaaccttcgtgcgctctgtaacaatggataagtggaaggacattgagttggaaaagatgaaagctggcggaaacgcaaagttccgtgagttcctcgagtcccaagaggattatgatccgtgctggtctctccaggaaaaatataatagcagggctgccgccctgttccgtgacaaagtggtggcacttgcagagggccgagagtggtcactggagtctagtccggcacagaactggaccccgccgcaacctcgaaccttgcctagcatggtacatcgcgtctccggacaaccacagagcgtcaccgcgagctccgacaaggcgtttgaggactggctaaacgacgacttggggtcttatcagggggctcagggtaatagatacgtcggtttcggaaacacaccccccccacagaagaaagaagatgactttttaaacaatgcgatgtccagtctgtattctggttggtcatcattcaccaccggtgcctcgcgttttgcttccgcagccaaggagggggcgacaaaatttgggtctcaggcctcccagaagttttggggccacaagcagcagccagagccagcttcagagctggggcactctctcaatgagaatgtcctgaagcctgcacaggaaaaggtgaaagaaggcaaaatttttgacgacgtgtccagtggagtgtctcagctggcatccaaaggcgtcgggtcaaaaggatggagggatgtgacaaccttcttcagcgggaaggcagagggccctctcgattctccttccgagggtcactcttatcagaatagtgggctggaccactttcagaacagcaacatcgatcagagtttttgggagacctttggcagcgccgaaccaactaaaaccaggaaatcaccctcatccgatagttggacttgcgcggacaccagcaccgagcgccgatcctccgactcctgggaagtgtggggcagtgcctccaccaacaggaacagcaatagtgacggcggagaaggcggcgaaggcaccaaaaaagctgtgccaccagccgttccgaccgatgacggatgggacaaccaaaactggtag

SEQ ID NO: 99867 - DNA, 1311 bp, Artificial Sequence
  derived and/or modified sequence
ggaagctggtggcggctggtgggcgaccgggcgcatcctcattgcagtgcggcggccctacctcggccctggcctgaccccggcggccctgcccgcccctccctccagcatcatggccagcccaagaaccaggaaggttcttaaagaagtcagggtgcaggatgagaacaacctttgtgcgctctgttactatggacaagtggaaggacattgagcttgagaagatgaaagctggtgggaatgctaagttccgagagttcctggagtctcaggaggattacgatccttgctggtccttgcaggagaagtacaacagcagagccgcggccctctttagggataaggtggtcgctctggccgaaggcagagagtggtctctggagtcatcacctgcccagaactggaccccacctcagcccaggacgctgccgtccatggtgcaccgagtctctggccagccgcagagtgtgaccgcctcctcggacaaggcttttgaagactggctgaatgatgacctcggctcctatcaaggggcccaggggaatcgctacgtggggtttgggaacacgccaccgcctcagaagaaagaagatgacttcctcaacaacgccatgtcctccctgtactcgggctggagcagcttcaccactggagccagccggtttgcctcggcagccaaggagggcgctacaaagtttggatcccaagcgagtcagaagttttggggtcacaagcagcagccggagccggcgtccgagctgggccacagcctgaacgagaacgtcctcaagcctgcgcaggagaaggtgaaggagggaaagatttttgatgatgtctccagtggggtctctcagttggcgtccaagggagtcggtagtaagggatggcgggacgtcaccacctttttttcggggaaagcagagggccccttggacagcccctcggagggccacagttatcagaacagcggtctggaccacttccaaaacagcaacatagaccagagcttctgggagacctttggaagtgctgagcccaccaagacccgcaagtccccgagcagcgacagctggacgtgcgcggacacctccaccgagaggaggagctcggacagctgggaggtgtggggctcggcctccaccaacaggaacagcaacagcgacggcggggagggcggggagggcaccaagaaggcagtgccgccggccgtgcccactgatgatggctgggacaaccagaactggtagggcccactgcgcccccgtccccagcgcccccgggcgacttcgtgtttgcactctgccctcgtcg

SEQ ID NO: 99868 - DNA, 1086 bp, Artificial Sequence
  derived and/or modified sequence
atgaggaccacctttgtgcgctctgtgaccatggacaagtggaaggacatcgagctggagaagatgaaggccggcggcaatgccaagttccgggagttcctggagagccaggaggactatgacccctgctggagcctgcaggagaagtacaacagcagagctgctgccctcttccgggacaaggtggtggccctggccgagggccgggagtggagcctggagagcagccctgcccagaactggaccccaccccagcccaggaccctgcccagcatggtgcaccgggtgtctggccagccccagagcgtgacagccagcagtgacaaggcctttgaggactggctgaatgatgacctgggcagctaccagggcgcccagggcaaccgctacgtgggctttggaaacaccccaccaccccagaagaaggaggatgacttcctgaacaatgccatgagcagcctgtacagcggctggagcagcttcaccactggagccagcagatttgccagcgctgccaaggagggcgccaccaagtttggcagccaggccagccagaagttctggggccacaagcagcagcctgagcccgccagcgagctgggccacagcctgaatgaaaatgtgctgaagccagcccaggagaaggtgaaggagggcaagatctttgatgatgtgtcctctggagtgtcccagctggccagcaaaggagtgggcagcaagggctggagagatgtgaccaccttcttcagcggcaaggccgagggccccctggacagccccagcgagggccacagctaccagaacagcggcctggaccacttccagaacagcaacatcgaccagagcttctgggagacctttggatctgctgagcccaccaagaccaggaagagccccagcagtgacagctggacctgtgccgacaccagcacagaaagaagaagcagtgacagctgggaggtgtggggcagcgccagcaccaacagaaacagcaacagtgatggaggagagggcggggagggcaccaagaaggctgtgcccccagctgtgcccacagatgatggctgggacaaccagaactggtag

SEQ ID NO: 99869 - DNA, 1086 bp, Artificial Sequence
  derived and/or modified sequence
atgcggaccaccttcgtgcggagcgtgaccatggacaagtggaaggatatagagttggagaaaatgaaggcgggggggaacgcaaagttccgagaattcctcgaatcacaggaagattacgatccgtgctggtcactacaagaaaaatataacagccgcgccgctgctctatttcgcgataaagtcgtagctctggctgagggtagagaatggtctttagaatcatcaccagctcagaactggacaccaccgcagcctagaacactgccgagtatggtgcatcgcgtatccggccagccgcagtccgtgaccgccagttccgataaagccttcgaagattggctcaacgatgacctggggtcctatcaaggtgcacaaggtaatcgctacgtgggcttcgggaatactccacctccacagaaaaaggaggatgactttctgaacaacgcgatgagctctctctatagtggttggtcatcattcaccaccggcgcatcccgttttgccagtgcggctaaggagggggccactaaattcggatctcaagcctcgcagaagttctgggggcacaaacagcagcccgaacccgcctccgaactgggtcatagtttaaatgaaaatgttctgaagcctgcccaggagaaggttaaagagggcaagatatttgatgacgtcagctccggggtttctcagttagcctcaaagggagtcggaagcaaagggtggagagatgtgactaccttcttttcaggcaaggctgagggccctctggattctccttcggagggccacagttaccagaatagcggattagatcactttcaaaactccaacatcgaccagagtttttgggagacttttggatctgcggagcccaccaaaactcgaaagagccctagttccgatagttggacatgtgcagacacctcaactgagcgccgaagctcagacagctgggaggtgtgggggtcagcgagcactaataggaacagcaacagcgacggcggcgaagggggggagggaactaaaaaagccgtacctccagccgttcctacagatgacgggtgggataatcagaactggtag

SEQ ID NO: 99870 - DNA, 1086 bp, Artificial Sequence
  derived and/or modified sequence
atgcgcactacctttgtgaggtcagtgacgatggataaatggaaagacattgaattagagaagatgaaggctggtggtaacgccaaattcagggagttcctggaaagtcaagaggattacgatccctgctggtccctccaggagaagtataattctcgcgcagccgctctcttcagggacaaggttgttgcacttgccgaggggcgagaatggtctttggaaagcagtcctgcacagaactggactccaccccagccccgaacgcttccctctatggtccatagggtatcaggacaaccccagtctgttacagccagctccgacaaggcgttcgaggactggctgaatgacgatctaggttcctatcagggggcacagggcaacagatatgtggggttcggaaacactccaccaccgcagaaaaaagaagatgattttttaaataatgctatgagcagtttgtattccggatggtctagtttcactactggcgcatctcgattcgccagcgccgcaaaggaaggcgctaccaagttcgggtcacaggccagtcaaaaattttggggccataagcagcaacccgagccagcttctgagcttgggcattccttaaacgaaaatgtgctcaaacccgcacaggaaaaggtgaaggagggcaagatatttgatgacgtaagctccggtgtgtctcagctggcctctaaaggcgttggctccaagggatggagagacgtaaccacttttttttcaggtaaggctgagggccctctggatagccccagcgagggccatagttaccaaaatagcggcctcgatcacttccagaactccaacatcgatcagtcattctgggagacatttggatccgcggaacctactaagacacgaaaatctccaagcagcgactcctggacttgtgccgataccagcacggagcggagatcatccgattcgtgggaagtatggggtagcgcaagcacgaatcggaactcaaattcagatggtggtgagggcggtgaggggacgaaaaaggcagttccaccagccgtaccaacagacgatggatgggataatcagaactggtag

SEQ ID NO: 99871 - DNA, 1086 bp, Artificial Sequence
  derived and/or modified sequence
atgagaaccaccttcgtgagaagcgtgaccatggacaagtggaaggacatcgagctggagaagatgaaggccggcggcaacgccaagttcagagagttcctggagagccaggaggactacgacccctgctggagcctgcaggagaagtacaacagcagagccgccgccctgttcagagacaaggtggtggccctggccgagggcagagagtggagcctggagagcagccccgcccagaactggacccccccccagcccagaaccctgcccagcatggtgcacagagtgagcggccagccccagagcgtgaccgccagcagcgacaaggccttcgaggactggctgaacgacgacctgggcagctaccagggcgcccagggcaacagatacgtgggcttcggcaacaccccccccccccagaagaaggaggacgacttcctgaacaacgccatgagcagcctgtacagcggctggagcagcttcaccaccggcgccagcagattcgccagcgccgccaaggagggcgccaccaagttcggcagccaggccagccagaagttctggggccacaagcagcagcccgagcccgccagcgagctgggccacagcctgaacgagaacgtgctgaagcccgcccaggagaaggtgaaggagggcaagatcttcgacgacgtgagcagcggcgtgagccagctggccagcaagggcgtgggcagcaagggctggagagacgtgaccaccttcttcagcggcaaggccgagggccccctggacagccccagcgagggccacagctaccagaacagcggcctggaccacttccagaacagcaacatcgaccagagcttctgggagaccttcggcagcgccgagcccaccaagaccagaaagagccccagcagcgacagctggacctgcgccgacaccagcaccgagagaagaagcagcgacagctgggaggtgtggggcagcgccagcaccaacagaaacagcaacagcgacggcggcgagggcggcgagggcaccaagaaggccgtgccccccgccgtgcccaccgacgacggctgggacaaccagaactggtag

SEQ ID NO: 99872 - protein, 293 aa, Artificial Sequence
  derived and/or modified sequence
MLSSESSWSLRRITILAGPCRRSTTAEPRPSLGIRVSGQPQSVTASSDKAFEDWLNDDLGSYQGAQGNRYVGFGNTPPPQKKEDDFLNNAMSSLYSGWSSFTTGASRFASAAKEGATKFGSQASQKASELGHSLNENVLKPAQEKVKEGKIFDDVSSGVSQLASKVQGVGSKGWRDVTTFFSGKAEGPLDSPSEGHSYQNSGLDHFQNSNIDQSFWETFGSAEPTKTRKSPSSDSWTCADTSTERRSSDSWEVWGSASTNRNSNSDGGEGGEGTKKAVPPAVPTDDGWDNQNW

SEQ ID NO: 99873 - DNA, 882 bp, Artificial Sequence
  derived and/or modified sequence
atgcttagctctgaatccagctggtccctgaggaggataaccattcttgcaggcccttgtaggcgatctacaaccgccgagcctcgcccttccttaggcatcagagtgagcggacaacctcaaagcgtgactgcctcctctgataaggctttcgaagactggctgaacgacgacctcgggagttatcaaggggcccagggtaacaggtacgtgggattcggaaacacaccaccaccgcaaaaaaaggaagatgactttctgaataatgctatgagcagcctttactcagggtggagttctttcactactggagccagtcgatttgcctcagccgctaaggagggggccactaaatttggctcacaggcttcgcaaaaggcatcagagctggggcactcactgaacgaaaatgtcctcaagcctgcgcaggaaaaggtgaaagagggtaagatattcgacgatgtgagcagcggcgtctcccaacttgctagtaaggtgcaaggggtggggtctaaggggtggagggacgtgacaaccttctttagcggaaaagcagaaggtccattagactccccaagtgaaggacattcataccagaatagtggtctggaccacttccagaattcaaacattgaccagtccttttgggaaacgtttggttctgcagagcccactaagacccgcaagtcacccagctcggattcatggacgtgtgcagataccagcaccgaacggcggagcagtgattcttgggaggtctggggaagcgcatcaaccaaccgcaactccaattcagacggcggagaggggggggagggtaccaaaaaagccgtaccgcccgccgtgcctactgatgacgggtgggacaaccagaactggtag

SEQ ID NO: 99874 - DNA, 1548 bp, Artificial Sequence
  derived and/or modified sequence
agctggtggcggctggtgggcgaccgggcgcatcctcattgcagtgcggcggccctacctcggccctggcctgaccccggcggccctgcccgcccctccctccagcatcatggccagcccaagaaccaggaaggttcttaaagaagtcagggtgcaggatgagaacaacgtttgttttgagtgtggcgcgttcaatcctcagtgggtcagtgtgacctacggcatctggatctgcctggagtgctcggggagacaccgcgggcttggggttcacctcagctttgtgcgctctgttactatggacaagtggaaggacattgagcttgagaagatgaaagctggtgggaatgctaagttccgagagttcctggagtctcaggaggattacgatccttgctggtccttgcaggagaagtacaacagcagagccgcggccctctttagggataagagtctctggccagccgcagagtgtgaccgcctcctcggacaaggcttttgaagactggctgaatgatgacctcggctcctatcaaggggcccaggggaatcgctacgtggggtttgggaacacgccaccgcctcagaagaaagaagatgacttcctcaacaacgccatgtcctccctgtactcgggctggagcagcttcaccactggagccagccggtttgcctcggcagccaaggagggcgctacaaagtttggatcccaagcgagtcagaaggcgtccgagctgggccacagcctgaacgagaacgtcctcaagcctgcgcaggagaaggtgaaggagggaaagatttttgatgatgtctccagtggggtctctcagttggcgtccaaggtccagggagtcggtagtaagggatggcgggacgtcaccacctttttttcggggaaagcagagggccccttggacagcccctcggagggccacagttatcagaacagcggtctggaccacttccaaaacagcaacatagaccagagcttctgggagacctttggaagtgctgagcccaccaagacccgcaagtccccgagcagcgacagctggacgtgcgcggacacctccaccgagaggaggagctcggacagctgggaggtgtggggctcggcctccaccaacaggaacagcaacagcgacggcggggagggcggggagggcaccaagaaggcagtgccgccggccgtgcccactgatgatggctgggacaaccagaactggtagggcccactgcgcccccgtccccagcgcccccgggcgacttcgtgtttgcactctgccctcgtcgttcctcctccttccatttgacccaagaatcagcaactgcagtgtgaggacagcgtctcgggaggcaggaccctagggagacccgggtgtgcgccgcctgcgcgtggggagtcttcggtgcgtgggggcggcttgctgtccagcctgtgtgggggccgtcccgtcccacactcccctgggcattcttggactcaaggccggggctctgcgtggcttgctgggaggtgggctgcagcacagaggcctgtgactgcgt

SEQ ID NO: 99875 - DNA, 882 bp, Artificial Sequence
  derived and/or modified sequence
atgctgagcagcgagagctcctggagcctgcggcgcatcaccatcctggccggcccctgcagaagaagcaccacagctgagccccggcccagcctgggcatccgggtgtctggccagccccagagcgtgacagccagcagtgacaaggcctttgaggactggctgaatgatgacctgggcagctaccagggcgcccagggcaaccgctacgtgggctttggaaacaccccaccaccccagaagaaggaggatgacttcctgaacaatgccatgagcagcctgtacagcggctggagcagcttcaccactggagccagcagatttgccagcgctgccaaggagggcgccaccaagtttggcagccaggccagccagaaggccagcgagctgggccacagcctgaatgaaaatgtgctgaagccagcccaggagaaggtgaaggagggcaagatctttgatgatgtgtcctctggagtgtcccagctggccagcaaggtgcagggcgtgggcagcaagggctggagagatgtgaccaccttcttcagcggcaaggccgagggccccctggacagccccagcgagggccacagctaccagaacagcggcctggaccacttccagaacagcaacatcgaccagagcttctgggagacctttggatctgctgagcccaccaagaccaggaagagccccagcagtgacagctggacctgtgccgacaccagcacagaaagaagaagcagtgacagctgggaggtgtggggcagcgccagcaccaacagaaacagcaacagtgatggaggagagggcggggagggcaccaagaaggctgtgcccccagctgtgcccacagatgatggctgggacaaccagaactggtag

SEQ ID NO: 99876 - DNA, 882 bp, Artificial Sequence
  derived and/or modified sequence
atgctgagcagcgagagcagctggagcctgcggcggatcaccatcctggccggaccctgtagacggagtacaacagctgagccccgtccgtccctcggaatcagagtcagcggccaacctcagtcggtgacagcgtcttcggataaagccttcgaggactggctgaatgacgacttaggttcgtaccagggcgcgcagggaaaccgatacgtcggctttggtaatacccctcctcctcaaaagaaggaggacgacttcctgaacaacgcgatgtcctcactctacagcggctggtcatctttcaccacaggagcaagcaggttcgcgtctgctgcgaaggagggtgcaaccaagtttgggtcccaggcgtcccagaaggcaagtgagctaggacattcactaaatgagaacgtccttaaaccggcccaggagaaggtgaaagaaggcaaaatcttcgacgatgttagcagcggggttagccagctggcaagcaaagttcagggcgtaggatccaagggctggcgcgacgtaactactttcttcagcgggaaggcagaggggccccttgacagcccttccgagggtcactcctaccagaacagtggactcgatcacttccagaatagcaacattgaccagagtttctgggagaccttcgggtcagcagagccaaccaaaactagaaagagtccaagctcagatagctggacctgcgccgacaccagtacagaacggcggagtagtgactcttgggaggtgtggggttctgctagcacgaatcggaactccaatagtgacggtggagaaggcggagaaggaactaaaaaagcagttcctcctgccgtccccactgacgacggatgggacaatcaaaactggtag

SEQ ID NO: 99877 - DNA, 882 bp, Artificial Sequence
  derived and/or modified sequence
atgctgtcgagcgaaagttcttggagtcttcggcgtatcaccattttggctggtccctgccgcagaagcactacagccgagccgaggccgagtcttggtataagggtgagtggacagccacagagtgttaccgcttcctcggataaggcatttgaagactggttaaacgacgatctcggctcctaccagggagcacaagggaaccggtatgtcggttttggaaataccccaccaccacagaagaaggaggacgacttcctgaacaatgctatgtcttccttatacagcggctggtcgtcctttaccacaggagctagtaggtttgctagtgcagccaaagagggagcaaccaaatttgggtctcaagccagccaaaaggcctcagaactgggacactcgctcaatgagaacgtgcttaagcccgctcaggagaaggtcaaggaggggaaaatctttgacgatgtgtcaagtggcgtttcccaactggcttccaaggtgcagggtgtgggaagtaaagggtggcgggacgttacgacctttttctcaggaaaagctgagggtcccctagattctccttcggagggacattcctaccagaactctgggctggaccacttccagaactctaatatcgaccaatctttctgggagaccttcggatctgccgagccaacgaaaacccgcaaatctccgtcctcagattcatggacatgcgccgacacttctaccgagagacggtccagtgattcttgggaagtctggggatcagcgagcaccaataggaatagcaatagcgatggaggagagggcggtgaaggtacgaaaaaggcagttcccccagccgtcccaacggatgatggatgggataaccagaactggtag

SEQ ID NO: 99878 - DNA, 882 bp, Artificial Sequence
  derived and/or modified sequence
atgctgagcagcgagagcagctggagcctgagaagaatcaccatcctggccggcccctgcagaagaagcaccaccgccgagcccagacccagcctgggcatcagagtgagcggccagccccagagcgtgaccgccagcagcgacaaggccttcgaggactggctgaacgacgacctgggcagctaccagggcgcccagggcaacagatacgtgggcttcggcaacaccccccccccccagaagaaggaggacgacttcctgaacaacgccatgagcagcctgtacagcggctggagcagcttcaccaccggcgccagcagattcgccagcgccgccaaggagggcgccaccaagttcggcagccaggccagccagaaggccagcgagctgggccacagcctgaacgagaacgtgctgaagcccgcccaggagaaggtgaaggagggcaagatcttcgacgacgtgagcagcggcgtgagccagctggccagcaaggtgcagggcgtgggcagcaagggctggagagacgtgaccaccttcttcagcggcaaggccgagggccccctggacagccccagcgagggccacagctaccagaacagcggcctggaccacttccagaacagcaacatcgaccagagcttctgggagaccttcggcagcgccgagcccaccaagaccagaaagagccccagcagcgacagctggacctgcgccgacaccagcaccgagagaagaagcagcgacagctgggaggtgtggggcagcgccagcaccaacagaaacagcaacagcgacggcggcgagggcggcgagggcaccaagaaggccgtgccccccgccgtgcccaccgacgacggctgggacaaccagaactggtag

SEQ ID NO: 99879 - protein, 1058 aa, Artificial Sequence
  derived and/or modified sequence
MVTGNGSLKRKSSRKETPSATKQATSISSETKNTLRAFSAPQNSESQAHVSGGGDDSSRPTVWYHETLEWLKEEKRRDEHRRRPDHPDFDASTLYVPEDFLNSCTPGMRKWWQIKSQNFDLVICYKVGKFYELYHMDALIGVSELGLVFMKGNWAHSGFPEIAFGRYSDSLVQKGYKVARVEQTETPEMMEARCRKMAHISKYDRVVRREICRIITKGTQTYSVLEGDPSENYSKYLLSLKEKEEDSSGHTRAYGVCFVDTSLGKFFIGQFSDDRHCSRFRTLVAHYPPVQVLFEKGNLSKETKTILKSSLSCSLQEGLIPGSQFWDASKTLRTLLEEEYFREKLSDGIGVMLPQVLKGMTSESDSIGLTPGEKSELALSALGGCVFYLKKCLIDQELLSMANFEEYIPLDSDTVSTTRSGAIFTKAYQRMVLDAVTLNNLEIFLNGTNGSTEGTLLERVDTCHTPFGKRLLKQWLCAPLCNHYAINDRLDAIEDLMVVPDKISEVVELLKKLPDLERLLSKIHNVGSPLKSQNHPDSRAIMYEETTYSKKKIIDFLSALEGFKVMCKIIGIMEEVADGFKSKILKQVISLQTKNPEGRFPDLTVELNRWDTAFDHEKARKTGLITPKAGFDSDYDQALADIRENEQSLLEYLEKQRNRIGCRTIVYWGIGRNRYQLEIPENFTTRNLPEEYELKSTKKGCKRYWTKTIEKKLANLINAEERRDVSLKDCMRRLFYNFDKNYKDWQSAVECIAVLDVLLCLANYSRGGDGPMCRPVILLPEDTPPFLELKGSRHPCITKTFFGDDFIPNDILIGCEEEEQENGKAYCVLVTGPNMGGKSTLMRQAGLLAVMAQMGCYVPAEVCRLTPIDRVFTRLGASDRIMSGESTFFVELSETASILMHATAHSLVLVDELGRGTATFDGTAIANAVVKELAETIKCRTLFSTHYHSLVEDYSQNVAVRLGHMACMVENECEDPSQETITFLYKFIKGACPKSYGFNAARLANLPEEVIQKGHRKAREFEKMNQSLRLFREVCLASERSTVDAEAVHKLLTLIKEL

SEQ ID NO: 99880 - protein, 1230 aa, Artificial Sequence
  derived and/or modified sequence
MSRQSTLYSFFPKSPALSDANKASARASREGGRAAAAPGASPSPGGDAAWSEAGPGPRPLARSASPPKAKNLNGGLRRSVGTTYVTDKSEEDNEIESEEEVQPKTQGSRRSSRQIKKRRVISDSESDIGGSDVEFKPDTKEEGSSDEISSGVGDSESEGLNSPVKVARKRKRMVTGNGSLKRKSSRKETPSATKQATSISSETKNTLRAFSAPQNSESQAHVSGGGDDSSRPTVWYHETLEWLKEEKRRDEHRRRPDHPDFDASTLYVPEDFLNSCTPGMRKWWQIKSQNFDLVICYKVGKFYELYHMDALIGVSELGLVFMKGNWAHSGFPEIAFGRYSDSLVQKGYKVARVEQTETPEMMEARCRKMAHISKYDRVVRREICRIITKGTQTYSVLEGDPSENYSKYLLSLKEKEEDSSGHTRAYGVCFVDTSLGKFFIGQFSDDRHCSRFRTLVAHYPPVQVLFEKGNLSKETKTILKSSLSCSLQEGLIPGSQFWDASKTLRTLLEEEYFREKLSDGIGVMLPQVLKGMTSESDSIGLTPGEKSELALSALGGCVFYLKKCLIDQELLSMANFEEYIPLDSDTVSTTRSGAIFTKAYQRMVLDAVTLNNLEIFLNGTNGSTEGTLLERVDTCHTPFGKRLLKQWLCAPLCNHYAINDRLDAIEDLMVVPDKISEVVELLKKLPDLERLLSKIHNVGSPLKSQNHPDSRAIMYEETTYSKKKIIDFLSALEGFKVMCKIIGIMEEVADGFKSKILKQVISLQTKNPEGRFPDLTVELNRWDTAFDHEKARKTGLITPKAGFDSDYDQALADIRENEQSLLEYLEKQRNRIGCRTIVYWGIGRNRYQLEIPENFTTRNLPEEYELKSTKKGCKRYWTKTIEKKLANLINAEERRDVSLKDCMRRLFYNFDKNYKDWQSAVECIAVLDVLLCLANYSRGGDGPMCRPVILLPEDTPPFLELKGSRHPCITKTFFGDDFIPNDILIGCEEEEQENGKAYCVLVTGPNMGGKSTLMRQAGLLAVMAQMGCYVPAEVCRLTPIDRVFTRLGASDRIMSGESTFFVELSETASILMHATAHSLVLVDELGRGTATFDGTAIANAVVKELAETIKCRTLFSTHYHSLVEDYSQNVAVRLGHMACMVENECEDPSQETITFLYKFIKGACPKSYGFNAARLANLPEEVIQKGHRKAREFEKMNQSLRLFREVCLASERSTVDAEAVHKLLTLIKEL

SEQ ID NO: 99881 - protein, 324 aa, Artificial Sequence
  derived and/or modified sequence
MRRLFYNFDKNYKDWQSAVECIAVLDVLLCLANYSRGGDGPMCRPVILLPEDTPPFLELKGSRHPCITKTFFGDDFIPNDILIGCEEEEQENGKIVCLLLDQIWGASLRMRQAGLLAVMAQMGCYVPAEVCRLTPIDRVFTRLGASDRIMSGESTFFVELSETASILMHATAHSLVLVDELGRGTATFDGTAIANAVVKELAETIKCRTLFSTHYHISRRLFSKCCCLGHMACMVENECEDPSQETITFLYKFIKGACPKSYGFNAARLANLPEEVIQKGHRKAREFEKMNQSLRLFREVCLASERSTVDAEAVHKLLTLIKEL

SEQ ID NO: 99882 - DNA, 3177 bp, Artificial Sequence
  derived and/or modified sequence
atggtgaccggcaacggcagcctgaagagaaagagcagcagaaaggagacccccagcgccaccaagcaggccaccagcatcagcagcgagaccaagaacaccctgagagccttcagcgccccccagaacagcgagagccaggcccacgtgagcggcggcggcgacgacagcagcagacccaccgtgtggtaccacgagaccctggagtggctgaaggaggagaagagaagagacgagcacagaagaagacccgaccaccccgacttcgacgccagcaccctgtacgtgcccgaggacttcctgaacagctgcacccccggcatgagaaagtggtggcagatcaagagccagaacttcgacctggtgatctgctacaaggtgggcaagttctacgagctgtaccacatggacgccctgatcggcgtgagcgagctgggcctggtgttcatgaagggcaactgggcccacagcggcttccccgagatcgccttcggcagatacagcgacagcctggtgcagaagggctacaaggtggccagagtggagcagaccgagacccccgagatgatggaggccagatgcagaaagatggcccacatcagcaagtacgacagagtggtgagaagagagatctgcagaatcatcaccaagggcacccagacctacagcgtgctggagggcgaccccagcgagaactacagcaagtacctgctgagcctgaaggagaaggaggaggacagcagcggccacaccagagcctacggcgtgtgcttcgtggacaccagcctgggcaagttcttcatcggccagttcagcgacgacagacactgcagcagattcagaaccctggtggcccactacccccccgtgcaggtgctgttcgagaagggcaacctgagcaaggagaccaagaccatcctgaagagcagcctgagctgcagcctgcaggagggcctgatccccggcagccagttctgggacgccagcaagaccctgagaaccctgctggaggaggagtacttcagagagaagctgagcgacggcatcggcgtgatgctgccccaggtgctgaagggcatgaccagcgagagcgacagcatcggcctgacccccggcgagaagagcgagctggccctgagcgccctgggcggctgcgtgttctacctgaagaagtgcctgatcgaccaggagctgctgagcatggccaacttcgaggagtacatccccctggacagcgacaccgtgagcaccaccagaagcggcgccatcttcaccaaggcctaccagagaatggtgctggacgccgtgaccctgaacaacctggagatcttcctgaacggcaccaacggcagcaccgagggcaccctgctggagagagtggacacctgccacacccccttcggcaagagactgctgaagcagtggctgtgcgcccccctgtgcaaccactacgccatcaacgacagactggacgccatcgaggacctgatggtggtgcccgacaagatcagcgaggtggtggagctgctgaagaagctgcccgacctggagagactgctgagcaagatccacaacgtgggcagccccctgaagagccagaaccaccccgacagcagagccatcatgtacgaggagaccacctacagcaagaagaagatcatcgacttcctgagcgccctggagggcttcaaggtgatgtgcaagatcatcggcatcatggaggaggtggccgacggcttcaagagcaagatcctgaagcaggtgatcagcctgcagaccaagaaccccgagggcagattccccgacctgaccgtggagctgaacagatgggacaccgccttcgaccacgagaaggccagaaagaccggcctgatcacccccaaggccggcttcgacagcgactacgaccaggccctggccgacatcagagagaacgagcagagcctgctggagtacctggagaagcagagaaacagaatcggctgcagaaccatcgtgtactggggcatcggcagaaacagataccagctggagatccccgagaacttcaccaccagaaacctgcccgaggagtacgagctgaagagcaccaagaagggctgcaagagatactggaccaagaccatcgagaagaagctggccaacctgatcaacgccgaggagagaagagacgtgagcctgaaggactgcatgagaagactgttctacaacttcgacaagaactacaaggactggcagagcgccgtggagtgcatcgccgtgctggacgtgctgctgtgcctggccaactacagcagaggcggcgacggccccatgtgcagacccgtgatcctgctgcccgaggacaccccccccttcctggagctgaagggcagcagacacccctgcatcaccaagaccttcttcggcgacgacttcatccccaacgacatcctgatcggctgcgaggaggaggagcaggagaacggcaaggcctactgcgtgctggtgaccggccccaacatgggcggcaagagcaccctgatgagacaggccggcctgctggccgtgatggcccagatgggctgctacgtgcccgccgaggtgtgcagactgacccccatcgacagagtgttcaccagactgggcgccagcgacagaatcatgagcggcgagagcaccttcttcgtggagctgagcgagaccgccagcatcctgatgcacgccaccgcccacagcctggtgctggtggacgagctgggcagaggcaccgccaccttcgacggcaccgccatcgccaacgccgtggtgaaggagctggccgagaccatcaagtgcagaaccctgttcagcacccactaccacagcctggtggaggactacagccagaacgtggccgtgagactgggccacatggcctgcatggtggagaacgagtgcgaggaccccagccaggagaccatcaccttcctgtacaagttcatcaagggcgcctgccccaagagctacggcttcaacgccgccagactggccaacctgcccgaggaggtgatccagaagggccacagaaaggccagagagttcgagaagatgaaccagagcctgagactgttcagagaggtgtgcctggccagcgagagaagcaccgtggacgccgaggccgtgcacaagctgctgaccctgatcaaggagctgtag

SEQ ID NO: 99883 - DNA, 3693 bp, Artificial Sequence
  derived and/or modified sequence
atgagcagacagagcaccctgtacagcttcttccccaagagccccgccctgagcgacgccaacaaggccagcgccagagccagcagagagggcggcagagccgccgccgcccccggcgccagccccagccccggcggcgacgccgcctggagcgaggccggccccggccccagacccctggccagaagcgccagcccccccaaggccaagaacctgaacggcggcctgagaagaagcgtgggcaccacctacgtgaccgacaagagcgaggaggacaacgagatcgagagcgaggaggaggtgcagcccaagacccagggcagcagaagaagcagcagacagatcaagaagagaagagtgatcagcgacagcgagagcgacatcggcggcagcgacgtggagttcaagcccgacaccaaggaggagggcagcagcgacgagatcagcagcggcgtgggcgacagcgagagcgagggcctgaacagccccgtgaaggtggccagaaagagaaagagaatggtgaccggcaacggcagcctgaagagaaagagcagcagaaaggagacccccagcgccaccaagcaggccaccagcatcagcagcgagaccaagaacaccctgagagccttcagcgccccccagaacagcgagagccaggcccacgtgagcggcggcggcgacgacagcagcagacccaccgtgtggtaccacgagaccctggagtggctgaaggaggagaagagaagagacgagcacagaagaagacccgaccaccccgacttcgacgccagcaccctgtacgtgcccgaggacttcctgaacagctgcacccccggcatgagaaagtggtggcagatcaagagccagaacttcgacctggtgatctgctacaaggtgggcaagttctacgagctgtaccacatggacgccctgatcggcgtgagcgagctgggcctggtgttcatgaagggcaactgggcccacagcggcttccccgagatcgccttcggcagatacagcgacagcctggtgcagaagggctacaaggtggccagagtggagcagaccgagacccccgagatgatggaggccagatgcagaaagatggcccacatcagcaagtacgacagagtggtgagaagagagatctgcagaatcatcaccaagggcacccagacctacagcgtgctggagggcgaccccagcgagaactacagcaagtacctgctgagcctgaaggagaaggaggaggacagcagcggccacaccagagcctacggcgtgtgcttcgtggacaccagcctgggcaagttcttcatcggccagttcagcgacgacagacactgcagcagattcagaaccctggtggcccactacccccccgtgcaggtgctgttcgagaagggcaacctgagcaaggagaccaagaccatcctgaagagcagcctgagctgcagcctgcaggagggcctgatccccggcagccagttctgggacgccagcaagaccctgagaaccctgctggaggaggagtacttcagagagaagctgagcgacggcatcggcgtgatgctgccccaggtgctgaagggcatgaccagcgagagcgacagcatcggcctgacccccggcgagaagagcgagctggccctgagcgccctgggcggctgcgtgttctacctgaagaagtgcctgatcgaccaggagctgctgagcatggccaacttcgaggagtacatccccctggacagcgacaccgtgagcaccaccagaagcggcgccatcttcaccaaggcctaccagagaatggtgctggacgccgtgaccctgaacaacctggagatcttcctgaacggcaccaacggcagcaccgagggcaccctgctggagagagtggacacctgccacacccccttcggcaagagactgctgaagcagtggctgtgcgcccccctgtgcaaccactacgccatcaacgacagactggacgccatcgaggacctgatggtggtgcccgacaagatcagcgaggtggtggagctgctgaagaagctgcccgacctggagagactgctgagcaagatccacaacgtgggcagccccctgaagagccagaaccaccccgacagcagagccatcatgtacgaggagaccacctacagcaagaagaagatcatcgacttcctgagcgccctggagggcttcaaggtgatgtgcaagatcatcggcatcatggaggaggtggccgacggcttcaagagcaagatcctgaagcaggtgatcagcctgcagaccaagaaccccgagggcagattccccgacctgaccgtggagctgaacagatgggacaccgccttcgaccacgagaaggccagaaagaccggcctgatcacccccaaggccggcttcgacagcgactacgaccaggccctggccgacatcagagagaacgagcagagcctgctggagtacctggagaagcagagaaacagaatcggctgcagaaccatcgtgtactggggcatcggcagaaacagataccagctggagatccccgagaacttcaccaccagaaacctgcccgaggagtacgagctgaagagcaccaagaagggctgcaagagatactggaccaagaccatcgagaagaagctggccaacctgatcaacgccgaggagagaagagacgtgagcctgaaggactgcatgagaagactgttctacaacttcgacaagaactacaaggactggcagagcgccgtggagtgcatcgccgtgctggacgtgctgctgtgcctggccaactacagcagaggcggcgacggccccatgtgcagacccgtgatcctgctgcccgaggacaccccccccttcctggagctgaagggcagcagacacccctgcatcaccaagaccttcttcggcgacgacttcatccccaacgacatcctgatcggctgcgaggaggaggagcaggagaacggcaaggcctactgcgtgctggtgaccggccccaacatgggcggcaagagcaccctgatgagacaggccggcctgctggccgtgatggcccagatgggctgctacgtgcccgccgaggtgtgcagactgacccccatcgacagagtgttcaccagactgggcgccagcgacagaatcatgagcggcgagagcaccttcttcgtggagctgagcgagaccgccagcatcctgatgcacgccaccgcccacagcctggtgctggtggacgagctgggcagaggcaccgccaccttcgacggcaccgccatcgccaacgccgtggtgaaggagctggccgagaccatcaagtgcagaaccctgttcagcacccactaccacagcctggtggaggactacagccagaacgtggccgtgagactgggccacatggcctgcatggtggagaacgagtgcgaggaccccagccaggagaccatcaccttcctgtacaagttcatcaagggcgcctgccccaagagctacggcttcaacgccgccagactggccaacctgcccgaggaggtgatccagaagggccacagaaaggccagagagttcgagaagatgaaccagagcctgagactgttcagagaggtgtgcctggccagcgagagaagcaccgtggacgccgaggccgtgcacaagctgctgaccctgatcaaggagctgtag

SEQ ID NO: 99884 - DNA, 3177 bp, Artificial Sequence
  derived and/or modified sequence
atggttactggcaatggctccctcaagagaaagtccagcagaaaggaaacccccagcgcaactaaacaggcgacaagcatcagctccgaaaccaaaaacacccttagggcattttcagctcctcagaactcagaaagccaagcccacgtctccgggggaggcgacgattccagccgaccaaccgtatggtaccatgagactttggagtggctcaaggaagagaagaggcgcgacgagcaccggcgtcgtcccgaccaccccgactttgatgcgagcaccctttacgttccagaagattttcttaactcctgtacgccagggatgaggaaatggtggcagattaaaagccagaactttgatttggtcatttgttacaaggtaggaaaattctacgaactgtatcacatggacgcactaattggcgtgagcgagttagggctcgttttcatgaaggggaactgggcccattctggctttcccgaaatcgctttcggcagatatagcgatagtctggtgcagaagggctataaagtggcccgcgtggaacagactgaaactcccgagatgatggaagctaggtgccggaagatggcccatatttcaaagtacgatcgtgtggtgaggagggaaatttgccgcattatcaccaaagggacccagacatatagcgtcctggagggcgatccctcagagaattactccaaatacttattgagcctgaaggaaaaggaagaggattcctctggtcacacccgcgcttatggtgtctgcttcgtcgatactagcctgggcaaattcttcattggccagtttagcgatgaccgacactgtagtcgctttaggacactggtggctcactacccccctgtgcaggtcctgttcgagaagggaaatctttccaaagagactaaaaccatactcaagtcaagcctaagttgttccctgcaagagggtctgatcccgggatcccaattctgggacgcgtctaagacgctgcgcaccctgttggaagaagagtacttcagagagaagctctctgacggcatcggcgtgatgctacctcaagtgttgaagggcatgacatcagagtcagactccatcggtctgacccctggcgagaaatccgagctggctctttcagcactcggagggtgtgttttctatctgaagaaatgtctcatcgaccaggaactcctgtccatggctaactttgaagagtatattccgcttgattcggatactgtatccaccacaagaagtggggcaatcttcaccaaggcctatcaacggatggttctggacgctgtcaccctcaacaacttggagatttttctgaacgggaccaatggctcaaccgaggggacgctactggagagggtcgacacctgtcacacacccttcgggaagcgtctgctaaagcagtggctgtgcgcccctctttgtaatcactacgcaatcaatgacagactggacgccatcgaagaccttatggtggttccagataaaatctccgaggtggtggaattgctcaagaagctgcctgatctagaacgccttctgtctaagatccacaacgtcgggtcaccgctgaaatctcaaaaccaccctgatagtcgggctattatgtatgaggagaccacttactcgaagaaaaaaatcatagactttttgagtgccctagagggtttcaaagtgatgtgcaagatcattggaataatggaagaagttgccgacggattcaagtcgaaaatacttaaacaggtgatctctctgcagaccaagaacccagaaggtaggtttcctgatttgaccgtcgaactaaatcgttgggataccgcctttgaccacgaaaaggcacgaaagaccgggctgatcacacctaaagcaggctttgatagcgattatgatcaggcactggcagatattagggaaaacgagcagtcacttttagaatatctggagaaacaaagaaaccgtattggatgtcggacaatcgtgtattgggggatcggcaggaaccggtaccagctggagatccctgaaaatttcaccacgcggaatctgcctgaggagtacgagctgaagtctactaaaaagggctgcaagcggtactggactaaaaccatagaaaagaaacttgccaatctgatcaatgcagaagaacggagagacgtctcacttaaagactgcatgcgcaggctattctataattttgataaaaattacaaggactggcagagcgcagtcgaatgcattgccgtactcgatgtgctgttatgtcttgctaactactcccgcggaggcgacggtcccatgtgcaggccggtcatccttcttcctgaggatacccccccatttttagaactcaagggcagtaggcacccctgcatcactaagacattctttggggatgatttcatccccaacgatattctgattggctgtgaggaggaggagcaggagaacggtaaagcttactgtgtgctggtgactggacccaacatgggaggaaagtctactttgatgcgccaggctggcttgctggccgttatggcacagatgggatgctacgtacctgccgaagtgtgccggctgacaccaatcgaccgcgtgtttactcggctaggcgcttcggataggatcatgagtggcgagtcaacattcttcgtagagctgagtgagaccgcttccattttaatgcacgccacggcgcacagcctcgtgttagtggatgagctgggccgcgggacagcaactttcgacggaacagctattgcaaacgctgtggttaaagagctcgctgagactatcaagtgtcgcacccttttctctactcattaccattctctggttgaggactacagccagaatgtggctgtgcgcttggggcacatggcgtgcatggtggaaaacgaatgtgaggatcccagtcaagagactattacatttctgtataagtttattaagggagcctgtcccaaatcttatggctttaatgccgctcgccttgcaaatctcccggaggaggttattcagaaggggcacagaaaggcacgagagttcgagaagatgaaccagtctctgcggctattcagggaggtgtgtctcgcttcagaacgtagcaccgtagatgcggaggccgtgcataagctgctaactctgataaaggagctatag

SEQ ID NO: 99885 - DNA, 3693 bp, Artificial Sequence
  derived and/or modified sequence
atgagcagacagtcgaccttgtactcctttttcccgaagtctcccgcgctgtccgatgccaacaaggcatctgccagggcgagcagggaaggaggcagggccgcagccgccccaggtgcctcaccttcacctggcggcgacgccgcatggtctgaagccgggcccggtccacggcccttagctagatcagcgtcacctcctaaagcgaagaacctgaacggggggttaaggcgctccgtgggcaccacgtatgtcactgacaaatccgaggaggacaatgagatcgagagcgaggaggaagttcagccgaagacacagggaagcaggcgaagctcccgccagattaaaaagaggagagtgatcagcgactctgagtccgatatcggcggctctgacgttgagttcaagcctgacacaaaagaggaagggtcctctgacgaaatcagctcgggcgtgggggatagtgaatccgagggcctcaacagccccgttaaagtggcacggaagcgaaaaagaatggttactggcaatggtagtcttaagaggaaatcaagtagaaaagaaactccgtccgctacaaagcaggcaacaagtatttccagcgagaccaagaatacactgcgcgcatttagtgcacctcagaattccgaatcacaggctcatgtgtccggagggggagatgactcctcgagaccaacagtgtggtaccatgagactcttgaatggctcaaggaggagaagcgaagggacgaacaccggcgccggcccgaccacccagatttcgacgcatccactctgtacgtccccgaagatttcctgaacagctgtacacctggcatgcgcaagtggtggcagattaaaagccaaaactttgaccttgtgatttgttataaggtggggaagttctacgaactgtaccacatggatgctctgattggcgtgtcggaactagggctggtctttatgaagggcaactgggcacattcagggtttcctgaaattgcctttggtaggtattccgattcgttggtgcagaagggctacaaggtcgccagagttgaacagacagaaacaccagaaatgatggaagccaggtgtcgtaagatggctcacatctccaagtacgaccgggtggtccggcgcgagatttgtagaatcataaccaagggaacccagacttacagtgtgctagagggtgatcccagtgaaaattactccaagtacctactctccctgaaagaaaaggaggaagactctagtggtcatactagagcttatggcgtctgttttgttgatacatccctcggaaaattcttcatcggacaattctcagatgacagacattgtagccggtttcgcacactagtggctcactacccgccggtacaggtgctattcgaaaagggcaacctcagcaaggagactaagacgatcctgaagtctagtctttcctgctccctccaggaggggcttatcccaggcagccagttttgggacgcaagtaagacgcttcgcacgcttctcgaagaagagtactttcgggaaaagctctctgacgggattggcgtaatgttgccccaggtacttaagggaatgacaagcgagtctgattcgatcggacttacacccggcgagaagtctgagctcgccttatcagctctaggcggatgcgtcttctacctgaagaaatgcctgattgatcaggaactcctatctatggccaattttgaagagtatattccattggacagtgacacggtgtcgaccactagatccggggccatcttcacaaaggcctatcagaggatggtgctcgacgccgtaactctcaataatctggagatattccttaacggcacaaacggaagcacagaaggtactctgctggagcgcgtggacacatgccacacaccgtttggcaagcggctactaaagcagtggctttgcgcaccactttgcaaccactatgccattaatgacagactggatgccatcgaagatctgatggttgtgccagacaaaatttccgaggtggtggagctgttgaaaaaactgccggatttggagagattactcagcaaaatacacaatgttggcagccccctcaaatcacagaatcatcctgatagtagagcgattatgtacgaggaaactacgtattctaagaagaagatcattgattttttgagcgcactcgagggctttaaagtgatgtgtaagattatcggaatcatggaggaagtagctgatggttttaaaagcaaaatccttaagcaagtcatatctctgcaaaccaagaatccagagggcaggttccctgacctgactgtggagctcaaccggtgggataccgcctttgatcatgagaaagccaggaaaacgggactgattactcccaaggctgggtttgattcagattacgatcaggcactggcagatatcagggaaaatgagcagagtctgctggagtacttggagaagcaacggaatcggatcggctgccggaccatagtgtattggggcatcggcagaaaccgttatcagttggaaattccagagaacttcaccacacggaatctgcccgaagagtacgaactgaagagcacaaaaaaaggctgtaagcgttattggaccaagaccattgagaagaaactcgctaatctaataaacgcagaggagcgccgtgatgtcagcctgaaagattgtatgaggcgtctgttttataacttcgataagaactacaaagactggcagtcagccgtcgaatgcatagctgtgctggacgtgctgctttgcctagctaactattctcgagggggggacggtcccatgtgtcggcccgtgatcctcctgccagaagacactcctccattccttgaactcaagggatctcgacatccatgtatcaccaaaacattcttcggggacgacttcattcctaatgatatcctgatcgggtgcgaggaggaggagcaagagaacggcaaggcctattgtgtgctagtcactgggccaaatatgggggggaagtcgaccctgatgcggcaagccggactgctggcagttatggcacagatgggttgttatgtaccagccgaagtctgtcgactaacaccaatcgacagggtcttcactcgccttggagcgagcgaccgaataatgagcggcgaatccacattcttcgtggaactgtccgagaccgccagcattctcatgcacgccacagcacacagtctagtgttggttgatgaactggggagaggtaccgccacattcgatggcacggctatcgcaaacgcagtggtgaaggagttggctgaaactatcaagtgccggactctgttctcgactcattaccattccctggtcgaggactattcccagaacgtggcagtccgcctgggccacatggcgtgtatggtcgagaatgaatgcgaagacccctcacaggagacgatcacgttcctgtataaattcatcaagggtgcttgccctaagtcctacggatttaacgccgcccgcttggccaacctccccgaggaagtcatccagaagggccacaggaaggcccgtgaatttgaaaagatgaaccagtctttgaggctgtttagggaggtgtgccttgcaagtgagaggtccaccgtggacgccgaggcagtccacaagcttctcacccttatcaaggagctctag

SEQ ID NO: 99886 - DNA, 3177 bp, Artificial Sequence
  derived and/or modified sequence
atggtgactggaaatggcagcctgaagaggaagagcagcaggaaggagaccccatctgccaccaagcaggccaccagcatcagcagcgagaccaagaacaccctgcgggccttcagcgccccccagaacagcgagagccaggcccacgtgtctggaggaggagatgacagcagccggcccaccgtgtggtaccacgagaccctggagtggctgaaggaggagaagagaagagatgagcacagaagaagaccagaccacccagactttgatgccagcaccctgtatgtgcctgaggacttcctgaacagctgcaccccaggcatgaggaagtggtggcagatcaagagccagaactttgacctggtgatctgctacaaggtgggcaagttctatgagctgtaccacatggatgccctgattggagtgtctgagctgggcctggtgttcatgaagggcaactgggcccacagcggcttccctgagatcgccttcggccgctacagcgacagcctggtgcagaagggctacaaggtggcccgggtggagcagacagagaccccagagatgatggaggcccgctgcaggaagatggcccacatcagcaaatatgacagagtggtgcggcgggagatctgccgcatcatcaccaagggcacccagacctacagcgtgctggagggggaccccagcgagaactacagcaagtacctgctgagcctgaaggagaaggaggaggacagcagcggccacacccgggcctacggcgtgtgctttgtggacaccagcctgggcaagttcttcatcggccagttcagtgatgacagacactgcagccgcttccgcaccctggtggcccactacccacctgtgcaggtgctgtttgagaagggcaacctgagcaaggagaccaagaccatcctgaagagcagcctgagctgcagcctgcaggagggcctcatccctggcagccagttctgggatgccagcaagaccctgcggaccctgctggaggaggagtacttccgggagaagctgagtgatggcattggagtgatgctgccccaggtgctgaagggcatgaccagcgagagtgacagcatcggcctgaccccaggagagaagtctgagctggccctgagcgccctgggcggctgtgtgttctacctgaagaagtgcctgattgaccaggagctgctgtccatggccaactttgaggagtacatccccctggacagcgacacagtgtccaccaccaggtctggggccatcttcaccaaggcctaccagaggatggtgctggatgctgtgaccctgaacaacctggagatcttcctgaatggcaccaacggcagcacagagggcaccctgctggagcgggtggacacctgccacaccccatttgggaagaggctgctgaagcagtggctgtgtgcccccctgtgcaaccactacgccatcaatgaccggctggatgccatcgaggacctgatggtggtgcctgacaagatcagcgaggtggtggagctgctgaagaagctgcctgacctggagcggctgctgagcaagatccacaacgtgggcagccccctgaagagccagaaccacccagacagccgggccatcatgtatgaggagaccacctacagcaagaagaagatcatcgacttcctgagcgccctggagggcttcaaggtgatgtgcaagatcatcggcatcatggaggaggtggctgatggcttcaagagcaagatcctgaagcaggtgatcagcctgcagaccaagaaccctgagggccgcttcccagacctgactgtggagctgaaccgctgggacacagcctttgaccacgagaaggccaggaagacaggcctcatcacccccaaggccggctttgacagcgactatgaccaggccctggccgacatccgggagaatgagcagagcctgctggagtacctggagaagcagaggaaccgcatcggctgcaggaccatcgtgtactggggcatcggcaggaaccgctaccagctggagatccctgagaacttcaccaccaggaacctgcctgaggagtatgagctgaagagcaccaagaagggctgcaagcgctactggaccaagaccatcgagaagaagctggccaacctgatcaatgctgaggagaggagagatgtgtccctgaaggactgcatgaggaggctcttctacaactttgacaagaactacaaggactggcagagcgctgtggagtgcatcgctgtgctggatgtgctgctgtgcctggccaactacagcagaggaggagatggccccatgtgcaggcctgtgatcctgctgcctgaggacaccccacccttcctggagctgaagggcagccgccacccctgcatcaccaagaccttctttggagatgacttcatccccaatgacatcctgattggctgtgaggaggaggagcaggagaatggcaaggcctactgtgtgctggtgacaggccccaacatgggcggcaagagcaccctgatgaggcaggccggcctgctggccgtgatggcccagatgggctgctacgtgcctgctgaggtgtgccgcctgacccccatcgacagagtcttcacccggctgggcgccagtgaccgcatcatgtctggagagagcaccttctttgtggagctgtctgaaacagccagcatcctgatgcacgccacagcccacagcctggtgctggtggatgagctgggccggggcacagccacctttgatggaacagccatcgccaatgctgtggtgaaggagctggccgagaccatcaagtgcaggaccctcttcagcacccactaccacagcctggtggaggactacagccagaatgtggccgtgcggctgggccacatggcctgcatggtggagaatgaatgtgaggaccccagccaggagaccatcaccttcctgtacaagttcatcaagggggcctgccccaagagctatggcttcaatgctgcccggctggccaacctgcctgaggaggtgatccagaagggccacaggaaggcccgggagtttgagaagatgaaccagagcctgcggctcttccgggaggtgtgcctggccagcgagaggagcacagtggatgctgaggccgtgcacaagctgctgaccctcatcaaggagctgtag

SEQ ID NO: 99887 - DNA, 3693 bp, Artificial Sequence
  derived and/or modified sequence
atgagccggcagagcaccctgtacagcttcttccccaagagccctgccctgagtgatgccaacaaggccagcgcccgggccagccgggagggcggccgggctgctgctgcccctggggccagccccagccctggaggagatgctgcctggagcgaggccggccctggcccccggcccctggcccggagcgccagcccccccaaggccaagaacctgaatggaggcctgcggcgctctgtgggcaccacctacgtgacagacaagtcagaagaagataatgaaattgaaagtgaggaggaggtgcagcccaagacccagggcagcagaagaagcagccggcagatcaagaagagaagagtcatcagtgacagcgagagtgacatcggcggcagtgatgtggagttcaagccagacaccaaggaggagggcagcagtgatgagatcagcagcggcgtgggggacagcgagagcgagggcctgaacagccctgtgaaggtggccaggaagaggaagaggatggtgactggaaatggcagcctgaagaggaagagcagcaggaaggagaccccatctgccaccaagcaggccaccagcatcagcagcgagaccaagaacaccctgcgggccttcagcgccccccagaacagcgagagccaggcccacgtgtctggaggaggagatgacagcagccggcccaccgtgtggtaccacgagaccctggagtggctgaaggaggagaagagaagagatgagcacagaagaagaccagaccacccagactttgatgccagcaccctgtatgtgcctgaggacttcctgaacagctgcaccccaggcatgaggaagtggtggcagatcaagagccagaactttgacctggtgatctgctacaaggtgggcaagttctatgagctgtaccacatggatgccctgattggagtgtctgagctgggcctggtgttcatgaagggcaactgggcccacagcggcttccctgagatcgccttcggccgctacagcgacagcctggtgcagaagggctacaaggtggcccgggtggagcagacagagaccccagagatgatggaggcccgctgcaggaagatggcccacatcagcaaatatgacagagtggtgcggcgggagatctgccgcatcatcaccaagggcacccagacctacagcgtgctggagggggaccccagcgagaactacagcaagtacctgctgagcctgaaggagaaggaggaggacagcagcggccacacccgggcctacggcgtgtgctttgtggacaccagcctgggcaagttcttcatcggccagttcagtgatgacagacactgcagccgcttccgcaccctggtggcccactacccacctgtgcaggtgctgtttgagaagggcaacctgagcaaggagaccaagaccatcctgaagagcagcctgagctgcagcctgcaggagggcctcatccctggcagccagttctgggatgccagcaagaccctgcggaccctgctggaggaggagtacttccgggagaagctgagtgatggcattggagtgatgctgccccaggtgctgaagggcatgaccagcgagagtgacagcatcggcctgaccccaggagagaagtctgagctggccctgagcgccctgggcggctgtgtgttctacctgaagaagtgcctgattgaccaggagctgctgtccatggccaactttgaggagtacatccccctggacagcgacacagtgtccaccaccaggtctggggccatcttcaccaaggcctaccagaggatggtgctggatgctgtgaccctgaacaacctggagatcttcctgaatggcaccaacggcagcacagagggcaccctgctggagcgggtggacacctgccacaccccatttgggaagaggctgctgaagcagtggctgtgtgcccccctgtgcaaccactacgccatcaatgaccggctggatgccatcgaggacctgatggtggtgcctgacaagatcagcgaggtggtggagctgctgaagaagctgcctgacctggagcggctgctgagcaagatccacaacgtgggcagccccctgaagagccagaaccacccagacagccgggccatcatgtatgaggagaccacctacagcaagaagaagatcatcgacttcctgagcgccctggagggcttcaaggtgatgtgcaagatcatcggcatcatggaggaggtggctgatggcttcaagagcaagatcctgaagcaggtgatcagcctgcagaccaagaaccctgagggccgcttcccagacctgactgtggagctgaaccgctgggacacagcctttgaccacgagaaggccaggaagacaggcctcatcacccccaaggccggctttgacagcgactatgaccaggccctggccgacatccgggagaatgagcagagcctgctggagtacctggagaagcagaggaaccgcatcggctgcaggaccatcgtgtactggggcatcggcaggaaccgctaccagctggagatccctgagaacttcaccaccaggaacctgcctgaggagtatgagctgaagagcaccaagaagggctgcaagcgctactggaccaagaccatcgagaagaagctggccaacctgatcaatgctgaggagaggagagatgtgtccctgaaggactgcatgaggaggctcttctacaactttgacaagaactacaaggactggcagagcgctgtggagtgcatcgctgtgctggatgtgctgctgtgcctggccaactacagcagaggaggagatggccccatgtgcaggcctgtgatcctgctgcctgaggacaccccacccttcctggagctgaagggcagccgccacccctgcatcaccaagaccttctttggagatgacttcatccccaatgacatcctgattggctgtgaggaggaggagcaggagaatggcaaggcctactgtgtgctggtgacaggccccaacatgggcggcaagagcaccctgatgaggcaggccggcctgctggccgtgatggcccagatgggctgctacgtgcctgctgaggtgtgccgcctgacccccatcgacagagtcttcacccggctgggcgccagtgaccgcatcatgtctggagagagcaccttctttgtggagctgtctgaaacagccagcatcctgatgcacgccacagcccacagcctggtgctggtggatgagctgggccggggcacagccacctttgatggaacagccatcgccaatgctgtggtgaaggagctggccgagaccatcaagtgcaggaccctcttcagcacccactaccacagcctggtggaggactacagccagaatgtggccgtgcggctgggccacatggcctgcatggtggagaatgaatgtgaggaccccagccaggagaccatcaccttcctgtacaagttcatcaagggggcctgccccaagagctatggcttcaatgctgcccggctggccaacctgcctgaggaggtgatccagaagggccacaggaaggcccgggagtttgagaagatgaaccagagcctgcggctcttccgggaggtgtgcctggccagcgagaggagcacagtggatgctgaggccgtgcacaagctgctgaccctcatcaaggagctgtag

SEQ ID NO: 99888 - DNA, 3177 bp, Artificial Sequence
  derived and/or modified sequence
atggtgaccggcaacggcagcctgaagcggaagagcagccggaaggagacaccctccgccaccaagcaagcgacctccatctcttcagagacaaagaacaccctgcgggcattcagcgcaccacagaacagtgagtcacaggcgcacgtatccggaggtggagacgactcgagtaggcccactgtgtggtaccacgagacgctcgagtggttgaaagaagaaaaaaggcgcgatgaacaccggcgacgccccgatcaccctgatttcgatgcctcaactctttatgtgccagaagactttctgaactcatgtacaccagggatgcgtaaatggtggcaaatcaagtcacaaaactttgacttggtgatttgttataaggtgggcaaattttatgagctgtaccacatggatgcactgatcggggtgtccgaattgggcctcgtcttcatgaaaggaaactgggcccacagcggatttcccgaaatagcattcggtagatactccgacagcctggtgcagaaggggtataaagtggcgcgcgtagaacaaacagagacccctgaaatgatggaagctcgatgtcgcaaaatggcccacatctcaaagtacgatagggtggtacgtcgggagatttgccggattattacaaaaggtacacaaacatactccgtcctggaaggcgatccaagcgaaaattacagtaagtatctcctgtctctcaaggagaaggaagaagactcttccggacatacccgcgcgtatggagtttgctttgtagatacttctctcggtaaattcttcatcggccagttctctgatgaccggcactgctcccggtttaggaccttggttgcccactatcctccagtgcaggtgctgttcgagaagggaaacctcagcaaggagacgaaaaccattctcaagagctccttaagttgctccctgcaggaaggcctgatcccgggtagtcagttctgggacgccagcaaaacactccggactctgttggaagaagaatactttcgtgagaaactctccgacggtattggtgtaatgttgccgcaggtcctgaagggaatgacaagcgaatcagactctataggtctcactccgggagagaaatccgagctggcactgtctgctctgggcggttgtgttttttatctgaagaagtgtttaatcgatcaggagctattaagcatggccaactttgaagagtacattccgttggacagtgataccgtgtccacgacccggagcggcgctattttcacaaaggcttaccagcgtatggtgctggatgctgtgactctgaataatctggagatctttctgaacgggaccaatggatctactgaaggtacgttgctggaaagagtggacacttgtcatacacctttcgggaagaggttattgaaacagtggctttgcgccccactgtgtaatcattacgccatcaacgaccggctcgacgccatcgaggacctcatggtcgtccctgacaaaatttcagaggtggtcgagttactgaaaaaacttcccgaccttgaacgcctcttgtcaaagatccataatgtgggatctcctctgaaatcacaaaaccaccctgatagtcgagctatcatgtacgaagagactacttattccaagaagaaaataattgatttcctcagtgccctcgaggggtttaaagtgatgtgcaaaataatcgggattatggaagaagtagccgacggctttaaatctaagattctgaagcaggtaatttccctgcagactaaaaatcctgaaggacggttcccagatctgaccgttgaacttaatagatgggacactgcctttgatcacgaaaaagcccggaaaacaggactgatcacgcccaaggcgggctttgatagcgactatgaccaggcacttgctgatattcgcgaaaatgagcagtccctgctggagtatctggagaagcagcgcaatagaattggatgcagaaccattgtatattggggcatagggagaaatcgctatcagctcgagatcccagagaattttacaacccgcaatctgcctgaggaatatgaactcaaatccactaaaaaaggttgtaagagatactggacaaagaccattgaaaagaaactcgcgaacctcatcaacgcagaagagagaagggacgtgagcctgaaggattgcatgagaaggctcttttacaattttgacaagaattacaaagactggcagagtgctgtggagtgcatcgcagtgcttgatgtgttgctgtgcctcgctaactattcccggggcggagacgggcctatgtgcagacccgtgattcttctgcccgaagatacaccccctttcttagaactaaaggggagtcgccatccttgcattacgaagacctttttcggtgatgatttcattcccaatgatatactgatcggctgtgaggaggaggagcaggaaaacggaaaggcatattgcgttctagtgaccggccctaacatgggaggtaagagtactctcatgcgtcaggcgggactgctcgctgtgatggcccagatgggctgctacgtgccagccgaagtatgtcgactgacccccatcgaccgggttttcacccgcttgggggctagtgaccggatcatgagcggtgagagcacgttcttcgtggaacttagcgaaactgccagtatcctgatgcatgctactgcccattccttggtgctagtagacgaactcggcaggggaaccgccaccttcgatggaaccgccatcgctaacgctgtcgttaaggagcttgcggagacaattaagtgtcgcacgttattttccacgcactatcattccctggtagaggactatagccaaaacgttgcggttcggctcgggcacatggcttgcatggtcgagaatgagtgtgaagacccttcacaagagaccatcacttttttgtataaatttattaaaggtgcttgcccaaaatcttacggcttcaacgccgcaagactcgccaatctgccagaggaggtgatccagaaagggcatagaaaggctcgtgagttcgaaaaaatgaaccagagtctcaggctctttcgggaggtgtgcctcgcatcggagagatcaactgtggacgctgaggccgttcataaattgctcactctgatcaaagagctgtag

SEQ ID NO: 99889 - DNA, 3693 bp, Artificial Sequence
  derived and/or modified sequence
atgagccggcagagcaccctgtacagcttcttccccaagagccccgccctaagcgatgccaataaagcaagtgctcgggcgagtagggagggcggccgggctgcagccgcgccgggtgcctcaccttccccgggcggcgatgcggcctggtctgaagccggacccggtcctaggccgctggcccgcagcgcgtccccacctaaggccaaaaacctcaatgggggtcttcgtcggagtgtgggcacaacgtatgtgactgacaagagcgaagaggataacgagatcgagtctgaagaggaggtgcagccaaaaacgcaaggctctcgtcggagttccaggcagattaaaaaacggcgggttattagcgattctgagagcgacattggaggctcagatgtcgagtttaaacccgatactaaagaagaaggcagtagcgatgagattagctccggcgtgggggactctgagtctgagggcctgaattccccagtcaaagtcgcgaggaaaagaaagaggatggtgactggaaatggctctctcaagcggaagtcaagcaggaaggagacgcccagtgcgaccaagcaggccacgtctatctcaagtgaaaccaaaaatacacttcgcgccttttctgccccacaaaatagtgagtcacaggcacacgtgagcggcgggggggacgattcatctcgtcccacagtttggtatcatgaaacactggagtggctgaaggaagagaagcgccgcgatgaacatcgacgccgtcccgaccatccagatttcgacgcctccactttatatgtacctgaggactttctgaactcatgcactcctggaatgaggaagtggtggcagatcaaaagtcagaatttcgatctcgtcatctgctacaaggtcggaaaattttacgagctgtaccatatggacgcccttatcggcgtctctgagctgggtctggtgttcatgaaggggaactgggcccattctggatttcccgaaattgcttttggtaggtactccgactctcttgtccagaagggatacaaggtggccagggtggagcagacagagaccccagaaatgatggaggcccggtgccgcaagatggcgcacatctcgaaatatgaccgagttgtgcgacgcgaaatctgtcgcattatcaccaagggcacacagacctacagcgtcctcgaaggcgacccgtcagaaaattatagcaagtatttactcagtctgaaggagaaagaagaggactcttccggccacacgagagcgtacggtgtttgcttcgtcgacaccagtctggggaagtttttcattggtcaattttcagacgaccgtcactgttctaggttcagaaccttagtggctcattaccctcctgtccaggtcctcttcgagaaaggcaacttatctaaggaaaccaaaacaatcctgaagtctagcctcagctgcagtctgcaggaggggctgattcctggcagtcagttttgggacgctagtaagacactgcggacgcttctcgaagaagaatacttccgtgaaaagttatctgacgggattggagttatgctgcctcaagtactcaaaggtatgacgtctgaatccgacagtatcggcctcactcccggcgagaaaagtgagctcgcactgagcgctttaggaggctgcgtgttttatctgaaaaaatgtcttattgatcaagaactgctgtccatggccaattttgaagagtacatcccgctggatagcgataccgttagcaccaccagatccggagccatatttaccaaggcctaccaacgcatggtgctggacgccgtgacattaaataatcttgaaatctttctgaacggaaccaatgggagtaccgagggtacactgctagagcgggtagatacatgccacactccattcgggaagcgcctcttaaaacagtggttgtgtgcacccttgtgtaaccactatgctatcaatgatcgactggacgcgatcgaagacctgatggtcgtgccagacaagatctccgaagtagttgaactactgaaaaaactccccgaccttgaaagactgctgtcaaaaatacacaacgtcggctcccctctaaaatcacagaaccacccagattctagagccattatgtatgaagagactacatactccaaaaaaaagattatagactttctctccgccctcgaaggctttaaagtcatgtgtaagatcattggcataatggaggaggtagcagacgggtttaaatcaaagattctaaagcaggttatttctctccagactaagaatccagaaggtcgattccctgatttaacagtcgaactgaatagatgggatacagcttttgatcatgagaaagccagaaaaaccggcctgattactcctaaagccgggttcgatagcgattacgatcaggccctggctgatataagagaaaacgagcagtctctactcgaatacctcgaaaagcagcgcaaccggataggctgtaggacgatcgtatactggggaatcggcaggaaccggtatcagcttgaaattcccgagaattttacgactagaaacttacccgaggagtacgagctcaaatcaaccaaaaagggctgtaagcggtactggaccaagaccatcgaaaaaaagttggccaatctcatcaacgcggaggagaggagggatgtttccctcaaagattgtatgcgccggttgttttacaactttgacaagaactacaaagactggcagtccgcagtggaatgtatcgccgtgcttgatgtgctgctgtgtctggccaattactcaagagggggagatggaccaatgtgtaggccagttatcctcctgccggaagacacacctccttttcttgaactgaaaggcagcagacatccgtgcattactaaaaccttttttggggatgactttatccccaatgatatccttattggctgtgaggaggaggagcaggagaatggtaaggcctactgtgtgctagttaccgggccaaatatgggaggaaagtcaaccttaatgagacaggcaggcctgctggccgtgatggcccagatgggttgctacgtgcctgctgaggtgtgtcggctcacacctatcgatagggttttcacgagacttggcgcctccgaccggattatgtctggcgaaagtacattctttgtggagctgagtgaaacagcatctatcttaatgcatgccaccgctcactccctggtgctggtggacgagttaggcagagggacggccacgttcgatggcaccgcaatcgcaaacgccgtggtaaaagagttggccgaaacgattaaatgccggacccttttctctacccattaccattcgctggttgaagattactcccaaaatgtggcggtccgcctggggcatatggcgtgtatggttgaaaatgagtgtgaagacccttcacaggagacgataacgttcttgtataaatttataaagggagcgtgccccaaatcttacggattcaatgccgcgcggctggcgaatcttcctgaggaagttattcagaaaggtcacaggaaagctcgagaatttgaaaaaatgaatcagtccctgcgcctctttagggaagtgtgtcttgcatctgagcgcagcacggtcgatgccgaggcagtacacaagttgctaactctcatcaaggaattatag

SEQ ID NO: 99890 - DNA, 4055 bp, Artificial Sequence
  derived and/or modified sequence
gagtccggtggtgtggggtgcgaaaggaggttcctcggccggcgcggagatagtgagttggggctccagtagtcgatcgaggtagacacttagaggtagttaagagccgcggtcgccgagacgccttggggacggtgggccttcggcctagttgtgacttctcaccaggagatttggtttgggccaagatggagggttacccctggtggccttgtctggtttacaaccacccctttgatggaacattcatccgcgagaaagggaaatcagtccgtgttcatgtacagttttttgatgacagcccaacaaggggctgggttagcaaaaggcttttaaagccatatacaggttcaaaatcaaaggaagcccagaagggaggtcatttttacagtgcaaagcctgaaatactgagagcaatgcaacgtgcagatgaagccttaaataaagacaagattaagaggcttgaattggcagtttgtgatgagccctcagagccagaagaggaagaagagatggaggcacaacttacgtaacagataagagtgaagaagataatgaaattgagagtgaagaggaagtacagcctaagacacaaggatctaggcgaagtagccgccaaataaaaaaacgaagggtcatatcagattctgagagtgacattggtggctctgatgtggaatttaagccagacactaaggaggaaggaagcagtgatgaaataagcagtggagtgggggatagtgagagtgaaggcctgaacagccctgtcaaagttgctcgaaagcggaagagaatggtgactggaaatggctctcttaaaaggaaaagctctaggaaggaaacgccctcagccaccaaacaagcaactagcatttcatcagaaaccaagaatactttgagagctttctctgcccctcaaaattctgaatcccaagcccacgttagtggaggtggtgatgacagtagtcgccctactgtttggtatcatgaaactttagaatggcttaaggaggaaaagagaagagatgagcacaggaggaggcctgatcaccccgattttgatgcatctacactctatgtgcctgaggatttcctcaattcttgtactcctgggatgaggaagtggtggcagattaagtctcagaactttgatcttgtcatctgttacaaggtggggaaattttatgagctgtaccacatggatgctcttattggagtcagtgaactggggctggtattcatgaaaggcaactgggcccattctggctttcctgaaattgcatttggccgttattcagattccctggtgcagaagggctataaagtagcacgagtggaacagactgagactccagaaatgatggaggcacgatgtagaaagatggcacatatatccaagtatgatagagtggtgaggagggagatctgtaggatcattaccaagggtacacagacttacagtgtgctggaaggtgatccctctgagaactacagtaagtatcttcttagcctcaaagaaaaagaggaagattcttctggccatactcgtgcatatggtgtgtgctttgttgatacttcactgggaaagtttttcataggtcagttttcagatgatcgccattgttcgagatttaggactctagtggcacactatcccccagtacaagttttatttgaaaaaggaaatctctcaaaggaaactaaaacaattctaaagagttcattgtcctgttctcttcaggaaggtctgatacccggctcccagttttgggatgcatccaaaactttgagaactctccttgaggaagaatattttagggaaaagctaagtgatggcattggggtgatgttaccccaggtgcttaaaggtatgacttcagagtctgattccattgggttgacaccaggagagaaaagtgaattggccctctctgctctaggtggttgtgtcttctacctcaaaaaatgccttattgatcaggagcttttatcaatggctaattttgaagaatatattcccttggattctgacacagtcagcactacaagatctggtgctatcttcaccaaagcctatcaacgaatggtgctagatgcagtgacattaaacaacttggagatttttctgaatggaacaaatggttctactgaaggaaccctactagagagggttgatacttgccatactccttttggtaagcggctcctaaagcaatggctttgtgccccactctgtaaccattatgctattaatgatcgtctagatgccatagaagacctcatggttgtgcctgacaaaatctccgaagttgtagagcttctaaagaagcttccagatcttgagaggctactcagtaaaattcataatgttgggtctcccctgaagagtcagaaccacccagacagcagggctataatgtatgaagaaactacatacagcaagaagaagattattgattttctttctgctctggaaggattcaaagtaatgtgtaaaattatagggatcatggaagaagttgctgatggttttaagtctaaaatccttaagcaggtcatctctctgcagacaaaaaatcctgaaggtcgttttcctgatttgactgtagaattgaaccgatgggatacagcctttgaccatgaaaaggctcgaaagactggacttattactcccaaagcaggctttgactctgattatgaccaagctcttgctgacataagagaaaatgaacagagcctcctggaatacctagagaaacagcgcaacagaattggctgtaggaccatagtctattgggggattggtaggaaccgttaccagctggaaattcctgagaatttcaccactcgcaatttgccagaagaatacgagttgaaatctaccaagaagggctgtaaacgatactggaccaaaactattgaaaagaagttggctaatctcataaatgctgaagaacggagggatgtatcattgaaggactgcatgcggcgactgttctataactttgataaaaattacaaggactggcagtctgctgtagagtgtatcgcagtgttggatgttttactgtgcctggctaactatagtcgagggggtgatggtcctatgtgtcgcccagtaattctgttgccggaagataccccccccttcttagagcttaaaggatcacgccatccttgcattacgaagactttttttggagatgattttattcctaatgacattctaataggctgtgaggaagaggagcaggaaaatggcaaagcctattgtgtgcttgttactggaccaaatatggggggcaagtctacgcttatgagacaggctggcttattagctgtaatggcccagatgggttgttacgtccctgctgaagtgtgcaggctcacaccaattgatagagtgtttactagacttggtgcctcagacagaataatgtcaggtgaaagtacattttttgttgaattaagtgaaactgccagcatactcatgcatgcaacagcacattctctggtgcttgtggatgaattaggaagaggtactgcaacatttgatgggacggcaatagcaaatgcagttgttaaagaacttgctgagactataaaatgtcgtacattattttcaactcactaccattcattagtagaagattattctcaaaatgttgctgtgcgcctaggacatatggcatgcatggtagaaaatgaatgtgaagaccccagccaggagactattacgttcctctataaattcattaagggagcttgtcctaaaagctatggctttaatgcagcaaggcttgctaatctcccagaggaagttattcaaaagggacatagaaaagcaagagaatttgagaagatgaatcagtcactacgattatttcgggaagtttgcctggctagtgaaaggtcaactgtagatgctgaagctgtccataaattgctgactttgattaaggaattatagactgactacattggaagctttgagttgacttctgacaaaggtggtaaattcagacaacattatgatctaataaactttatttttt

SEQ ID NO: 99891 - DNA, 3829 bp, Artificial Sequence
  derived and/or modified sequence
gcttttaggagctccgtccgacagaacggttgggccttgccggctgtcggtatgtcgcgacagagcaccctgtacagcttcttccccaagtctccggcgctgagtgatgccaacaaggcctcggccagggcctcacgcgaaggcggccgtgccgccgctgcccccggggcctctccttccccaggcggggatgcggcctggagcgaggctgggcctgggcccaggcccttggcgcgctccgcgtcaccgcccaaggcgaagaacctcaacggagggctgcggagatcggtaggcacaacttacgtaacagataagagtgaagaagataatgaaattgagagtgaagaggaagtacagcctaagacacaaggatctaggcgaagtagccgccaaataaaaaaacgaagggtcatatcagattctgagagtgacattggtggctctgatgtggaatttaagccagacactaaggaggaaggaagcagtgatgaaataagcagtggagtgggggatagtgagagtgaaggcctgaacagccctgtcaaagttgctcgaaagcggaagagaatggtgactggaaatggctctcttaaaaggaaaagctctaggaaggaaacgccctcagccaccaaacaagcaactagcatttcatcagaaaccaagaatactttgagagctttctctgcccctcaaaattctgaatcccaagcccacgttagtggaggtggtgatgacagtagtcgccctactgtttggtatcatgaaactttagaatggcttaaggaggaaaagagaagagatgagcacaggaggaggcctgatcaccccgattttgatgcatctacactctatgtgcctgaggatttcctcaattcttgtactcctgggatgaggaagtggtggcagattaagtctcagaactttgatcttgtcatctgttacaaggtggggaaattttatgagctgtaccacatggatgctcttattggagtcagtgaactggggctggtattcatgaaaggcaactgggcccattctggctttcctgaaattgcatttggccgttattcagattccctggtgcagaagggctataaagtagcacgagtggaacagactgagactccagaaatgatggaggcacgatgtagaaagatggcacatatatccaagtatgatagagtggtgaggagggagatctgtaggatcattaccaagggtacacagacttacagtgtgctggaaggtgatccctctgagaactacagtaagtatcttcttagcctcaaagaaaaagaggaagattcttctggccatactcgtgcatatggtgtgtgctttgttgatacttcactgggaaagtttttcataggtcagttttcagatgatcgccattgttcgagatttaggactctagtggcacactatcccccagtacaagttttatttgaaaaaggaaatctctcaaaggaaactaaaacaattctaaagagttcattgtcctgttctcttcaggaaggtctgatacccggctcccagttttgggatgcatccaaaactttgagaactctccttgaggaagaatattttagggaaaagctaagtgatggcattggggtgatgttaccccaggtgcttaaaggtatgacttcagagtctgattccattgggttgacaccaggagagaaaagtgaattggccctctctgctctaggtggttgtgtcttctacctcaaaaaatgccttattgatcaggagcttttatcaatggctaattttgaagaatatattcccttggattctgacacagtcagcactacaagatctggtgctatcttcaccaaagcctatcaacgaatggtgctagatgcagtgacattaaacaacttggagatttttctgaatggaacaaatggttctactgaaggaaccctactagagagggttgatacttgccatactccttttggtaagcggctcctaaagcaatggctttgtgccccactctgtaaccattatgctattaatgatcgtctagatgccatagaagacctcatggttgtgcctgacaaaatctccgaagttgtagagcttctaaagaagcttccagatcttgagaggctactcagtaaaattcataatgttgggtctcccctgaagagtcagaaccacccagacagcagggctataatgtatgaagaaactacatacagcaagaagaagattattgattttctttctgctctggaaggattcaaagtaatgtgtaaaattatagggatcatggaagaagttgctgatggttttaagtctaaaatccttaagcaggtcatctctctgcagacaaaaaatcctgaaggtcgttttcctgatttgactgtagaattgaaccgatgggatacagcctttgaccatgaaaaggctcgaaagactggacttattactcccaaagcaggctttgactctgattatgaccaagctcttgctgacataagagaaaatgaacagagcctcctggaatacctagagaaacagcgcaacagaattggctgtaggaccatagtctattgggggattggtaggaaccgttaccagctggaaattcctgagaatttcaccactcgcaatttgccagaagaatacgagttgaaatctaccaagaagggctgtaaacgatactggaccaaaactattgaaaagaagttggctaatctcataaatgctgaagaacggagggatgtatcattgaaggactgcatgcggcgactgttctataactttgataaaaattacaaggactggcagtctgctgtagagtgtatcgcagtgttggatgttttactgtgcctggctaactatagtcgagggggtgatggtcctatgtgtcgcccagtaattctgttgccggaagataccccccccttcttagagcttaaaggatcacgccatccttgcattacgaagactttttttggagatgattttattcctaatgacattctaataggctgtgaggaagaggagcaggaaaatggcaaagcctattgtgtgcttgttactggaccaaatatggggggcaagtctacgcttatgagacaggctggcttattagctgtaatggcccagatgggttgttacgtccctgctgaagtgtgcaggctcacaccaattgatagagtgtttactagacttggtgcctcagacagaataatgtcaggtgaaagtacattttttgttgaattaagtgaaactgccagcatactcatgcatgcaacagcacattctctggtgcttgtggatgaattaggaagaggtactgcaacatttgatgggacggcaatagcaaatgcagttgttaaagaacttgctgagactataaaatgtcgtacattattttcaactcactaccattcattagtagaagattattctcaaaatgttgctgtgcgcctaggacatatggcatgcatggtagaaaatgaatgtgaagaccccagccaggagactattacgttcctctataaattcattaagggagcttgtcctaaaagctatggctttaatgcagcaaggcttgctaatctcccagaggaagttattcaaaagggacatagaaaagcaagagaatttgagaagatgaatcagtcactacgattatttcgggaagtttgcctggctagtgaaaggtcaactgtagatgctgaagctgtccataaattgctgactttgattaaggaattatagactgactacattggaagctttgagttgacttctgacaaaggtggtaaattcagacaacattatgatctaataaactttatttttt

SEQ ID NO: 99892 - DNA, 3177 bp, Artificial Sequence
  derived and/or modified sequence
atggtcacgggtaatggttccctgaaacggaagtccagccgaaaagaaacaccctctgctacgaagcaggctacaagcataagctctgaaaccaagaataccctgagagcgttctccgcccctcagaatagtgaaagccaggctcatgttagcggcggaggagacgacagctcgcgcccaacagtgtggtatcacgagacactggaatggttaaaagaggaaaagagacgagatgaacacaggaggcggcctgatcaccctgactttgatgccagcaccctttatgtgcctgaggattttctgaattcctgcaccccagggatgagaaaatggtggcaaattaaaagccagaattttgatcttgtgatatgctacaaagtggggaagttttatgaattgtaccatatggacgctctcataggagtctccgagcttggtctggtgtttatgaaaggaaattgggcccattcaggatttcccgagatcgcatttggaaggtactcagactccctcgtacagaaaggatacaaagtagccagggttgagcagactgagacgcctgaaatgatggaagcacgctgcaggaaaatggcccatattagcaagtacgaccgagtggtcagacgggagatttgccgaatcattacaaagggaactcagacctatagtgtactagaaggcgacccgtccgaaaattattctaagtacttgctaagcctaaaggagaaagaggaggatagctcgggtcacacccgggcatatggcgtctgcttcgtggacacatccctcggcaagttcttcataggacagttcagtgacgatcgccattgcagtcgtttccgtactctagttgcccattaccctcccgtgcaggttctgttcgaaaagggaaacctgtctaaagagaccaagacgatactgaagagctccttgtcctgctcccttcaagaaggtctgatcccaggttcacagttttgggacgcctccaaaacccttcggactctgttggaagaggaatacttcagggagaagttatcggatggtataggtgtgatgttgccacaagtgctgaaaggtatgacatcagagagtgacagtattggacttactcccggagaaaaaagcgagctggccctttcagccttaggaggctgcgtcttttacctcaaaaagtgtcttatagaccaggagctcctctccatggccaacttcgaggagtacatccctctcgacagcgacaccgtttcgaccacccggagcggagcaatcttcacaaaggcgtaccagcgcatggtcctcgatgccgtcactctcaacaacctggaaattttccttaatggcaccaacggtagcactgagggcaccctcttagaaagggtggatacttgtcacacccctttcggcaaaagactcctgaagcagtggctgtgtgccccactctgcaaccattatgctatcaatgaccgactggacgctattgaggacttgatggtcgtccccgataagatctccgaagtcgtggaactgttgaagaagcttcctgacctggagcgtctcctgtccaaaatccacaatgtcggatcacctctgaagtcgcagaaccatccagacagtcgtgcaatcatgtacgaggagaccacgtattctaagaagaaaattatcgatttcctttctgccctcgaaggattcaaagtcatgtgcaagatcatcggcatcatggaggaagttgctgacgggttcaagtctaaaattctgaaacaggttatcagcctacagacaaaaaatcccgagggcaggttcccagacttgaccgttgagttaaacaggtgggacaccgccttcgaccacgaaaaggccagaaagacaggactaatcactcccaaggccggattcgacagcgattacgaccaggcacttgcggacattagggaaaacgaacagagccttctagagtatctagagaagcagcggaaccggattggctgtcgcactatcgtctactgggggatcggccgaaaccgatatcagttggaaatccccgaaaacttcacgacacgcaaccttcccgaagagtatgaattaaagtcgactaaaaagggctgcaaaagatattggactaagaccatcgaaaagaaactcgccaacctaattaacgctgaagaacgcagggatgttagcctgaaggattgtatgagacgtctattctataacttcgacaagaattataaagattggcagtcagcagtggaatgcattgccgtgttggacgtcctgttatgcttggctaactactcgcggggtggagacggtccaatgtgtcgacccgtgatcctcctacccgaggatacccctccgtttctcgagttaaaggggtcccgtcacccttgcattaccaagacattcttcggagatgacttcatcccaaatgatattctgatcgggtgtgaggaagaagagcaggagaacggcaaagcctattgtgtactggtgaccggaccaaatatgggaggcaagtccaccttgatgagacaggccggtctgctagcggttatggcacagatgggatgctacgttcccgctgaggtgtgcagactgacaccaatcgaccgagtgttcacgcgcctgggggcatctgatcgaattatgagtggcgaaagcactttctttgtagaacttagtgagactgcaagcatccttatgcacgctactgctcatagcctggtcctcgttgatgagttagggagggggacggctacgttcgacggaacagccatcgcgaatgcagtcgttaaagagttggcggaaaccatcaaatgtcggacactattctccactcattatcacagcctcgtggaggactactctcagaacgtggcagtgaggttgggccatatggcctgcatggtggaaaacgagtgtgaggaccctagtcaggaaaccattacctttttgtacaagtttattaaaggggcatgcccaaagagctacgggtttaatgccgctaggcttgccaatctgcctgaggaggtgatacagaaaggccacaggaaagccagggagtttgaaaagatgaatcaatcgttgcggttgttcagagaagtgtgtctggcctccgaaagatccacagtggatgcagaagctgtgcacaagctcctcaccctcatcaaggagctatag

SEQ ID NO: 99893 - DNA, 3693 bp, Artificial Sequence
  derived and/or modified sequence
atgtcccggcaatccactttgtacagcttcttccctaagtccccggctctgtccgatgcaaataaggccagtgcgagagccagtcgcgaaggcggaagggccgctgccgctccaggtgcctcaccatctccaggtggcgatgcagcctggtctgaggccggaccaggccctaggcccttagctagatcagctagtcctccaaaagccaaaaatcttaacgggggtctgcggcgatcagtcggcacgacatacgtcaccgacaagtctgaggaggacaatgagatcgagtccgaggaggaagtgcaacctaaaactcaggggagccgaaggagcagccgccagattaaaaaaaggagggtcattagcgactctgaaagtgatattggcggtagcgacgtggaattcaagcctgacacgaaggaagagggctctagcgatgaaatctcctccggggtgggagattccgagtccgagggactaaattctccggttaaagtggctcggaagcgtaagaggatggtgaccggcaatgggagcctgaagaggaagagcagccggaaagagactcctagcgcaaccaagcaggctacaagtatctctagtgaaactaaaaacacactgcgagccttcagcgcaccccagaactctgagtctcaggcacacgtaagtggcggtggggatgattccagccgtcccactgtctggtatcacgagaccctggagtggctgaaagaagagaaacggagagatgaacacaggcgaaggccagaccacccggactttgacgcatcgactctgtatgtgccggaggattttttaaatagttgcacccccggaatgcggaagtggtggcagatcaagtcacaaaattttgacctcgtgatctgctataaggtcggaaaattttatgaactttatcatatggatgcgcttattggggtgtccgaattggggttagttttcatgaagggaaactgggctcacagcggtttccctgaaattgcattcggacgatacagcgattctttggttcagaagggctataaggtggccagagttgagcaaacagaaacccccgaaatgatggaggcgagatgccgtaagatggcacatatcagtaaatatgatcgtgtggtgaggagggaaatttgtagaattattaccaaaggcacccagacgtatagcgttttagaaggtgaccccagcgaaaactattccaaatacctgctgtctttgaaagaaaaagaggaggattccagcgggcatactagagcctacggagtgtgtttcgtggacaccagcttggggaagttcttcattggacagttctcagacgatcgacattgctctcgtttcaggacacttgtcgctcactaccccccagtacaggtcctcttcgaaaagggcaatttatctaaggagacaaaaacaatactgaagtcaagtctcagttgtagcttgcaggaaggattgattcctgggtcccaattctgggacgctagcaagactctgagaaccctgctcgaggaagagtattttagggaaaagctatctgacggcatcggggtgatgctcccccaggtactcaaaggtatgacatcagagagtgattccattggtcttacacctggtgagaagagcgaattagcgctttcggctctgggcggttgcgttttctacctcaaaaaatgcctcatagaccaggaactcttgtctatggctaactttgaagagtacatcccactggatagtgataccgtcagcaccactcgttctggagcaatatttaccaaggcctaccagcgaatggtgctcgatgcagtgactctgaataacctggaaatcttcctgaacggcaccaatggaagtactgaagggactctgctggagagggtggacacctgccacactccgttcggcaagcggctgctgaagcagtggctttgcgctccactttgtaatcactatgccattaacgacagacttgacgcaatcgaagacctgatggttgttcccgacaagatcagcgaggttgtagagcttcttaaaaaattacctgacttggagagactgctgagtaaaatacacaacgttggctcccctctgaagagccagaatcaccccgactcgagagctatcatgtacgaggagacgacgtattcaaagaaaaaaataatcgactttttaagcgccctggaagggtttaaggtcatgtgcaaaatcatcgggatcatggaagaagttgccgatggtttcaaatccaagatactcaagcaggtgatcagcctgcaaaccaagaaccccgaaggcagattcccggacctcaccgtggagttaaacaggtgggacacggcgtttgaccacgagaaagctcgaaaaactggtctgatcacacctaaggctggctttgattccgattacgatcaggcgctcgccgatattcgggagaatgagcaatccttgctcgagtacctggaaaagcagcgaaaccgtatcggatgccgcaccattgtatattggggcattggacgtaacaggtaccagcttgagattccggagaacttcacgacacgtaacttgccggaggagtatgagttgaagagtaccaagaaaggctgcaagcggtattggaccaagacgattgaaaagaaactggcgaatttgataaatgctgaagaacgacgcgatgtgagccttaaggattgtatgagaagactgttctacaactttgataagaactacaaggactggcagagtgctgttgaatgcattgcagtgctggatgttttgctctgcttagcgaattactctagaggtggagacgggcctatgtgccgccctgttatcctgttgcccgaggacacaccgccattcttagagctgaaggggagccgccatccatgtattacaaagacgtttttcggcgacgatttcatcccaaatgatattttgatcggatgtgaggaggaagagcaggaaaatggaaaagcatactgtgtcctggttacagggccaaacatgggaggcaaatctaccctaatgagacaagccggattgctggccgtgatggcccagatggggtgttatgtccccgctgaagtctgcagactcactcccatagaccgggtttttaccagacttggggcatcagacagaatcatgagtggcgagagcacctttttcgtggaactgtcagagacagccagcattttgatgcatgccaccgcccattccctggttcttgtggatgaactgggaagggggaccgcgaccttcgacggcaccgcaatagcaaacgcggtagttaaagaactggctgaaaccatcaagtgcagaaccttgttctctacacattatcacagcctcgtagaagattactctcaaaatgtggctgtgagattgggtcacatggcttgtatggtggagaacgagtgcgaggatccaagccaggaaaccataacgttcctgtacaaatttataaaaggcgcttgccccaagtcttatggcttcaacgccgctaggctggcaaatctgcctgaagaagtcatacagaaaggacaccggaaagcgcgagagttcgaaaaaatgaaccagtctcttcgcctgttccgtgaggtctgtctagcttccgagaggagcactgtcgatgctgaagctgttcataagttgctgacccttattaaagaattatag

SEQ ID NO: 99894 - DNA, 975 bp, Artificial Sequence
  derived and/or modified sequence
atgagaagactgttctacaacttcgacaagaactacaaggactggcagagcgccgtggagtgcatcgccgtgctggacgtgctgctgtgcctggccaactacagcagaggcggcgacggccccatgtgcagacccgtgatcctgctgcccgaggacaccccccccttcctggagctgaagggcagcagacacccctgcatcaccaagaccttcttcggcgacgacttcatccccaacgacatcctgatcggctgcgaggaggaggagcaggagaacggcaagatcgtgtgcctgctgctggaccagatctggggcgccagcctgagaatgagacaggccggcctgctggccgtgatggcccagatgggctgctacgtgcccgccgaggtgtgcagactgacccccatcgacagagtgttcaccagactgggcgccagcgacagaatcatgagcggcgagagcaccttcttcgtggagctgagcgagaccgccagcatcctgatgcacgccaccgcccacagcctggtgctggtggacgagctgggcagaggcaccgccaccttcgacggcaccgccatcgccaacgccgtggtgaaggagctggccgagaccatcaagtgcagaaccctgttcagcacccactaccacatcagcagaagactgttcagcaagtgctgctgcctgggccacatggcctgcatggtggagaacgagtgcgaggaccccagccaggagaccatcaccttcctgtacaagttcatcaagggcgcctgccccaagagctacggcttcaacgccgccagactggccaacctgcccgaggaggtgatccagaagggccacagaaaggccagagagttcgagaagatgaaccagagcctgagactgttcagagaggtgtgcctggccagcgagagaagcaccgtggacgccgaggccgtgcacaagctgctgaccctgatcaaggagctgtag

SEQ ID NO: 99895 - DNA, 975 bp, Artificial Sequence
  derived and/or modified sequence
atgcggagattgttttataattttgacaaaaactataaagattggcagtcagcagttgagtgcatcgccgtgctggatgtcctcttgtgtcttgctaactattctcgcggcggcgacggccccatgtgcagacctgtcatcttgttacccgaggataccccgccatttcttgaactcaaaggcagccggcacccttgtataaccaaaacattcttcggcgatgattttatccctaatgatattcttatcgggtgtgaagaggaagaacaagagaatggaaagatcgtgtgtctgcttctggaccagatttggggtgcttcgttacgcatgcgccaagccggtcttctggccgtgatggcacagatgggctgctatgtgcccgcagaagtctgtaggttgacacctatagacagggtgtttactcggctcggtgcgtcagaccggattatgtctggggagtctacatttttcgtggagctttccgagacagcctccattctgatgcacgctacggcccattcgttggtgcttgtggatgaattagggcggggaacggccacctttgacgggactgcgattgccaatgctgttgtaaaggagttagctgaaaccatcaagtgtcgaactcttttctccactcactatcacatctccaggaggcttttcagcaagtgttgctgtttgggacacatggcctgcatggtcgagaatgaatgcgaggatccttcacaggaaacgatcactttcctctacaaattcatcaagggggcgtgccccaaaagttatgggttcaacgcggcaaggctagcgaacttacctgaggaagtaattcagaagggacaccggaaggccagggagttcgaaaagatgaatcaaagtttgcgtctgtttagggaagtctgcctagcaagcgaacgctcgacggtggacgctgaggcagttcacaagcttctgaccctgataaaagagctctag

SEQ ID NO: 99896 - DNA, 975 bp, Artificial Sequence
  derived and/or modified sequence
atgaggaggctcttctacaactttgacaagaactacaaggactggcagagcgctgtggagtgcatcgctgtgctggatgtgctgctgtgcctggccaactacagcagaggaggagatggccccatgtgcaggcctgtgatcctgctgcctgaggacaccccacccttcctggagctgaagggcagccgccacccctgcatcaccaagaccttctttggagatgacttcatccccaatgacatcctgattggctgtgaggaggaggagcaggagaatggcaagatcgtgtgcctgctgctggaccagatctggggcgccagcctgaggatgaggcaggccggcctgctggccgtgatggcccagatgggctgctacgtgcctgctgaggtgtgccgcctgacccccatcgacagagtcttcacccggctgggcgccagtgaccgcatcatgtctggagagagcaccttctttgtggagctgtctgaaacagccagcatcctgatgcacgccacagcccacagcctggtgctggtggatgagctgggccggggcacagccacctttgatggaacagccatcgccaatgctgtggtgaaggagctggccgagaccatcaagtgcaggaccctcttcagcacccactaccacatcagcagaagactcttcagcaagtgctgctgcctgggccacatggcctgcatggtggagaatgaatgtgaggaccccagccaggagaccatcaccttcctgtacaagttcatcaagggggcctgccccaagagctatggcttcaatgctgcccggctggccaacctgcctgaggaggtgatccagaagggccacaggaaggcccgggagtttgagaagatgaaccagagcctgcggctcttccgggaggtgtgcctggccagcgagaggagcacagtggatgctgaggccgtgcacaagctgctgaccctcatcaaggagctgtag

SEQ ID NO: 99897 - DNA, 975 bp, Artificial Sequence
  derived and/or modified sequence
atgcggcggctgttctacaacttcgacaagaactacaaggactggcagagtgctgttgaatgtatcgctgtgctggacgtcctcctgtgtcttgccaattattcaagagggggagatggacctatgtgtagaccagttattctgctacctgaagacactcctccattcctggagttaaagggttctcggcatccttgcatcactaaaactttttttggcgatgactttattccgaacgatattcttataggctgcgaggaggaggagcaggagaacggcaagatagtgtgcctgctgttagatcagatttggggcgcctcgctacgcatgaggcaggcgggcttactcgcagtgatggcccagatggggtgctatgtgccagcagaggtttgcagactcaccccgatagatagagtgtttactaggctgggggcgagcgacagaatcatgtctggggagtcaacatttttcgtggagctttcagaaacagcatccatcttgatgcatgctactgcccacagcctcgttctggttgatgaactgggcagaggcacagcaacatttgatggcacagctatcgccaacgcggtggtgaaagagttggcagaaactatcaaatgtcgtactttgttttccacacactaccacatatcccggcggttgttcagcaagtgttgctgtttagggcatatggcttgcatggtggaaaacgaatgtgaagatccttctcaggagactataacatttctatataaatttatcaagggtgcctgccctaagtcctacgggtttaatgcagctcggctggcaaatcttccagaagaggttatacagaaaggccatcggaaggctcgcgagtttgagaaaatgaatcagtcattgagactgtttagggaagtctgtctcgcctccgaacggagcaccgtcgatgccgaggccgtgcacaagctcctgacccttatcaaggagctgtag

SEQ ID NO: 99898 - DNA, 975 bp, Artificial Sequence
  derived and/or modified sequence
atgcgaagattgttctataacttcgacaagaattataaagattggcagtcagcggtcgagtgcatagccgtgttagatgtcctgctctgtctcgccaattattcaagagggggtgatggcccaatgtgtcgcccagtcattctgctgccagaagacacaccgcctttcctcgaactgaaaggatcccgccatccctgtatcactaaaaccttctttggcgatgacttcatcccaaacgatatcttgatcggctgcgaggaggaggaacaggaaaacggcaagattgtgtgcctcctgctggaccagatctggggcgcaagcctccggatgcggcaggcaggcctgctggccgtgatggcccagatgggctgttatgtcccagctgaggtatgtcggctgacacccatcgatcgggtgttcacacgtcttggagcatcagatcgtatcatgtccggagagtctacgttttttgtagagctgagtgaaacagcctcaatactgatgcacgctactgcacactctctggttctagtagacgagctgggacgagggaccgctacattcgacgggaccgctattgcgaatgccgtggtgaaggaacttgcagaaactattaagtgccgtactctgttttccactcattaccacattagtcggaggttgttttcaaaatgttgctgtttggggcatatggcctgtatggtcgagaacgaatgcgaagacccttctcaagagaccatcaccttcctctataaattcatcaagggggcttgccccaagtcttatgggtttaacgcagccagactggctaatctcccagaagaggtgatccagaaagggcaccgcaaagctagggaatttgagaaaatgaaccaatcgctgcgcctttttcgcgaggtgtgcctggccagcgagcggtctacagtggatgctgaggccgtccacaaactcctgactctgatcaaagaactctag

SEQ ID NO: 99899 - protein, 166 aa, Artificial Sequence
  derived and/or modified sequence
MRRKQTGTRERGRYREEEMTVVEEADDDKKRLLQIIDRDGEEEEEEEEPLDESSVKKMILTFEKRSYKNQELRIKFPDNPEKFMESELDLNDIIQEMHVVATMPDLYHLLVELNAVQSLLGLLGHDNTDVSIAVVDLLQELTDIDTLHESEEGAEVLIDALVDGQV

SEQ ID NO: 99900 - DNA, 1611 bp, Artificial Sequence
  derived and/or modified sequence
atgcggcggaaacaaactggcaccagagagcgtggacgctatagggaggaagaaatgacagttgtcgaggaagcggacgacgataaaaaacgccttctgcaaattatcgacagggatggagaagaggaagaggaggaggaggagccactggacgagtccagcgtgaagaaaatgatacttacgttcgaaaagcgtagctataaaaaccaggagctacgcattaaatttcccgacaacccggagaaatttatggaatccgagttggatttaaatgatataatccaggaaatgcacgtcgtagcgacaatgcctgatctgtaccacttgttagtcgaactcaacgcagtgcagagcctgcttggactgctgggccacgacaacactgacgtttctatcgccgtggtcgatttgctgcaggagctgaccgacatcgatacactccatgagtctgaagaaggtgcagaggtactgattgacgctctggtggacgggcaggtcgtggcactgctggtgcagaacttggagaggcttgatgagagtgtgaaggaggaggcggatggcgtccataatacactcgccatcgtcgagaacatggccgaattccggcctgagatgtgtacggagggcgcccagcagggattactgcagtggttgctgaagcggctcaaagcaaagatgccttttgacgccaataagctgtattgttccgaggtgctcgctatcctgctgcaggacaacgatgagaacagggaattgcttggagagctggacggcatagacgtgctgctgcagcagctcagcgtcttcaagcgtcataatccttccactgcagaagagcaggaaatgatggagaatctgtttgacagtctctgctcttgcctcatgctgtcctctaatagagagcggtttctgaagggcgaaggccttcagcttatgaaccttatgcttagagaaaagaaaattagtcgatcatccgcactgaaggtgctagatcacgctatgatcggcccagaagggacagacaattgtcacaaattcgtcgatatcttagggctccgcaccatcttcccccttttcatgaagtccccgcggaagattaagaaggttggaacaaccgagaaagaacacgaggaacacgtttgttcgattcttgcttcactccttcgcaacctgcgcggccagcagcgcaccagactgttaaacaagtttaccgagaatgattctgaaaaggtggaccggctgatggaactacacttcaagtacctgggcgctatgcaagtagcagataaaaagatagagggggaaaagcacgatatggtgcgacggggcgaaatcatagacaacgacactgaggaggaattctatcttcgccggttggatgccgggctgtttgtcctgcaacacatttgttatattatggctgagatctgcaacgctaatgtgccccaaatcaggcaacgggtccatcaaattctgaacatgcggggcagttccatcaagatcgttagacacataatcaaggaatacgccgaaaacataggggacggaaggagccctgagtttcgggagaatgagcagaagcggattctagggctgctcgaaaatttttag

SEQ ID NO: 99901 - DNA, 501 bp, Artificial Sequence
  derived and/or modified sequence
atgcgccgtaagcaaaccgggacacgcgaacggggtagataccgcgaagaggaaatgactgtggtcgaagaggccgacgatgacaaaaagaggctcctgcagattatcgatcgcgacggggaagaggaggaagaagaagaggagcccctggacgagtcctccgtgaaaaagatgatcctgacattcgagaaaaggtcgtacaagaaccaggaactgaggattaagtttcccgacaaccctgagaagttcatggagtccgaactcgacctcaacgacattatccaggagatgcacgtcgtggctacgatgcccgacttgtatcacctgctggtggaacttaatgctgtgcaatctctcctgggactgctgggccatgataacacagatgtgtccatcgccgtggtggatctcctgcaagagctgactgacatagacactttgcacgagtctgaagaaggcgccgaggtgttaatcgatgccttagtggacggacaagtatag

SEQ ID NO: 99902 - DNA, 1611 bp, Artificial Sequence
  derived and/or modified sequence
atgaggaggaagcagacaggcacccgggagcggggccgctaccgggaggaggagatgacagtggtggaggaggctgatgatgacaagaagaggctgctgcagatcatcgacagagatggagaggaggaggaggaggaggaggagcccctggatgagagctctgtgaagaagatgatcctgacctttgagaagaggagctacaagaaccaggagctgcgcatcaagttcccagacaaccctgagaagttcatggagagcgagctggacctgaatgacatcatccaggagatgcacgtggtggccaccatgccagacctgtaccacctgctggtggagctgaatgctgtgcagagcctgctgggcctgctgggccatgacaacacagatgtgtccattgctgtggtggacctgctgcaggagctgacagacatcgacaccctgcacgagagcgaggagggcgctgaggtgctgattgatgccctggtggatggccaggtggtggccctgctggtgcagaacctggagcggctggatgagagcgtgaaggaggaggctgatggagtgcacaacaccctggccatcgtggagaacatggccgagttccggcctgagatgtgcacagaaggagcccagcagggcctgctgcagtggctgctgaagaggctgaaggccaagatgccctttgatgccaacaagctgtactgcagcgaggtgctggccatcctgctgcaggacaatgatgagaaccgggagctgctgggggagctggatggcattgatgtgctgctgcagcagctgtctgtgttcaagaggcacaaccccagcacagctgaggagcaggagatgatggagaacctgtttgacagcctgtgcagctgcctgatgctgagcagcaaccgggagcgcttcctgaagggggagggcctgcagctgatgaacctgatgctgcgggagaagaagatcagccgcagcagcgccctgaaggtgctggaccacgccatgattggccctgagggcacagacaactgccacaagtttgtggacatcctgggcctgcggaccatcttccccctcttcatgaagagccccaggaagatcaagaaggtgggcaccacagagaaggagcacgaggagcacgtgtgcagcatcctggccagcctgctgaggaacctgcggggccagcagaggacccggctgctgaacaagttcacagaaaatgacagcgagaaggtggaccggctgatggagctgcacttcaagtacctgggcgccatgcaggtggccgacaagaagattgaaggagagaagcatgacatggtgagaagaggagagatcatcgacaatgacacagaggaggagttctacctgcggcggctggatgctggcctgtttgtgctgcagcacatctgctacatcatggccgagatctgcaatgccaacgtgccccagatccggcagagggtgcaccagatcctgaacatgaggggcagcagcatcaagatcgtgcgccacatcatcaaggagtatgcagaaaatattggagatggccgcagccctgagttcagagaaaatgagcagaagaggatcctgggcctgctggagaacttctag

SEQ ID NO: 99903 - DNA, 501 bp, Artificial Sequence
  derived and/or modified sequence
atgaggaggaagcagacaggcacccgggagcggggccgctaccgggaggaggagatgacagtggtggaggaggctgatgatgacaagaagaggctgctgcagatcatcgacagagatggagaggaggaggaggaggaggaggagcccctggatgagagctctgtgaagaagatgatcctgacctttgagaagaggagctacaagaaccaggagctgcgcatcaagttcccagacaaccctgagaagttcatggagagcgagctggacctgaatgacatcatccaggagatgcacgtggtggccaccatgccagacctgtaccacctgctggtggagctgaatgctgtgcagagcctgctgggcctgctgggccatgacaacacagatgtgtccattgctgtggtggacctgctgcaggagctgacagacatcgacaccctgcacgagagcgaggagggcgctgaggtgctgattgatgccctggtggatggccaggtgtag

SEQ ID NO: 99904 - DNA, 1611 bp, Artificial Sequence
  derived and/or modified sequence
atgcggcggaagcagaccggcacccgggagcggggccggtaccgggaggaagagatgaccgtggtggaggaagccgacgacgacaaaaagaggcttttgcaaattatcgacagagacggagaagaggaagaagaagaggaagagcccctggacgagagcagtgttaaaaaaatgatcttgaccttcgaaaagcggagctacaaaaatcaggaactgagaatcaagttccccgataacccagaaaagttcatggagtcagaactggatttgaatgatatcatccaagagatgcacgtggttgccacaatgcccgacttgtatcatctattggtggaattaaatgctgtccaaagtctgttgggcttactgggacacgacaacactgatgttagcattgcggttgtcgacctgctgcaggagttaacagatatcgacacactccatgagtccgaagagggggcggaggtgttgattgatgcgctggtggacggacaggtggtggctctgctcgttcagaacctggagcggcttgatgaatcagtgaaggaagaagctgacggggtgcataatacccttgcaatcgtggagaatatggcagagtttcgacccgagatgtgtaccgagggcgctcagcagggcctgctgcagtggctgctgaaaaggttgaaagcaaagatgccgttcgatgcaaataagctctattgctctgaggtcctggccattttgctgcaggataacgatgagaatcgtgaacttttaggtgagctggatggtattgacgtgttgcttcagcagttgtctgtttttaaaaggcataaccccagtactgctgaagagcaagaaatgatggaaaatctgttcgactccttgtgttcttgcctgatgctatctagcaacagggagcgctttctgaaaggagaggggctgcaactgatgaaccttatgttgcgggagaaaaagatttctcggtcatccgcactaaaggtcctcgaccacgcgatgatcgggcctgagggtaccgacaattgccacaagtttgtggacatcctaggactgaggacgatcttcccactcttcatgaaaagtccaaggaaaatcaagaaggtgggcactacagagaaggagcacgaagagcacgtctgttcaattttggctagcttactgagaaatctaagaggacagcaacggacacgtctgctgaacaagtttactgaaaacgattcagagaaagttgacaggctcatggaacttcactttaagtatctcggcgccatgcaggtcgcggataagaaaatcgagggtgaaaagcacgatatggtgaggaggggagaaattattgacaacgacacagaagaagagttctatctgagaagactggacgctgggttgtttgtgctacagcacatctgctacattatggccgaaatctgcaatgcgaatgtgccacaaatacggcaaagagtccatcagatcctgaacatgcgaggatcatctatcaaaatcgtgaggcacatcataaaggaatacgctgagaatattggtgacggacggtctcccgagttccgggaaaatgagcagaagcgcatccttgggctgctggaaaacttctag

SEQ ID NO: 99905 - DNA, 501 bp, Artificial Sequence
  derived and/or modified sequence
atgcggcggaagcagaccggcacccgggagcggggccggtaccgggaggaagaaatgaccgtggttgaggaagctgatgatgacaagaaaaggttgcttcaaatcatcgaccgagatggggaggaagaggaagaggaggaagagccgctggacgaaagcagcgttaaaaaaatgatcctgacatttgagaaacgctcctataagaatcaggaactccggatcaagttcccagacaaccccgaaaaattcatggaatccgagctggatctgaacgatataattcaggaaatgcatgtggtcgccaccatgcctgatctctatcaccttctggtagagctgaatgccgtccaaagcctacttggtctgctgggccatgacaatactgacgtgagcattgccgtggtagacctgctgcaggaactcacagacattgatacactgcacgagtctgaagaaggagctgaagtgctgattgacgcactcgtggatgggcaggtgtag

SEQ ID NO: 99906 - DNA, 1611 bp, Artificial Sequence
  derived and/or modified sequence
atgaggcgcaagcagacaggtactagggaacgcggtcgctatcgggaagaagaaatgacagtggtggaagaagcggacgacgataaaaagaggctcttacagatcatagacagagacggcgaggaagaagaggaagaggaagagccgttggatgaatcctctgtgaagaaaatgatactgacatttgagaagcgctcctacaaaaaccaggagcttaggatcaagttccctgataacccggagaagtttatggagagcgaactggatttaaacgatatcattcaagagatgcatgttgtagcaaccatgcctgatctgtatcatttgttagtcgagctcaacgcagtgcagagcttgttaggactgctgggccatgataacacagatgtgtccatcgctgttgtggatctcctgcaggaacttacagatatcgacacactgcacgagagtgaagaaggcgctgaagtgttgatcgatgctcttgttgatggacaggtggtcgccttactcgtccagaatctggaaaggctggatgaaagtgtgaaggaggaagccgacggagtgcacaacacacttgccatagttgagaacatggccgaattcaggccagagatgtgcactgagggtgcacagcaggggttgttgcaatggctactcaagaggcttaaagcaaagatgccttttgacgcgaataaattatattgttccgaagtgctcgctattctgctgcaggataatgatgagaatagagaacttttgggcgagctcgacggaatcgatgtgcttctgcagcagctaagtgtatttaagaggcacaacccttctaccgccgaggaacaggagatgatggagaacctgttcgattccttatgtagctgtctcatgctgtcctcaaatcgggagagattcctcaagggggaggggcttcaattaatgaatctgatgcttcgcgagaaaaaaatttcacgatcaagcgcactgaaagtactcgatcacgccatgatcggcccagagggaactgacaactgccacaaatttgtggacatcctcggccttcgtactatatttccgttgttcatgaagtctcctcggaagatcaagaaggtaggcactaccgagaaggagcacgaggagcatgtgtgcagcattcttgcttcgctccttcgcaatctccgcggacagcagcgaacaaggctgctgaacaagttcaccgagaatgactccgaaaaagtcgatcgcttgatggaactccacttcaaatatctaggagcaatgcaagtggcagataagaagattgagggcgagaaacacgatatggtgcgtcggggtgaaatcatcgataatgatactgaagaggagttctatttaaggagactggacgcaggcctttttgtgctccaacacatctgttacatcatggccgaaatatgcaatgccaatgttccgcagatccgtcagagagttcaccagatcttaaacatgcggggatcatcgataaagatcgttcgtcacattataaaagagtacgcggagaacataggtgacgggagatctcctgagtttcgggagaacgagcaaaaacgaatcctgggactgttggaaaatttctag

SEQ ID NO: 99907 - DNA, 501 bp, Artificial Sequence
  derived and/or modified sequence
atgcgtagaaaacagacgggcaccagggagagaggcaggtatcgtgaggaagagatgacagtggtcgaggaagcagacgatgataaaaaacgattacttcagattattgaccgcgatggagaggaagaggaggaggaggaagaacctctggacgagtcaagcgtgaagaaaatgatccttacctttgaaaaacgcagctacaagaaccaggagcttagaataaaatttcctgataatccagagaagtttatggagagcgaattggacctaaatgatattatccaggagatgcacgtggtcgctacgatgcccgacctgtatcatctgcttgttgaactcaatgcagtccagtctctgttaggtcttctgggccacgataacaccgacgtgtcaatagccgtggtagacctgctccaggagctcactgacattgataccttgcacgaaagcgaggagggcgcagaggtgctgattgatgccctcgttgatggccaggtgtag

SEQ ID NO: 99908 - DNA, 1611 bp, Artificial Sequence
  derived and/or modified sequence
atgagaagaaagcagaccggcaccagagagagaggcagatacagagaggaggagatgaccgtggtggaggaggccgacgacgacaagaagagactgctgcagatcatcgacagagacggcgaggaggaggaggaggaggaggagcccctggacgagagcagcgtgaagaagatgatcctgaccttcgagaagagaagctacaagaaccaggagctgagaatcaagttccccgacaaccccgagaagttcatggagagcgagctggacctgaacgacatcatccaggagatgcacgtggtggccaccatgcccgacctgtaccacctgctggtggagctgaacgccgtgcagagcctgctgggcctgctgggccacgacaacaccgacgtgagcatcgccgtggtggacctgctgcaggagctgaccgacatcgacaccctgcacgagagcgaggagggcgccgaggtgctgatcgacgccctggtggacggccaggtggtggccctgctggtgcagaacctggagagactggacgagagcgtgaaggaggaggccgacggcgtgcacaacaccctggccatcgtggagaacatggccgagttcagacccgagatgtgcaccgagggcgcccagcagggcctgctgcagtggctgctgaagagactgaaggccaagatgcccttcgacgccaacaagctgtactgcagcgaggtgctggccatcctgctgcaggacaacgacgagaacagagagctgctgggcgagctggacggcatcgacgtgctgctgcagcagctgagcgtgttcaagagacacaaccccagcaccgccgaggagcaggagatgatggagaacctgttcgacagcctgtgcagctgcctgatgctgagcagcaacagagagagattcctgaagggcgagggcctgcagctgatgaacctgatgctgagagagaagaagatcagcagaagcagcgccctgaaggtgctggaccacgccatgatcggccccgagggcaccgacaactgccacaagttcgtggacatcctgggcctgagaaccatcttccccctgttcatgaagagccccagaaagatcaagaaggtgggcaccaccgagaaggagcacgaggagcacgtgtgcagcatcctggccagcctgctgagaaacctgagaggccagcagagaaccagactgctgaacaagttcaccgagaacgacagcgagaaggtggacagactgatggagctgcacttcaagtacctgggcgccatgcaggtggccgacaagaagatcgagggcgagaagcacgacatggtgagaagaggcgagatcatcgacaacgacaccgaggaggagttctacctgagaagactggacgccggcctgttcgtgctgcagcacatctgctacatcatggccgagatctgcaacgccaacgtgccccagatcagacagagagtgcaccagatcctgaacatgagaggcagcagcatcaagatcgtgagacacatcatcaaggagtacgccgagaacatcggcgacggcagaagccccgagttcagagagaacgagcagaagagaatcctgggcctgctggagaacttctag

SEQ ID NO: 99909 - DNA, 501 bp, Artificial Sequence
  derived and/or modified sequence
atgagaagaaagcagaccggcaccagagagagaggcagatacagagaggaggagatgaccgtggtggaggaggccgacgacgacaagaagagactgctgcagatcatcgacagagacggcgaggaggaggaggaggaggaggagcccctggacgagagcagcgtgaagaagatgatcctgaccttcgagaagagaagctacaagaaccaggagctgagaatcaagttccccgacaaccccgagaagttcatggagagcgagctggacctgaacgacatcatccaggagatgcacgtggtggccaccatgcccgacctgtaccacctgctggtggagctgaacgccgtgcagagcctgctgggcctgctgggccacgacaacaccgacgtgagcatcgccgtggtggacctgctgcaggagctgaccgacatcgacaccctgcacgagagcgaggagggcgccgaggtgctgatcgacgccctggtggacggccaggtgtag

SEQ ID NO: 99910 - protein, 155 aa, Artificial Sequence
  derived and/or modified sequence
MAAKVFESIGKFGLALAVAGGVVNSALYNVDAGHRAVIFDRFRGVQDIVVGEGTHFLIPWVQKPIIFDCRSRPRNVPVITGSKDLQNVNITLRILFRPVASQLPRIFTSIGEDYDERVLPSITTEILKSVVARFDAGELITYLPAGQSVLLQLPQ

SEQ ID NO: 99911 - DNA, 375 bp, Artificial Sequence
  derived and/or modified sequence
atggcagctaaagtgtttgaatctatcgggaagtttggtctggctctggccgtagccggtggggtagtgaactccgcactctataatgttgatgctggtcacagagccgttatttttgaccgctttagaggggtgcaggatatcgttgtgggcgaaggcactcattttctcatcccttgggtccaaaaaccaatcatttttgactgtaggtctcgacccagaaacgttcccgtaatcactgggtctaaggatctgcaaaacgtgaatattaccttacgcatcttgtttaggccagtcgcctcccagctgccacgaatctttacgagtatcggtgaggactacgatgagcgagtcttacccagcattaccacttag

SEQ ID NO: 99912 - DNA, 468 bp, Artificial Sequence
  derived and/or modified sequence
atggctgctaaggtgttcgaatccattggaaaattcggtttagccctggcagtggccggaggcgttgtcaactcggcactctataatgtcgatgcaggacatcgagcagttatttttgaccggttccgcggcgtgcaggatatagtcgtcggcgagggcacacacttcctcatcccatgggtgcagaagcctattattttcgattgccgctcccgaccgaggaacgtgccagtcatcaccggcagcaaggacttgcagaatgtcaacattaccttgaggatactcttccgaccggtcgcatcccagctgccaagaatcttcacaagcatcggggaggactacgacgagcgggtccttcctagcatcactacagagattttgaagtcagtagtcgctcggttcgatgccggcgagctgattacctacctacccgctgggcagtctgttctcctgcagctgcctcagtag

SEQ ID NO: 99913 - DNA, 375 bp, Artificial Sequence
  derived and/or modified sequence
atggccgccaaggtgtttgagagcatcggcaagtttggcctggccctggccgtggccggcggcgtggtgaacagcgccctgtacaacgtggatgctggccaccgggccgtcatctttgaccgcttccggggcgtgcaggacatcgtggtgggggagggcacccacttcctgatcccctgggtgcagaagcccatcatctttgactgccgcagccggcccagaaatgtgcctgtgatcaccggcagcaaggacctgcagaatgtgaacatcaccctgcgcatcctcttccggcctgtggccagccagctgccccgcatcttcaccagcatcggggaggactatgatgagcgggtgctgcccagcatcaccacctag

SEQ ID NO: 99914 - DNA, 468 bp, Artificial Sequence
  derived and/or modified sequence
atggccgccaaggtgtttgagagcatcggcaagtttggcctggccctggccgtggccggcggcgtggtgaacagcgccctgtacaacgtggatgctggccaccgggccgtcatctttgaccgcttccggggcgtgcaggacatcgtggtgggggagggcacccacttcctgatcccctgggtgcagaagcccatcatctttgactgccgcagccggcccagaaatgtgcctgtgatcaccggcagcaaggacctgcagaatgtgaacatcaccctgcgcatcctcttccggcctgtggccagccagctgccccgcatcttcaccagcatcggggaggactatgatgagcgggtgctgcccagcatcaccacagagatcctgaagtctgtggtggccaggtttgatgctggggagctgatcacctacctgcctgctggccagagcgtgctgctgcagctgccccagtag

SEQ ID NO: 99915 - DNA, 375 bp, Artificial Sequence
  derived and/or modified sequence
atggccgccaaggtgttcgagagcatcggcaagttcggcctggccctggccgtggccggaggggtcgtgaactccgccctttataacgtggacgcggggcatcgggcagtgattttcgaccgtttccgaggtgtccaggacatagttgtgggcgagggaacacatttcctgatcccgtgggtgcagaaacccatcatcttcgattgcagatcacggcccagaaacgtaccagtcattactggtagtaaggacctgcaaaatgttaatataaccctgaggattctttttcggccagtagcatcacagctcccccgaatcttcactagtatcggggaggactacgatgaaagagtgctaccatctattaccacttag

SEQ ID NO: 99916 - DNA, 468 bp, Artificial Sequence
  derived and/or modified sequence
atggccgccaaggtgttcgagagcatcggcaagttcggcctggccctcgccgtcgccggcggggtggtcaacagcgctttgtataatgtggatgccgggcaccgtgctgtgatcttcgacagatttcggggggtacaggatatagtagtgggggaagggacccattttttaataccatgggttcagaagcccatcatcttcgattgtagaagtagaccccgcaatgtaccagtaattacaggttctaaggatctgcagaatgtgaacatcacgttacgcattctctttagacccgttgcaagccagttgcctagaatttttacttctatcggggaggattacgatgagcgagtgctcccatcaattacaaccgagattctaaagagtgtggtggctcgtttcgatgcaggcgagctgatcacctacttacccgctggacagtcagtgctacttcaactgcctcagtag

SEQ ID NO: 99917 - DNA, 375 bp, Artificial Sequence
  derived and/or modified sequence
atggctgccaaagtcttcgagagcataggaaagtttggcctagctctggccgtcgcgggtggggtggtcaactccgctttatataacgtcgatgcaggccatcgggctgtgatttttgaccgcttcagaggtgtgcaggacatcgtggtgggcgagggcactcatttcctcatcccctgggttcagaaacctatcatcttcgactgtcgttctaggccgcgtaatgtgcccgtgataacaggtagcaaagatctgcagaatgtgaacattacactgaggattttattccgcccagtcgcctctcagctgcctaggatattcacctctatcggtgaagactacgatgaaagggtgctcccaagtataactacctag

SEQ ID NO: 99918 - DNA, 468 bp, Artificial Sequence
  derived and/or modified sequence
atggcagcgaaggtattcgaatcaataggcaagtttggtctggcattggcggtcgctggcggtgtggtaaacagtgccctgtataacgttgatgctggacaccgggcagtgatattcgatcgttttcggggtgtgcaggacatcgtagtaggtgagggcacccacttcctgatcccttgggttcaaaaacctataatcttcgactgtcgaagtaggccacgtaacgtccccgtgatcactggatcgaaagacctccagaacgtgaatatcaccctccgaatattatttcggccagtggcttctcagcttcctcgcatctttacaagcattggggaggactatgatgagagggtcctcccctctataactaccgagatattgaagtctgtggtcgcgagatttgacgcaggtgaactcattacatacctgccagctggtcagtctgtgttgctccagcttccccaatag

SEQ ID NO: 99919 - DNA, 534 bp, Artificial Sequence
  derived and/or modified sequence
tgtgtggttggggaattcatgtggaggtcagagtggaagcaggtgagaatggagggggcggcaaaggctcgtttctgggcatctctgcagtcctcctctgctccatgatgtgcactttgggcgaggagagtgcgtgtgagagggtccagcagaaggaaacatggctgccaaagtgtttgagtccattggcaagtttggcctggccttagctgttgcaggaggcgtggtgaactctgccttatataatgtggatgctgggcacagagctgtcatctttgaccgattccgtggagtgcaggacattgtggtaggggaagggactcattttctcatcccgtgggtacagaaaccaattatctttgactgccgttctcgaccacgtaatgtgccagtcatcactggtagcaaagatttacagaatgtcaacatcacactgcgcatcctcttccggcctgtcgccagccagcttcctcgcatcttcaccagcatcggagaggactatgatgagcgtgtgctgccgtccatcacaactga

SEQ ID NO: 99920 - DNA, 890 bp, Artificial Sequence
  derived and/or modified sequence
agtatgtgtggttggggaattcatgtggaggtcagagtggaagcaggtgtgagagggtccagcagaaggaaacatggctgccaaagtgtttgagtccattggcaagtttggcctggccttagctgttgcaggaggcgtggtgaactctgccttatataatgtggatgctgggcacagagctgtcatctttgaccgattccgtggagtgcaggacattgtggtaggggaagggactcattttctcatcccgtgggtacagaaaccaattatctttgactgccgttctcgaccacgtaatgtgccagtcatcactggtagcaaagatttacagaatgtcaacatcacactgcgcatcctcttccggcctgtcgccagccagcttcctcgcatcttcaccagcatcggagaggactatgatgagcgtgtgctgccgtccatcacaactgagatcctcaagtcagtggtggctcgctttgatgctggagaactaatcacctacctgccagcggggcagtccgtgctcctccagctgccccagtgagggcccaccctgcctgcacctccgcgggctgactgggccacagccccgatgattcttaacacagccttccttctgctcccaccccagaaatcactgtgaaatttcatgattggcttaaagtgaaggaaataaaggtaaaatcacttcagatctctaattagtctatcaaatgaaactctttcattcttctcacatccatctacttttttatccacctccctaccaaaaattgccaagtgcctatgcaaaccagctttaggtcccaattcggggcctgctggagttccggcctgggcaccagcatttggcagcacgcaggcggggcagtatgtgatggactggggagcac

SEQ ID NO: 99921 - DNA, 375 bp, Artificial Sequence
  derived and/or modified sequence
atggccgccaaggtgttcgagagcatcggcaagttcggcctggccctggccgtggccggcggcgtggtgaacagcgccctgtacaacgtggacgccggccacagagccgtgatcttcgacagattcagaggcgtgcaggacatcgtggtgggcgagggcacccacttcctgatcccctgggtgcagaagcccatcatcttcgactgcagaagcagacccagaaacgtgcccgtgatcaccggcagcaaggacctgcagaacgtgaacatcaccctgagaatcctgttcagacccgtggccagccagctgcccagaatcttcaccagcatcggcgaggactacgacgagagagtgctgcccagcatcaccacctag

SEQ ID NO: 99922 - DNA, 468 bp, Artificial Sequence
  derived and/or modified sequence
atggccgccaaggtgttcgagagcatcggcaagttcggcctggccctggccgtggccggcggcgtggtgaacagcgccctgtacaacgtggacgccggccacagagccgtgatcttcgacagattcagaggcgtgcaggacatcgtggtgggcgagggcacccacttcctgatcccctgggtgcagaagcccatcatcttcgactgcagaagcagacccagaaacgtgcccgtgatcaccggcagcaaggacctgcagaacgtgaacatcaccctgagaatcctgttcagacccgtggccagccagctgcccagaatcttcaccagcatcggcgaggactacgacgagagagtgctgcccagcatcaccaccgagatcctgaagagcgtggtggccagattcgacgccggcgagctgatcacctacctgcccgccggccagagcgtgctgctgcagctgccccagtag

SEQ ID NO: 99923 - protein, 422 aa, Artificial Sequence
  derived and/or modified sequence
MHGREAGPFVCVCVLLASIPTPQTPLLQASLPPFHPASAGHPITGQQDAFRAFHPDLEFVGKFLKPLLIGELAPEEPSQDHGKNSKITEDFRALRKTAEDMNLFKTNHVFFLLLLAHIIALESIAWFTVFYFGNGWIPTLITAFVLATSQAQAGWLQHDYGHLSVYRKPKWNHLVHKFVIGHLKGASANWWNHRHFQHHAKPNIFHKDPDVNMLHVFVLGEWQPIEYGKKKLKYLPYNHQHEYFFLIGPPLLIPMYFQYQIIMTMIVHKNWVDLAWAVSYYIRFFITYIPFYGILGALLFLNFIRFLESHWFVWVTQMNHIVMEIDQEAYRDWFSSQLTATCNVEQSFFNDWFSGHLNFQIEHHLFPTMPRHNLHKIAPLVKSLCAKHGIEYQEKPLLRALLDIIRSLKKSGKLWLDAYLHK

SEQ ID NO: 99924 - DNA, 2964 bp, Artificial Sequence
  derived and/or modified sequence
agagacctgaggctcggggctgcagatggaatgcacggcagggaggcgggaccctttgtttgtgtgtgcgtgttgttggcctccatccccactccccagactccacttctccaggcctctctcccgccttttcatcccgcatccgcaggacacccaatcaccgggcaacaggatgccttccgcgccttccaccctgacctggaattcgtgggcaagttcttgaaacccctgctgattggtgaactggccccggaggagcccagccaggaccacggcaagaactcaaagatcactgaggacttccgggccctgaggaagacggctgaggacatgaacctgttcaagaccaaccacgtgttcttcctcctcctcctggcccacatcatcgccctggagagcattgcatggttcactgtcttttactttggcaatggctggattcctaccctcatcacggcctttgtccttgctacctctcaggcccaagctggatggctgcaacatgattatggccacctgtctgtctacagaaaacccaagtggaaccaccttgtccacaaattcgtcattggccacttaaagggtgcctctgccaactggtggaatcatcgccacttccagcaccacgccaagcctaacatcttccacaaggatcccgatgtgaacatgctgcacgtgtttgttctgggcgaatggcagcccatcgagtacggcaagaagaagctgaaatacctgccctacaatcaccagcacgaatacttcttcctgattgggccgccgctgctcatccccatgtatttccagtaccagatcatcatgaccatgatcgtccataagaactgggtggacctggcctgggccgtcagctactacatccggttcttcatcacctacatccctttctacggcatcctgggagccctccttttcctcaacttcatcaggttcctggagagccactggtttgtgtgggtcacacagatgaatcacatcgtcatggagattgaccaggaggcctaccgtgactggttcagtagccagctgacagccacctgcaacgtggagcagtccttcttcaacgactggttcagtggacaccttaacttccagattgagcaccacctcttccccaccatgccccggcacaacttacacaagatcgccccgctggtgaagtctctatgtgccaagcatggcattgaataccaggagaagccgctactgagggccctgctggacatcatcaggtccctgaagaagtctgggaagctgtggctggacgcctaccttcacaaatgaagccacagcccccgggacaccgtggggaaggggtgcaggtggggtgatggccagaggaatgatgggcttttgttctgaggggtgtccgagaggctggtgtatgcactgctcacggaccccatgttggatctttctccctttctcctctcctttttctcttcacatctcccccatagcaccctgccctcatgggacctgccctccctcagccgtcagccatcagccatggccctcccagtgcctcctagccccttcttccaaggagcagagaggtggccaccgggggtggctctgtcctacctccactctctgcccctaaagatgggaggagaccagcggtccatgggtctggcctgtgagtctccccttgcagcctggtcactaggcatcacccccgctttggttcttcagatgctcttggggttcataggggcaggtcctagtcgggcagggcccctgaccctcccggcctggcttcactctccctgacggctgccattggtccaccctttcatagagaggcctgctttgttacaaagctcgggtctccctcctgcagctcggttaagtacccgaggcctctcttaagatgtccagggccccaggcccgcgggcacagccagcccaaaccttgggccctggaagagtcctccaccccatcactagagtgctctgaccctgggctttcacgggccccattccaccgcctccccaacttgagcctgtgaccttgggaccaaagggggagtccctcgtctcttgtgactcagcagaggcagtggccacgttcagggaggggccggctggcctggaggctcagcccaccctccagcttttcctcagggtgtcctgaggtccaagattctggagcaatctgacccttctccaaaggctctgttatcagctgggcagtgccagccaatccctggccatttggccccaggggacgtgggccctgcaggctgcaggagggcactggagctgggaggtctcgtcccagccctccccatctcggggctgctgtgtggacggcgctgcctcaggcactctcctgtctgaacctgcccttactgtgtttaacctgttgctccaggatgcattctgataggagggggcggcagggctgggccttgtgacaatctgcctttcaccacatggccttgcctcggtggccctgactgtcagggagggccagggaggcagagcgggagggagtctcaggaggaggctgccctgaggggctggggagggggtacctcatgaggaccagggtggagctgagaagaggaggaggtgggggctggaggtgctggtagctgaggggacgggcaagtgagaggggagggagggaagtcctgggaggatcctgagctgctgttgcagtctaacccactaatcagttcttagattcaggggaagggcaggcaccaacaactcagaatgggggctttcggggagggcgcctagtccccccagctctaagcagccaggagggacctgcatctaagcatctgggttgccatggcaatggcatgccccccagctactgtatgcccccgacccccgcagaggcagaatgaacccatagggagctgatcgtaatgtttatcatgttacttccccacccctacattttttgaaataaaataaggaattttattctca

SEQ ID NO: 99925 - DNA, 1269 bp, Artificial Sequence
  derived and/or modified sequence
atgcatggaagggaggcgggcccattcgtgtgcgtgtgcgtccttcttgcctctatccccacaccccaaacccccctactacaggcctcgctcccaccatttcaccctgcaagcgccggccacccgattacgggtcagcaggacgccttcagagcctttcatcccgatctcgagttcgtcggaaaatttctcaagcccctgctcattggagagctggcccccgaagagccttctcaagatcatggtaaaaattccaaaattacggaagacttccgggctctgagaaagaccgccgaagatatgaatttgttcaagactaaccatgttttctttctgctgctgctcgcccacatcatagctctcgaatctatagcatggtttacagttttctatttcggcaacggctggatccctactctgattacggctttcgtccttgctaccagtcaggcgcaggccggctggttgcagcatgactacggtcatttatcagtatacaggaaacctaagtggaatcacttggtccacaagttcgtgatcggccacctcaagggtgcgagtgccaactggtggaaccacagacattttcagcaccacgcgaagccaaacatctttcacaaggatcccgatgtcaatatgctgcatgtctttgttttgggcgagtggcagcccatcgaatatggaaagaaaaagctgaagtatcttccctacaatcaccagcacgagtattttttcctcatcggacctcccctcctgatacccatgtatttccagtatcagatcatcatgacaatgatcgtgcacaagaattgggtagacctagcatgggccgtcagttactatataaggttctttataacatatatacccttctacggtatactgggcgccctgctgtttctgaacttcatacgatttcttgaatcccactggttcgtttgggtcacacagatgaatcacatcgttatggaaatcgaccaggaggcatatagggactggtttagctctcagctgacagccacatgcaatgtcgagcaaagcttttttaacgactggttttctggacacctcaactttcaaatagaacaccatctcttcccaactatgcctcgccacaatctgcacaagatagcccctcttgtgaagagcttgtgtgctaaacacgggatagagtaccaggagaagcccctgttgagagctcttctcgacatcataaggagtttaaagaagtcaggaaagctttggctggacgcatatcttcataaatag

SEQ ID NO: 99926 - DNA, 1269 bp, Artificial Sequence
  derived and/or modified sequence
atgcacggccgggaggccggcccctttgtgtgtgtgtgtgtgctgctggccagcatccccaccccccagacccccctgctgcaggccagcctgccccccttccacccagccagcgctggccaccccatcaccggccagcaggatgccttccgggccttccacccagacctggagtttgtgggcaagttcctgaagcccctgctgattggagagctggcccctgaggagcccagccaggaccacggcaagaacagcaagatcacagaggacttccgggccctgaggaagacagctgaggacatgaacctcttcaagaccaaccacgtgttcttcctgctgctgctggcccacatcatcgccctggagagcatcgcctggttcaccgtcttctactttggaaatggctggatccccaccctcatcacagcctttgtgctggccaccagccaggcccaggccggctggctgcagcacgactatggccacctgtctgtgtacaggaagcccaagtggaaccacctggtgcacaagtttgtgattggccacctgaagggggccagcgccaactggtggaaccaccgccacttccagcaccacgccaagcccaacatcttccacaaggaccctgatgtgaacatgctgcacgtgtttgtgctgggggagtggcagcccattgaatatggcaagaagaagctgaagtacctgccctacaaccaccagcacgagtacttcttcctgattggcccccccctgctgatccccatgtacttccagtaccagatcatcatgaccatgattgtgcacaagaactgggtggacctggcctgggccgtgtcctactacatccgcttcttcatcacctacatccccttctacggcatcctgggcgccctgctcttcctgaacttcatccgcttcctggagagccactggtttgtgtgggtgacccagatgaaccacatcgtgatggagattgaccaggaggcctacagagactggttcagcagccagctgacagccacctgcaatgtggagcagagcttcttcaatgactggttcagcggccacctgaacttccagatcgagcaccacctgttccccaccatgcccaggcacaacctgcacaagatcgcccccctggtgaagagcctgtgtgccaagcacggcatcgagtaccaggagaagcccctgctgcgggccctgctggacatcatccgcagcctgaagaagagcggcaagctgtggctggatgcctacctgcacaagtag

SEQ ID NO: 99927 - DNA, 1269 bp, Artificial Sequence
  derived and/or modified sequence
atgcacggccgggaggccggccccttcgtgtgcgtgtgcgtgctgctggcatcgatccccactccccaaactccgctcttacaggcctcactgcccccctttcaccccgcttcggcaggccatcccatcacggggcagcaggacgcctttcgcgccttccacccagatcttgagtttgtagggaagtttctcaagcctttattgattggcgaactggctcccgaggagccctcacaggatcatgggaaaaattccaaaataacagaggatttccgcgccctgagaaagacggccgaggacatgaatttatttaagacaaatcacgtcttttttctgctgctgctggcgcacattattgctctggagtccattgcttggttcacagtgttctactttggaaacggctggatcccaactcttattactgccttcgtattagccacaagccaggcacaggcaggatggttacagcacgactatggacacctgtctgtttatcggaagccaaagtggaatcaccttgttcacaaattcgtcataggccacctgaagggcgcatcagcaaattggtggaatcacaggcacttccaacatcatgccaagccaaacatattccataaggaccctgacgttaacatgttacatgtatttgtacttggagaatggcagccaatagagtacgggaaaaaaaaacttaagtatttgccctacaaccaccagcacgagtatttctttctgatcggtcccccactccttatccctatgtactttcagtaccagatcattatgactatgatcgtccacaagaactgggtggatctggcctgggctgtttcctactacatcaggttctttattacatatatcccattctatggcattcttggagctctgctttttctgaattttattcgattcttagagagtcactggttcgtgtgggttacacaaatgaatcacatcgtgatggagatagaccaggaggcatacagagattggttttcatcacaactcactgctacttgcaacgtcgagcagtcatttttcaatgattggttttctggccacctgaattttcagatcgagcatcatctgtttccaacaatgcccaggcataacctgcacaaaatcgcccctctcgtgaagtctctttgtgccaagcatgggattgagtatcaggaaaagccacttctgcgcgctcttctggacatcataagaagcttgaaaaagagtggaaaactctggctcgacgcctatctccacaaatag

SEQ ID NO: 99928 - DNA, 1269 bp, Artificial Sequence
  derived and/or modified sequence
atgcacggacgagaggcgggaccatttgtctgcgtctgcgtgttgctggcctctatcccaacaccccagaccccgctccttcaggcatcattgccgccttttcatcctgcatcagctgggcatcccataaccggccagcaggatgctttcagggccttccatcccgacctcgagttcgtcggcaaatttttaaagccccttctgatcggcgagctggccccagaagaaccaagccaagatcacgggaagaatagcaaaattacagaggacttccgggctttacgtaagactgcagaggacatgaacctgtttaagaccaaccatgtgttctttcttcttctgctggcccacatcatagctttagaatcaatcgcgtggttcacagtgttctatttcgggaatggctggattcctaccttaatcactgcatttgtccttgccacctctcaggcgcaggcaggatggcttcagcacgactatggccacttaagcgtatatagaaagccaaagtggaatcaccttgtccacaagtttgttattgggcatcttaaaggcgcaagcgcaaactggtggaaccacagacattttcagcaccatgccaaaccgaatatctttcacaaagatcctgatgttaacatgcttcacgtgtttgtgctgggtgaatggcagcccatagaatatgggaagaagaagctgaaataccttccatataaccaccagcacgaatacttcttcctgattgggccacccttgttgatcccaatgtatttccagtatcagatcattatgaccatgattgtgcataaaaattgggttgatctcgcttgggcagtgtcttactatatccggttctttatcacttacatccccttctacggcattcttggcgcactacttttccttaactttatcaggttcctcgaatctcattggttcgtctgggtcacccagatgaatcatattgtaatggaaatcgatcaggaagcctaccgggattggttctcatcccagctgactgctacctgcaatgtggagcagagtttctttaacgattggttctctggccacctgaacttccaaatcgagcaccacctctttcctacgatgccaaggcacaacctgcataaaattgcccctcttgtcaagagtctgtgcgcaaaacacgggattgagtaccaggaaaagccccttctgcgcgctttgctggatatcatacgaagccttaaaaaaagcggcaaattgtggctcgacgcctatctccacaaatag

SEQ ID NO: 99929 - DNA, 1269 bp, Artificial Sequence
  derived and/or modified sequence
atgcacggcagagaggccggccccttcgtgtgcgtgtgcgtgctgctggccagcatccccaccccccagacccccctgctgcaggccagcctgccccccttccaccccgccagcgccggccaccccatcaccggccagcaggacgccttcagagccttccaccccgacctggagttcgtgggcaagttcctgaagcccctgctgatcggcgagctggcccccgaggagcccagccaggaccacggcaagaacagcaagatcaccgaggacttcagagccctgagaaagaccgccgaggacatgaacctgttcaagaccaaccacgtgttcttcctgctgctgctggcccacatcatcgccctggagagcatcgcctggttcaccgtgttctacttcggcaacggctggatccccaccctgatcaccgccttcgtgctggccaccagccaggcccaggccggctggctgcagcacgactacggccacctgagcgtgtacagaaagcccaagtggaaccacctggtgcacaagttcgtgatcggccacctgaagggcgccagcgccaactggtggaaccacagacacttccagcaccacgccaagcccaacatcttccacaaggaccccgacgtgaacatgctgcacgtgttcgtgctgggcgagtggcagcccatcgagtacggcaagaagaagctgaagtacctgccctacaaccaccagcacgagtacttcttcctgatcggcccccccctgctgatccccatgtacttccagtaccagatcatcatgaccatgatcgtgcacaagaactgggtggacctggcctgggccgtgagctactacatcagattcttcatcacctacatccccttctacggcatcctgggcgccctgctgttcctgaacttcatcagattcctggagagccactggttcgtgtgggtgacccagatgaaccacatcgtgatggagatcgaccaggaggcctacagagactggttcagcagccagctgaccgccacctgcaacgtggagcagagcttcttcaacgactggttcagcggccacctgaacttccagatcgagcaccacctgttccccaccatgcccagacacaacctgcacaagatcgcccccctggtgaagagcctgtgcgccaagcacggcatcgagtaccaggagaagcccctgctgagagccctgctggacatcatcagaagcctgaagaagagcggcaagctgtggctggacgcctacctgcacaagtag

SEQ ID NO: 99930 - protein, 696 aa, Artificial Sequence
  derived and/or modified sequence
MLLWILLLETSLCFAAGNVTGDVCKEKICSCNEIEGDLHVDCEKKGFTSLQRFTAPTSQFYHLFLHGNSLTRLFPNEFANFYNAVSLHMENNGLHEIVPGAFLGLQLVKRLHINNNKIKSFRKQTFLGLDDLEYLQADFNLLRDIDPGAFQDLNKLEVLILNDNLISTLPANVFQYVPITHLDLRGNRLKTLPYEEVLEQIPGIAEILLEDNPWDCTCDLLSLKEWLENIPKNALIGRVVCEAPTRLQGKDLNETTEQDLCPLKNRVDSSLPAPPAQEETFAPGPLPTPFKTNGQEDHATPGSAPNGGTKIPGNWQIKIRPTAAIATGSSRNKPLANSLPCPGGCSCDHIPGSGLKMNCNNRNVSSLADLKPKLSNVQELFLRDNKIHSIRKSHFVDYKNLILLDLGNNNIATVENNTFKNLLDLRWLYMDSNYLDTLSREKFAGLQNLEYLNVEYNAIQLILPGTFNAMPKLRILILNNNLLRSLPVDVFAGVSLSKLSLHNNYFMYLPVAGVLDQLTSIIQIDLHGNPWECSCTIVPFKQWAERLGSEVLMSDLKCETPVNFFRKDFMLLSNDEICPQLYARISPTLTSHSKNSTGLAETGTHSNSYLDTSRVSISVLVPGLLLVFVTSAFTVVGMLVFILRNRKRSKRRDANSSASEINSLQTVCDSSYWHNGPYNADGAHRVYDCGSHSLSD

SEQ ID NO: 99931 - DNA, 2091 bp, Artificial Sequence
  derived and/or modified sequence
atgcttctctggatcctactgctggaaacctccctgtgcttcgccgccggtaacgttaccggcgatgtttgcaaggagaagatctgcagctgtaatgaaattgaaggagacttgcacgtcgactgcgaaaagaagggatttacctctttacagaggttcacagcacccacatcacaattctatcacctgttcttgcatggcaattctctgactaggttattcccaaatgaattcgccaacttttacaacgcagttagcttgcacatggagaataacggactccatgagatagtgcccggggcttttctcggtcttcagctagttaagagactgcacattaataataacaagatcaaaagcttccgaaaacagacttttctggggttagatgacctggaatatcttcaggccgattttaatcttctgcgagatatcgatcccggagcttttcaggatctcaacaaattggaggtgctgatcttaaatgataacctgattagtaccctaccagctaatgtatttcagtatgtgcccataacccacctagatctgagagggaaccgactgaaaactctgccctatgaagaagtgctcgaacagatcccggggatagccgaaatcctcctggaggacaacccttgggattgcacgtgcgacttgttgtctctaaaggagtggcttgagaacattccaaaaaacgctctgattggaagggtggtgtgcgaggcgcctacccgtctgcagggcaaggacttgaacgagactacagagcaggacctgtgtcccctgaaaaaccgcgtggattccagtctgcccgcccctcctgcacaggaggagacatttgctccaggaccactgcccactccttttaagacgaacggacaagaggatcacgcgactcctggatccgcaccgaacggtggcacgaaaatcccggggaattggcagatcaaaattaggccgacagccgcgatagccaccggatcctctcgaaacaaaccactggccaatagcctgccctgtcccggtggctgttcctgcgaccatataccaggaagtgggctcaaaatgaactgcaacaaccgcaatgtgtcctctctggcagatcttaagcctaaattgtcgaatgtccaggaattgtttctgcgtgacaacaaaattcacagtattcgtaagagtcattttgtggattataagaatcttattctgctggacttaggaaataataatatcgcaaccgttgaaaataatacattcaagaacctcctggacctgcggtggctgtatatggactccaattacctcgatactctgtccagagagaaatttgctgggctgcagaacctggaatatctaaatgtggagtacaacgccatccaacttatcctaccgggcacctttaacgcaatgccaaaactacggattcttatcttgaataacaacctcctgcgctctttgccagtagacgtgtttgccggagtgagcctgtctaaactctcactgcataacaattatttcatgtacttaccggtcgctggggtgcttgaccaactgacttcgattatccagatcgatctgcatggcaatccttgggagtgctcctgtacaattgtcccctttaagcagtgggcggagcgacttggatccgaagtactgatgtctgaccttaagtgcgaaaccccggtaaatttttttaggaaagacttcatgctgctgtctaatgatgaaatctgccctcagctttatgccagaatcagtccgaccctgacatctcattctaagaactccactggacttgctgaaaccgggacccactccaatagctatttggacaccagtcgagtgtccatctccgtgctagtaccaggactgttgctcgtcttcgttacatcagccttcacagtggtgggcatgttagtgtttatcttaagaaatcggaagcgtagcaagagacgcgacgcaaattcaagtgctagcgagattaattcactgcagactgtctgcgattcctcttattggcataatggcccatataacgcagatggcgctcaccgagtttatgactgtggaagtcacagcctctcggactag

SEQ ID NO: 99932 - DNA, 2091 bp, Artificial Sequence
  derived and/or modified sequence
atgctgctgtggatcctgctgctggagaccagcctgtgctttgctgctggaaatgtgactggagatgtgtgcaaggagaagatctgcagctgcaatgaaattgaaggagacctgcacgtggactgtgagaagaagggcttcaccagcctgcagcgcttcaccgcccccaccagccagttctaccacctgttcctgcacggcaacagcctgaccaggctcttccccaatgaatttgccaacttctacaatgctgtgtccctgcacatggagaacaacggcctgcatgaaattgtgcctggggccttcctgggcctgcagctggtgaagaggctgcacatcaacaacaacaagatcaagagcttcaggaagcagaccttcctgggcctggatgacctggagtacctgcaggccgacttcaacctgctgcgggacattgatcctggggccttccaggacctgaacaagctggaggtgctgatcctgaatgacaacctgatcagcaccctgcctgccaacgtgttccagtatgtgcccatcacccacctggacctgcggggcaaccggctgaagaccctgccctatgaggaggtgctggagcagatccctggcattgctgagatcctgctggaggacaacccctgggactgcacctgtgacctgctgagcctgaaggagtggctggagaacatccccaagaatgccctgattggccgggtggtgtgtgaggcccccacccggctgcagggcaaggacctgaatgagaccacagagcaggacctgtgccccctgaagaacagagtggacagcagcctgcctgcccccccagcccaggaggagacctttgcccctggccccctgcccacccccttcaagaccaacggccaggaggaccacgccaccccaggcagcgcccccaacggcggcaccaagatccctggcaactggcagatcaagatccggcccacagctgccatcgccaccggcagcagcaggaacaagcccctggccaacagcctgccctgccctgggggctgcagctgtgaccacatccctggcagcggcctgaagatgaactgcaacaacagaaatgtgagcagcctggccgacctgaagcccaagctgagcaatgtgcaggagctgttcctgcgggacaacaagatccacagcatcaggaagagccactttgtggactacaagaacctgatcctgctggacctgggcaacaacaacatcgccaccgtggagaacaacaccttcaagaacctgctggacctgcgctggctgtacatggacagcaactacctggacaccctgagccgggagaagtttgctggcctgcagaacctggagtacctgaatgtggagtacaatgccatccagctgatcctgcccggcaccttcaatgccatgcccaagctgcgcatcctgatcctgaacaacaacctgctgcggagcctgcctgtggatgtgtttgctggggtgtccctgagcaagctgagcctgcacaacaactacttcatgtacctgcctgtggccggcgtgctggaccagctgaccagcatcatccagattgacctgcacggcaacccctgggagtgcagctgcaccatcgtgcccttcaagcagtgggccgagcggctgggcagcgaggtgctgatgtctgacctgaagtgtgagacccctgtgaacttcttcaggaaggacttcatgctgctgagcaatgatgagatctgcccccagctgtatgcccgcatcagccccaccctgaccagccacagcaagaacagcacaggcctggccgagaccggcacccacagcaacagctacctggacaccagccgggtgtccatctctgtgctggtgcccggcctgctgctggtgtttgtgaccagcgccttcaccgtggtgggcatgctggtgttcatcctgaggaacaggaagaggagcaagagaagagatgccaacagcagcgccagcgagatcaacagcctgcagacagtgtgtgacagcagctactggcacaacggcccctacaatgctgatggagcccaccgggtgtatgactgtggcagccacagcctgagtgactag

SEQ ID NO: 99933 - DNA, 2091 bp, Artificial Sequence
  derived and/or modified sequence
atgctgctgtggatcctgctgctggagaccagcctgtgcttcgccgccggaaatgtgacaggtgacgtgtgtaaggaaaagatctgttcgtgtaatgagatcgaaggcgatctccacgttgactgcgaaaaaaagggattcaccagtcttcagagattcacagcaccaacttcccagttctaccacttgtttcttcatggaaattccctaactcgcttatttccgaacgagttcgctaacttttacaacgcagtctctctccatatggaaaacaacggcctgcacgagattgttcctggagcattcctaggcctccaactggtgaaacggttgcacattaataacaacaagataaagtcattccgcaagcagacctttctgggcctggatgatctggagtacctccaggcggattttaacctgttaagggatattgacccaggagccttccaggatctgaacaaactggaggtgctaatcctgaatgataatttgatttccaccctgcctgctaatgtatttcagtacgttccgattactcacctggacctgagggggaatcgactgaaaaccctaccatacgaagaagtcttagaacagatccccggaatcgccgagatcctgcttgaggataatccatgggactgcacttgtgacctcctatcactgaaagagtggttagaaaacatcccaaaaaacgctttaataggacgcgtggtatgcgaggctccaacccgccttcaaggaaaggatcttaacgagactactgaacaagacctctgccctctgaagaaccgggtggattcttcactccctgctcccccggcccaggaggagacttttgcacccggaccgctccccacccccttcaagaccaatgggcaggaagaccatgctactcctggatccgctcccaacggcgggacgaaaatccctggcaattggcaaataaagattcggcccactgctgccatcgctactggcagctcccggaacaagccactcgccaacagcctgccatgcccaggcgggtgtagctgcgaccatattccaggtagcggcctgaaaatgaattgcaataaccgtaatgtcagctcgctggcagatctgaagcctaaactgtccaatgtacaggaattgttcttacgggataacaaaattcactcaatacggaagagccactttgtcgactacaagaatctgatcctcttagacctgggcaataataatattgctaccgtcgaaaataatactttcaagaatctcctggatttgcgttggctgtatatggattctaactatctcgacaccctgagtagagagaaatttgcaggcttgcagaatttggaatatttaaatgtcgagtacaatgccattcaattaatactacccggtacatttaacgctatgcctaaattaaggatcctgatcctgaataataacttactgaggtctcttcccgtcgatgtgtttgcaggggtcagtctgtctaaactttcccttcataacaattactttatgtatctcccggtcgccggggtgctggatcaattaacaagcataatccagatcgatcttcatggcaatccctgggaatgcagttgtactatcgtgccttttaaacagtgggcggagaggctcgggtcagaggtgcttatgagcgacctcaaatgcgagactccagtcaacttctttagaaaggacttcatgctcctttcaaacgacgagatttgtcctcagctttatgctcgaatatccccgacactgaccagtcactcgaagaatagtaccggcctggctgagaccggcactcactcaaacagttacctggatactagtcgggtatcaatttccgtcctggttccaggtctcctactcgtgttcgtgacatctgcttttaccgtcgtggggatgctggtgtttatcctgagaaataggaaacgctctaagcgccgcgatgccaactccagcgcttccgaaataaacagcctacagactgtgtgtgatagctcctattggcacaatggcccctataatgcggacggagctcatcgggtgtacgactgtggtagtcacagtctatccgattag

SEQ ID NO: 99934 - DNA, 2091 bp, Artificial Sequence
  derived and/or modified sequence
atgctgctctggatactgctactggaaacctctctctgcttcgccgctggcaatgtgacaggagatgtctgcaaggagaagatatgctcatgtaacgaaatcgaaggtgatctccatgtcgattgcgagaaaaagggctttacctcacttcaaaggttcaccgccccaacctctcagttctatcatctgttcctgcacgggaactccctcacaaggctgttcccaaacgagttcgcgaacttttataacgccgtgagcctgcacatggaaaataacggcttgcacgagatcgtgccgggagcttttttgggacttcagctggttaaacgattgcatatcaacaacaataaaatcaagtctttccgcaagcagacatttttaggcctggatgacctcgagtaccttcaggccgactttaatctgctgcgcgacatcgatccaggcgcattccaagaccttaacaagctagaagtcctcatcctaaatgacaatctcatctccacactgcccgctaatgtctttcagtacgtgcccatcacgcacctggatttgcgcggtaataggctcaagaccctgccatacgaggaggtgctcgagcaaattcctggcatcgcggagattctccttgaagataatccatgggattgcacttgtgatctactcagcctgaaagagtggctggagaatattccaaaaaacgctctcatcggccgagtggtctgtgaggctcctactaggctccaaggaaaagatttgaacgaaacaacagagcaggacctatgccccctgaagaatcgcgttgactcctctctgccagcccctcctgcacaggaggaaacattcgctcctgggcctcttccaaccccatttaagacaaatggccaggaggaccacgccacacccggttctgctcccaacgggggaacaaaaataccgggtaactggcaaataaagattcgccctactgctgccattgcgaccggcagtagtaggaataaacctctggctaattctttaccctgtcccggtggctgttcttgcgatcatattcctggaagtggactgaaaatgaattgcaacaaccgtaacgtgagcagcctggcagacctgaaaccgaagctttcaaatgtacaagagctgttcctcagagacaacaagattcacagtatcagaaaaagccacttcgtggactacaagaacttgatcctcctggacctcggcaataataatattgccactgtcgaaaataatacatttaagaacctgctggacttgagatggctctacatggatagtaattacctggatactctatcacgtgaaaagttcgctgggttacagaatcttgagtaccttaatgtagagtacaacgctatccagctgatactgccagggactttcaacgctatgcccaaactgcggatacttatcctgaacaacaacctgctccgctccctgcccgttgatgtttttgcaggtgtcagtctttccaaattgtccttgcataacaactactttatgtatctgcctgtggcaggtgttctcgatcagctgacatctatcatacaaatcgatcttcacggcaatccttgggagtgctcttgtaccatcgtcccttttaagcagtgggcagaaagactgggatcggaagtcctgatgtctgatttgaaatgcgagacacctgtaaatttctttaggaaggacttcatgctgcttagtaacgatgaaatctgtccccagctgtacgcaaggatttctcccactttgactagccacagtaaaaattccaccggactcgctgagaccggaacccatagtaactcctacctcgatacatcgcgcgtctctatttctgtgctggtgcccggtcttcttctcgtgttcgtgacgtcagccttcacagtcgtcggcatgcttgttttcattttacggaatcgtaaacggagtaaaagacgagacgccaattcatctgctagtgaaattaacagtctacaaaccgtctgtgattcttcatattggcacaacggcccatacaatgctgacggcgcacaccgcgtctacgattgcggctcacactctctgagcgactag

SEQ ID NO: 99935 - DNA, 5185 bp, Artificial Sequence
  derived and/or modified sequence
cgcgctctcttcctccctcagacaactcgccccccgccctccgcccccctccacgtaattccgaaagagcagaagaaagagaaggagaacaggaaaagaagagctagtaagcgagagcgagagcacagaaaagaaaaaaaaaagccttaagaggaccgaaggggaggaaaggaaaaggatggacaaccacaaaacgcagcgattgcggaaattttccagcgccattggctgggcagcgtgagtccttcggtcgggcgtgatttcagcaccgggggaactggacagcacctcggggggacttctgggcaacccgcaaccacagcaagaactccaccagcagcctcaacaacagaagccgcggaaaaccctgctttgtatcagagaggcaaggtcagtccgacgcacagccatgcacaggcagtgcgcctgtactacgctgcaaaccctctgcttgtttctctaacatgcacttgcttctaattactagcattgtttcatttctgatcagtgaagatcagtagatgagattctgtaagggtgtacttttaatttatatgtatatatttaacttctttttctgttatttttaaagtgttgtgggggagtggggtttttttcctacttttttttttttttttttttctttgcttgccttgcactacgtgcctggatagtttgtggatataattattgactggcgtctgggctattgcagtgcgggggggttagggaggaaggaatccacccccacccccccaaacccttttcttctcctttcctggcttcggacattggagcactaaatgaacttgaattgtgtctgtggcgagcaggatggtcgctgttactttgtgatgagatcggggatgaattgctcgctttaaaaatgctgctttggattctgttgctggagacgtctctttgttttgccgctggaaacgttacaggggacgtttgcaaagagaagatctgttcctgcaatgagatagaaggggacctacacgtagactgtgaaaaaaagggcttcacaagtctgcagcgtttcactgccccgacttcccagttttaccatttatttctgcatggcaattccctcactcgacttttccctaatgagttcgctaacttttataatgcggttagtttgcacatggaaaacaatggcttgcatgaaatcgttccgggggcttttctggggctgcagctggtgaaaaggctgcacatcaacaacaacaagatcaagtcttttcgaaagcagacttttctggggctggacgatctggaatatctccaggctgattttaatttattacgagatatagacccgggggccttccaggacttgaacaagctggaggtgctcattttaaatgacaatctcatcagcaccctacctgccaacgtgttccagtatgtgcccatcacccacctcgacctccggggtaacaggctgaaaacgctgccctatgaggaggtcttggagcaaatccctggtattgcggagatcctgctagaggataacccttgggactgcacctgtgatctgctctccctgaaagaatggctggaaaacattcccaagaatgccctgatcggccgagtggtctgcgaagcccccaccagactgcagggtaaagacctcaatgaaaccaccgaacaggacttgtgtcctttgaaaaaccgagtggattctagtctcccggcgccccctgcccaagaagagacctttgctcctggacccctgccaactcctttcaagacaaatgggcaagaggatcatgccacaccagggtctgctccaaacggaggtacaaagatcccaggcaactggcagatcaaaatcagacccacagcagcgatagcgacgggtagctccaggaacaaacccttagctaacagtttaccctgccctgggggctgcagctgcgaccacatcccagggtcgggtttaaagatgaactgcaacaacaggaacgtgagcagcttggctgatttgaagcccaagctctctaacgtgcaggagcttttcctacgagataacaagatccacagcatccgaaaatcgcactttgtggattacaagaacctcattctgttggatctgggcaacaataacatcgctactgtagagaacaacactttcaagaaccttttggacctcaggtggctatacatggatagcaattacctggacacgctgtcccgggagaaattcgcggggctgcaaaacctagagtacctgaacgtggagtacaacgctatccagctcatcctcccgggcactttcaatgccatgcccaaactgaggatcctcattctcaacaacaacctgctgaggtccctgcctgtggacgtgttcgctggggtctcgctctctaaactcagcctgcacaacaattacttcatgtacctcccggtggcaggggtgctggaccagttaacctccatcatccagatagacctccacggaaacccctgggagtgctcctgcacaattgtgcctttcaagcagtgggcagaacgcttgggttccgaagtgctgatgagcgacctcaagtgtgagacgccggtgaacttctttagaaaggatttcatgctcctctccaatgacgagatctgccctcagctgtacgctaggatctcgcccacgttaacttcgcacagtaaaaacagcactgggttggcggagaccgggacgcactccaactcctacctagacaccagcagggtgtccatctcggtgttggtcccgggactgctgctggtgtttgtcacctccgccttcaccgtggtgggcatgctcgtgtttatcctgaggaaccgaaagcggtccaagagacgagatgccaactcctccgcgtccgagattaattccctacagacagtctgtgactcttcctactggcacaatgggccttacaacgcagatggggcccacagagtgtatgactgtggctctcactcgctctcagactaagaccccaaccccaataggggagggcagagggaaggcgatacatccttccccaccgcaggcaccccgggggctggaggggcgtgtacccaaatccccgcgccatcagcctggatgggcataagtagataaataactgtgagctcgcacaaccgaaagggcctgaccccttacttagctccctccttgaaacaaagagcagactgtggagagctgggagagcgcagccagctcgctctttgctgagagccccttttgacagaaagcccagcacgaccctgctggaagaactgacagtgccctcgccctcggccccggggcctgtggggttggatgccgcggttctatacatatatacatatatccacatctatatagagagatagatatctatttttcccctgtggattagccccgtgatggctccctgttggctacgcagggatgggcagttgcacgaaggcatgaatgtattgtaaataagtaactttgacttctgacaaaaaacaaaaagtgctgcatggctcgcatggaatccacgcgctccagggactctgcccgcccccgcgactggagacggcatctcgttcacagcacccaccctcttacctgataagttccatcgtatcaaactttctataaacaaaatacagtataatcagaaagtgccatttcgccattatttgtgatcggtaggcagttcagagcataagttaactgtgaaaaaaatgtaaaggttttatttaggacatttgcatggctagtcatcagtccattttatgagttaacaatgtattttgttgagggaagtttttaggggttgttttgggttcttttattttgatggtgatgttttattttattttatttttttcagggggtcttttttttaatacatatccaataatgccttccatctgaatgtaaaataagtacccatgatttctattatagtatcagtgtaattatttaaaaaatgattttgaggcagttaagcatgaccaattaatgtcactctagtgcttaggctgcgatcctatggtagcaattctgtgctggtataaatcttacttataaagtaggaaaagagaaccgaggaagcacgtgaaacttactaattctattcgaggattttataatggcatattttttcagtattaaagcgaaaatgttttcaactctgggtccttacctttttccagcttcatatttgcaagtggtaaattggatttgcggtggaagagacaggggagggaaacggttggggttagatcccttcctgagctacattaaggctctttctctaatcgccttacttagctttttaccctttaagtagctcctcttccctcgcccccaccctctaccccacccccaccttcgctcagactttaccggctttccccagtccataaaggtcttgccccaacactcaccccttctttttttcccctctccaaatgcagcagtgaatccctttattaatactggaaatccctctctgctgcttttgttggtgctgcccacactgcagatatattaaggatgttaggagagatttgatttaattgactctgcctagataggtctcattaaacagagtggagatttcattggtcagcactcctcaatgaaagacagacctaatgactggcatttgagatgctgctggcattttgaattcaacatctgctgaaaacggtaaaactaattagtgcccacccaccctccccgccccagcaactgcatattgaaatttgttaaagcactcatctttatggaaattaatcattatcctaaagaagtgtttctctcccatcatccggatttctggttgtggcccagcaattaacaaaaacagcttcaactgttcgaattttatgaaccaatgtaactctggcctcaatcatattcctctgggatttctaaacagcagttaagctacaaaaagcaaacaaaaccacacatattgatggagtctgcattccaccacatatccacccttgagaagtatgtcaaaagactgcagactatagatttttttttaatataggattataaatcagctagtgaaagacctcagagcagttgtaagtagatctgccatctagaactcatattctaaagggaagtgatttctcagaacagtgatgttctggaatatgtattatttattttaacacttttttaataaaatctttattataaacc

SEQ ID NO: 99936 - DNA, 2091 bp, Artificial Sequence
  derived and/or modified sequence
atgctgctgtggatcctgctgctggagaccagcctgtgcttcgccgccggcaacgtgaccggcgacgtgtgcaaggagaagatctgcagctgcaacgagatcgagggcgacctgcacgtggactgcgagaagaagggcttcaccagcctgcagagattcaccgcccccaccagccagttctaccacctgttcctgcacggcaacagcctgaccagactgttccccaacgagttcgccaacttctacaacgccgtgagcctgcacatggagaacaacggcctgcacgagatcgtgcccggcgccttcctgggcctgcagctggtgaagagactgcacatcaacaacaacaagatcaagagcttcagaaagcagaccttcctgggcctggacgacctggagtacctgcaggccgacttcaacctgctgagagacatcgaccccggcgccttccaggacctgaacaagctggaggtgctgatcctgaacgacaacctgatcagcaccctgcccgccaacgtgttccagtacgtgcccatcacccacctggacctgagaggcaacagactgaagaccctgccctacgaggaggtgctggagcagatccccggcatcgccgagatcctgctggaggacaacccctgggactgcacctgcgacctgctgagcctgaaggagtggctggagaacatccccaagaacgccctgatcggcagagtggtgtgcgaggcccccaccagactgcagggcaaggacctgaacgagaccaccgagcaggacctgtgccccctgaagaacagagtggacagcagcctgcccgccccccccgcccaggaggagaccttcgcccccggccccctgcccacccccttcaagaccaacggccaggaggaccacgccacccccggcagcgcccccaacggcggcaccaagatccccggcaactggcagatcaagatcagacccaccgccgccatcgccaccggcagcagcagaaacaagcccctggccaacagcctgccctgccccggcggctgcagctgcgaccacatccccggcagcggcctgaagatgaactgcaacaacagaaacgtgagcagcctggccgacctgaagcccaagctgagcaacgtgcaggagctgttcctgagagacaacaagatccacagcatcagaaagagccacttcgtggactacaagaacctgatcctgctggacctgggcaacaacaacatcgccaccgtggagaacaacaccttcaagaacctgctggacctgagatggctgtacatggacagcaactacctggacaccctgagcagagagaagttcgccggcctgcagaacctggagtacctgaacgtggagtacaacgccatccagctgatcctgcccggcaccttcaacgccatgcccaagctgagaatcctgatcctgaacaacaacctgctgagaagcctgcccgtggacgtgttcgccggcgtgagcctgagcaagctgagcctgcacaacaactacttcatgtacctgcccgtggccggcgtgctggaccagctgaccagcatcatccagatcgacctgcacggcaacccctgggagtgcagctgcaccatcgtgcccttcaagcagtgggccgagagactgggcagcgaggtgctgatgagcgacctgaagtgcgagacccccgtgaacttcttcagaaaggacttcatgctgctgagcaacgacgagatctgcccccagctgtacgccagaatcagccccaccctgaccagccacagcaagaacagcaccggcctggccgagaccggcacccacagcaacagctacctggacaccagcagagtgagcatcagcgtgctggtgcccggcctgctgctggtgttcgtgaccagcgccttcaccgtggtgggcatgctggtgttcatcctgagaaacagaaagagaagcaagagaagagacgccaacagcagcgccagcgagatcaacagcctgcagaccgtgtgcgacagcagctactggcacaacggcccctacaacgccgacggcgcccacagagtgtacgactgcggcagccacagcctgagcgactag

SEQ ID NO: 99937 - protein, 459 aa, Artificial Sequence
  derived and/or modified sequence
MTILTYPFKNLPTASKWALRFSIRPLSCSSQLRAAPAVQTKTKKTLAKPNIRNVVVVDGVRTPFLLSGTSGLLHRTSVPKEVVDYIIFGTVIQEVKTSNVAREAALGAGFSDKTPAHTVTMACISANQAMTTGVGLIASGQCDVIVAGGVELMSDVPIRHSRKMRKLMLDLNKAKSMGQRLSLISKFRFNFLAPELPAVSEFSTSETMGHSADRLAAAFAVSRLEQDEYALRSHSLAKKAQDEGLLSDVVPFKVPGKDTVTKDNGIRPSSLEQMAKLKPAFIKPYGTVTAANSSFLTDGASAMLIMAEEKALAMGYKPKAYLRDFMYVSQDPKDQLLLGPTYATPKVLEKAGLTMNDIDAFEFHEAFSGQILANFKAMDSDWFAENYMGRKTKVGLPPLEKFNNWGGSLSLGHPFGATGCRLVMAAANRLRKEGGQYGLVAACAAGGQGHAMIVEAYPK

SEQ ID NO: 99938 - DNA, 1380 bp, Artificial Sequence
  derived and/or modified sequence
atgactatcctcacataccctttcaagaacctgcccacagcctccaagtgggctctaaggttcagcattagacctctatcatgcagctcgcagctgcgagcagctccagcggttcagacgaaaactaagaaaactctggccaaaccaaatattcgaaacgtggtagtggtcgatggagtgaggactcctttcttactctctggcacaagcggcctattacaccgtacaagcgtgccaaaggaggtggtagattatatcattttcggtaccgttatccaggaagttaagacctccaatgtagcaagagaagctgccctcggggcaggattctctgacaaaacacctgcacacacagtgacgatggcctgtatttctgcaaatcaggccatgacaactggcgtcggattaatagccagcggccaatgcgacgtgatagtcgccggaggcgtggagttgatgtcagacgtgccaattaggcacagccgaaaaatgaggaagctgatgctagatctcaacaaggccaagtccatgggacagcggctgtccttgatatctaagttccgtttcaattttttggcgcccgagctgccggcggtgtctgagttttctacttctgagactatgggtcacagtgcggatcggctggcagcagcattcgccgtgtctaggcttgagcaggacgagtacgcgcttcgatcacattctttagccaagaaggcacaggatgaggggctgttatcagacgtggtccccttcaaagtcccagggaaagatacagtgacgaaggataatgggatcagaccatcttcccttgaacaaatggctaaactgaagccagcatttataaaaccgtatgggaccgtgactgcagccaactcgagtttcctcacggacggagcctctgctatgctgatcatggctgaggaaaaagccttagccatgggttacaaacccaaggcctatttgagagatttcatgtacgtaagccaggatccaaaggaccagcttttgctcggcccaacttatgccacacctaaagtgcttgaaaaggctggattgacaatgaatgacatagacgcctttgaatttcatgaggcatttagcggccaaatcctggcaaatttcaaagctatggatagcgactggtttgccgaaaattacatgggacgaaagactaaagtgggtctcccccccttggaaaaatttaataattggggcggcagcctaagcctaggccacccattcggcgctactgggtgtaggttggttatggctgcggccaatcgacttcgcaaagagggaggtcagtacggtcttgtggctgcttgcgcggccgggggccaggggcacgctatgattgtggaggcttaccctaaatag

SEQ ID NO: 99939 - DNA, 1519 bp, Artificial Sequence
  derived and/or modified sequence
gaaccttgctccgagagggagtcctcgcggacgtcagccaagattccagaatgactatcttgacttacccctttaaaaatcttcccactgcatcaaaatgggccctcagattttccataagacctctgagctgttcctcccagctacgagctgccccagctgtccagaccaaaacgaagaagacgttagccaaacccaatataaggaatgttgtggtggtggatggtgttcgcactccatttttgctgtctggcacttcgggtttgttgcatcggaccagtgtccctaaggaagtagttgattatatcatctttggtacagttattcaggaagtgaaaacaagcaatgtggctagagaggctgcccttggagctggcttctctgacaagactcctgctcacactgtcaccatggcttgtatctctgccaaccaagccatgaccacaggtgttggcttgattgcttctggccagtgtgatgtgatcgtggcaggtggtgttgagttgatgtccgatgtccctattcgtcactcaaggaaaatgagaaaactgatgcttgatctcaataaggccaaatctatgggccagcgactgtctttaatctctaaattccgatttaatttcctagcacctgagctccctgcggtttctgagttctccaccagtgagaccatgggccactctgcagaccgactggccgctgcctttgctgtttctcggctggaacaggatgaatatgcactgcgctctcacagtctagccaagaaggcacaggatgaaggactcctttctgatgtggtacccttcaaagtaccaggaaaagatacagttaccaaagataatggcatccgtccttcctcactggagcagatggccaaactaaaacctgcattcatcaagccctacggcacagtgacagctgcaaattcttctttcttgactgatggtgcatctgcaatgttaatcatggcggaggaaaaggctctggccatgggttataagccgaaggcatatttgagggattttatgtatgtgtctcaggatccaaaagatcaactattacttggaccaacatatgctactccaaaagttctagaaaaggcaggattgaccatgaatgatattgatgcttttgaatttcatgaagctttctcgggtcagattttggcaaattttaaagccatggattctgattggtttgcagaaaactacatgggtagaaaaaccaaggttggattgcctcctttggagaagtttaataactggggtggatctctgtccctgggacacccatttggagccactggctgcaggttggtcatggctgctgccaacagattacggaaagaaggaggccagtatggcttagtggctgcgtgtgcagctggagggcagggccatgctatgatagtggaagcttatccaaaataatagatccagaagaagtgacctgaagtttctgtgcaacactcacactaggcaatgccatttcaatgcattactaaatgacatttgtagtt

SEQ ID NO: 99940 - DNA, 1380 bp, Artificial Sequence
  derived and/or modified sequence
atgaccatcctgacctaccccttcaagaacctgcccacagccagcaagtgggccctgcgcttcagcatccggcccctgagctgcagcagccagctgcgggccgccccagctgtgcagaccaagaccaagaagaccctggccaagcccaacatcagaaatgtggtggtggtggatggagtgaggacccccttcctgctgagcggcaccagcggcctgctgcacaggacctctgtgcccaaggaggtggtggactacatcatcttcggcaccgtcatccaggaggtgaagaccagcaatgtggcccgggaggccgccctgggcgccggcttcagtgacaagaccccagcccacacagtgaccatggcctgcatcagcgccaaccaggccatgaccaccggggtgggcctgattgccagcggccagtgtgatgtgattgtggccggcggcgtggagctgatgtctgatgtgcccatccgccacagcaggaagatgaggaagctgatgctggacctgaacaaggccaagtccatgggccagaggctgagcctcatcagcaagttccgcttcaacttcctggcccctgagctgcctgctgtgtctgagttcagcaccagcgagaccatgggccacagcgctgaccggctggccgccgcctttgctgtgtcccggctggagcaggatgaatatgccctgcggagccacagcctggccaagaaggcccaggatgagggcctgctgagtgatgtggtgcccttcaaggtgcctgggaaggacacagtgaccaaggacaatggcatccggcccagcagcctggagcagatggccaagctgaagccagccttcatcaagccctatggaacagtgacagctgccaacagcagcttcctgacagatggagccagcgccatgctgatcatggccgaggagaaggccctggccatgggctacaagcccaaggcctacctgcgggacttcatgtatgtgtcccaggaccccaaggaccagctgctgctgggccccacctacgccacccccaaggtgctggagaaggccggcctgaccatgaatgacattgatgcctttgagttccacgaggccttcagcggccagatcctggccaacttcaaggccatggacagcgactggtttgctgagaactacatgggcaggaagaccaaggtgggcctgccccccctggagaagttcaacaactggggcggcagcctgagcctgggccacccctttggagccaccggctgccgcctggtgatggccgccgccaaccggctgaggaaggagggcggccagtatggcctggtggccgcctgtgccgccggcggccagggccacgccatgattgtggaggcctaccccaagtag

SEQ ID NO: 99941 - DNA, 1380 bp, Artificial Sequence
  derived and/or modified sequence
atgaccatcctgacctaccccttcaagaacctgcccaccgccagcaaatgggccctgcggttctccatcaggcctctaagctgcagctcccagttgcgagccgctcctgccgttcaaacaaaaaccaagaaaacccttgccaaacccaacattaggaacgttgtcgttgttgacggggtgcgaactccgttcctcttgagtggaacctccggattattacacaggaccagcgtccctaaagaggttgtggactatatcatttttggaacggtgattcaagaagtcaaaactagcaatgttgccagagaagccgccctcggagccggattttctgacaagacccccgcccatacagtgacgatggcctgtatctctgcgaaccaggctatgacaactggggttggcctgatcgcttccggacagtgtgatgtaatagttgcaggaggggttgaactgatgtctgacgtaccaatccggcatagcaggaagatgcgtaagctgatgctggatctgaacaaagccaagtcaatgggacagagattgtccctcatttccaaatttcgattcaattttctcgcaccagaattacctgccgtgtctgaattctcgacatccgagactatgggccatagcgccgaccgacttgccgcggccttcgctgtgtctcgcctggaacaggacgaatatgctctgaggagccacagtcttgctaaaaaagcccaggatgagggtctcctgtctgatgtcgtgccgttcaaagtgcctgggaaagacactgttaccaaagacaatgggataagacccagcagcttggagcaaatggccaaattgaagcccgcttttatcaaaccatacggcaccgtaactgctgcaaatagcagcttcctgaccgacggtgcttcagctatgctgatcatggccgaagagaaagcattggcaatggggtacaagcccaaagcttacctacgggacttcatgtacgtgagccaggatccgaaggatcagctgctgctgggcccaacgtacgcaacccccaaagtgctggagaaagccggcctcacaatgaacgatattgacgcattcgaattccacgaggcattctctgggcagattctggcaaatttcaaggcgatggacagtgactggtttgcagaaaactacatgggccgcaagaccaaagttgggttacctccactggaaaaattcaacaattggggtggatccttgtcgctgggccacccgttcggcgctacggggtgcaggctggtcatggccgcggctaataggcttcgcaaggaaggcgggcaatatggcctggtggcggcatgcgcggccggtgggcaagggcatgccatgattgtggaagcgtaccctaagtag

SEQ ID NO: 99942 - DNA, 1380 bp, Artificial Sequence
  derived and/or modified sequence
atgactatcctgacataccccttcaagaatcttcccactgctagtaaatgggctctccgcttttcaatcaggccgctgtcctgctcctctcagctgagggccgctccagctgttcagacaaagacaaagaaaacactggccaagccaaatattaggaacgtggtggtcgtagacggagtacggaccccattcctattatccggaacaagcgggttgcttcacaggacaagtgtgcctaaggaggttgtcgattacatcatattcggtactgtgattcaagaagtgaaaacttccaacgtggctcgtgaagccgctctcggtgctggcttttcagacaagacccccgctcataccgtgactatggcctgtatttctgctaatcaggcaatgaccaccggcgtgggcctgattgcctctggtcagtgcgatgtaatcgtagcaggcggagttgaactcatgtctgacgtgccaataagacatagccgcaaaatgcgcaaactgatgctggacctcaataaggcaaagtccatgggacagcgactgagtttaatatcaaagttcagatttaatttccttgcaccagaattgcctgcagtgtctgagttctctacaagcgaaaccatggggcactcagcggatagattggcagctgcgtttgctgttagcaggcttgaacaggatgaatatgctctccggtcccactccctggctaagaaggctcaagatgaaggtttgcttagcgacgttgttcctttcaaagttcccggaaaggacactgtcaccaaggacaacggcatccggcctagcagtcttgaacagatggcaaaactgaagccagcttttatcaagccctatggaacagtgacagcagccaattccagcttcctgactgatggcgcttcggccatgctgattatggccgaagagaaggcattagcaatggggtataagcccaaagcttacttgagagacttcatgtacgtcagccaagatcctaaggaccagcttttgttgggccctacatacgcaacccccaaagttctggagaaagccggactcacaatgaacgatatcgatgccttcgagttccatgaagcattttctggccaaattttggctaattttaaagcaatggactctgattggttcgccgagaactacatgggacgtaaaactaaggtgggtctcccaccactggagaagtttaacaactggggaggatctctgtcccttggacatccattcggcgctactggatgccgattagtgatggccgcagctaaccggttgcgaaaagaaggcggacagtatgggctcgtggcagcctgtgcggcaggcggacagggccacgccatgattgtggaagcatatcctaaatag

SEQ ID NO: 99943 - DNA, 1380 bp, Artificial Sequence
  derived and/or modified sequence
atgaccatcctgacctaccccttcaagaacctgcccaccgccagcaagtgggccctgagattcagcatcagacccctgagctgcagcagccagctgagagccgcccccgccgtgcagaccaagaccaagaagaccctggccaagcccaacatcagaaacgtggtggtggtggacggcgtgagaacccccttcctgctgagcggcaccagcggcctgctgcacagaaccagcgtgcccaaggaggtggtggactacatcatcttcggcaccgtgatccaggaggtgaagaccagcaacgtggccagagaggccgccctgggcgccggcttcagcgacaagacccccgcccacaccgtgaccatggcctgcatcagcgccaaccaggccatgaccaccggcgtgggcctgatcgccagcggccagtgcgacgtgatcgtggccggcggcgtggagctgatgagcgacgtgcccatcagacacagcagaaagatgagaaagctgatgctggacctgaacaaggccaagagcatgggccagagactgagcctgatcagcaagttcagattcaacttcctggcccccgagctgcccgccgtgagcgagttcagcaccagcgagaccatgggccacagcgccgacagactggccgccgccttcgccgtgagcagactggagcaggacgagtacgccctgagaagccacagcctggccaagaaggcccaggacgagggcctgctgagcgacgtggtgcccttcaaggtgcccggcaaggacaccgtgaccaaggacaacggcatcagacccagcagcctggagcagatggccaagctgaagcccgccttcatcaagccctacggcaccgtgaccgccgccaacagcagcttcctgaccgacggcgccagcgccatgctgatcatggccgaggagaaggccctggccatgggctacaagcccaaggcctacctgagagacttcatgtacgtgagccaggaccccaaggaccagctgctgctgggccccacctacgccacccccaaggtgctggagaaggccggcctgaccatgaacgacatcgacgccttcgagttccacgaggccttcagcggccagatcctggccaacttcaaggccatggacagcgactggttcgccgagaactacatgggcagaaagaccaaggtgggcctgccccccctggagaagttcaacaactggggcggcagcctgagcctgggccaccccttcggcgccaccggctgcagactggtgatggccgccgccaacagactgagaaaggagggcggccagtacggcctggtggccgcctgcgccgccggcggccagggccacgccatgatcgtggaggcctaccccaagtag

SEQ ID NO: 99944 - protein, 840 aa, Artificial Sequence
  derived and/or modified sequence
MNGEYRGRGFGRGRFQSWKRGRGGGNFSGKWREREHRPDLSKTTGKRTSEQTPQFLLSTKTPQSMQSTLDRFIPYKGWKLYFSEVYSDSSPLIEKIQAFEKFFTRHIDLYDKDEIERKGSILVDFKELTEGGEVTNLIPDIATELRDAPEKTLACMGLAIHQVLTKDLERHAAELQAQEGLSNDGETMVNVPHIHARVYNYEPLTQLKNVRANYYGKYIALRGTVVRVSNIKPLCTKMAFLCAACGEIQSFPLPDGKYSLPTKCPVPVCRGRSFTALRSSPLTVTMDWQSIKIQELMSDDQREAGRIPRTIECELVHDLVDSCVPGDTVTITGIVKVSNAEEGSRNKNDKCMFLLYIEANSISNSKGQKTKSSEDGCKHGMLMEFSLKDLYAIQEIQAEENLFKLIVNSLCPVIFGHELVKAGLALALFGGSQKYADDKNRIPIRGDPHILVVGDPGLGKSQMLQAACNVAPRGVYVCGNTTTTSGLTVTLSKDSSSGDFALEAGALVLGDQGICGIDEFDKMGNQHQALLEAMEQQSISLAKAGVVCSLPARTSIIAAANPVGGHYNKAKTVSENLKMGSALLSRFDLVFILLDTPNEHHDHLLSEHVIAIRAGKQRTISSATVARMNSQDSNTSVLEVVSEKPLSERLKVVPGETIDPIPHQLLRKYIGYARQYVYPRLSTEAARVLQDFYLELRKQSQRLNSSPITTRQLESLIRLTEARARLELREEATKEDAEDIVEIMKYSMLGTYSDEFGNLDFERSQHGSGMSNRSTAKRFISALNNVAERTYNNIFQFHQLRQIAKELNIQVADFENFIGSLNDQGYLLKKGPKVYQLQTM

SEQ ID NO: 99945 - DNA, 2523 bp, Artificial Sequence
  derived and/or modified sequence
atgaatggggagtatcgcggccggggctttgggagagggcggtttcagtcctggaagaggggacgcgggggcggcaacttcagtggcaagtggagggaaagggagcaccggcctgatcttagtaagaccactggtaagcgcactagtgaacagactccgcagttcctgctgtccacaaaaacgcctcagagcatgcagtccaccctcgataggttcatcccctacaaaggctggaaactgtacttcagcgaggtgtattccgacagtagcccactcatcgaaaagattcaggccttcgagaagtttttcactaggcatatcgatctttacgacaaagatgaaattgagaggaaaggcagcattttggtagattttaaggaactaaccgagggcggggaggtgacgaacctaattccggatatcgcaactgaacttagggatgcccctgagaagactttagcatgtatgggtttggcaattcatcaagttctcaccaaggatctggaaagacacgccgccgaactccaggcccaggaaggcctctcaaacgacggtgagactatggtgaacgtgccgcatattcacgcccgcgtttacaattacgagcctttgacccagctgaaaaatgtgcgggcgaactactatggcaaatatatcgcacttcggggcactgtggtgcgggtgagcaacatcaagccattgtgtactaagatggccttcctctgcgccgcttgtggggagattcagtcatttcctttgcctgatggtaagtacagtctacccacgaagtgcccagtacctgtttgcagaggacggtccttcaccgcattgcggtccagcccgctgaccgtgaccatggattggcagtccatcaaaatacaggagctgatgtcagatgaccagagggaggctgggcgtatccccagaactattgagtgcgagctggtccacgatctcgtggacagctgtgtacctggagacaccgtgacgatcaccggcatcgtcaaagtgagtaacgccgaagaaggcagccgcaataagaatgacaaatgtatgttcctcttgtatatagaggcgaactccataagcaatagcaagggacagaaaacaaaaagcagtgaggacgggtgcaagcacggaatgctgatggagttctcactgaaagacctatacgctatccaggagattcaggccgaggaaaacttatttaagctgatcgtgaacagtctttgccctgttatcttcggccacgagctagttaaggctggcctcgctctggctctcttcggcggttcccagaagtacgctgatgataagaataggattcccatcagaggtgatcctcacatccttgtggtcggtgaccctggcctcggcaagtctcagatgttacaagcagcttgtaacgtcgcccccagaggtgtgtacgtgtgcggcaatactactaccacaagtgggcttacagttacattgtccaaagacagcagctcgggcgattttgccctcgaggcaggggctctagttctgggggaccagggtatctgcggcatagacgaattcgacaaaatggggaaccaacatcaggccctgcttgaggccatggagcagcaaagcatctcactcgcaaaagctggagtcgtgtgcagcttgcctgctaggacaagcattatagcagccgcgaatcctgtaggtggccactataacaaggccaagaccgtgtcggagaacctcaaaatggggtcagctttgctgtctcgtttcgatctcgtttttatactgctagacacgcctaacgagcatcatgaccatctgctgagcgagcatgtgatcgccatcagggccgggaaacagcggactatctcctcggccaccgtagcaagaatgaatagccaagacagtaacacatctgttttagaagtggtttccgagaagccactgagcgagcgcctgaaagtcgtgcccggggagaccattgatcccattccacaccagcttctccggaaatacattggttacgctcgacagtatgtatatcctaggctcagtaccgaagctgccagagtgctgcaggacttctacctcgaattgcgcaaacagagtcaacgcctcaatagctcacctatcacgacgcgccagctggagagcctaatcaggcttactgaggctagggcacgcttagaactgcgggaagaggccactaaggaagatgctgaggacattgtggagatcatgaagtactctatgttaggtacatactccgacgagtttggaaacctggattttgagagatcccagcacggcagcggaatgtcaaacagaagcacagcgaaacggtttatctctgctctgaacaacgtggctgagaggacctataataacattttccagtttcaccaactacgacagattgccaaggagctcaacatccaggttgccgacttcgagaactttatagggtctctgaatgaccagggttaccttttgaagaaaggtcctaaggtctaccagcttcagactatgtag

SEQ ID NO: 99946 - DNA, 2523 bp, Artificial Sequence
  derived and/or modified sequence
atgaatggagagtaccggggccggggcttcggccggggccgcttccagagctggaagaggggccggggcggcggcaacttcagcggcaagtggagggagcgggagcacaggccagacctgagcaagaccaccgggaagaggaccagcgagcagaccccccagttcctgctgagcaccaagaccccccagagcatgcagagcaccctggaccgcttcatcccctacaagggctggaagctgtacttcagcgaggtgtacagcgacagcagccccctgattgagaagatccaggcctttgagaagttcttcaccaggcacatcgacctgtatgacaaggatgaaattgaaaggaagggcagcatcctggtggacttcaaggagctgacagaaggaggagaggtgaccaacctgatcccagacatcgccacagagctgagagatgcccctgagaagaccctggcctgcatgggcctggccatccaccaggtgctgaccaaggacctggagagacatgctgctgagctgcaggcccaggagggcctgagcaatgatggagagaccatggtgaatgtgccccacatccacgcccgggtgtacaactatgagcccctgacccagctgaagaatgtgcgggccaactactacggcaagtacatcgccctgcggggcaccgtggtgcgggtgagcaacatcaagcccctgtgcaccaagatggccttcctgtgtgccgcctgtggggagatccagagcttccccctgcctgatggcaagtacagcctgcccaccaagtgccctgtgcctgtgtgccggggccgctccttcaccgccctgcggagcagccccctgactgtgaccatggactggcagagcatcaagatccaggagctgatgtctgatgaccagcgggaggccggccgcatccccaggaccattgaatgtgagctggtgcatgacctggtggacagctgtgtgcctggggacacagtgaccatcaccggcatcgtgaaggtgtccaatgctgaggagggcagcaggaacaagaatgacaagtgcatgttcctgctgtacatcgaggccaacagcatcagcaacagcaagggccagaagaccaagagcagtgaagatggctgcaagcacggcatgctgatggagttcagcctgaaggacctgtatgccatccaggagatccaggccgaggagaacctcttcaagctgattgtgaacagcctgtgccctgtgatctttggacatgagctggtgaaggccggcctggccctggccctgtttggaggcagccagaagtatgcagatgacaagaaccgcatccccatccggggggacccccacatcctggtggtgggggaccccggcctgggcaagagccagatgctgcaggccgcctgcaatgtggccccccggggcgtgtatgtgtgtggcaacaccaccaccaccagcggcctgactgtgaccctgagcaaggacagcagcagcggggactttgccctggaggccggggccctggtgctgggggaccagggcatctgtggcattgatgaatttgacaagatgggcaaccagcaccaggccctgctggaggccatggagcagcagagcatcagcctggccaaggccggcgtggtgtgcagcctgcctgcccggaccagcatcatcgctgctgccaaccctgtgggcggccactacaacaaggccaagacagtgtctgagaacctgaagatgggcagcgccctgctgagcagatttgacctggtgttcatcctgctggacaccccaaatgagcaccacgaccacctgctgtctgagcacgtgattgccatccgggccggcaagcagaggaccatcagcagcgccaccgtggccaggatgaacagccaggacagcaacacctctgtgctggaggtggtgtctgagaagcccctgtctgagcggctgaaggtggtgcctggagagaccatcgaccccatcccccaccagctgctgaggaagtacatcggctacgcccggcagtatgtgtacccccggctgagcacagaagctgcccgggtgctgcaggacttctacctggagctgaggaagcagagccagaggctgaacagcagccccatcaccacccggcagctggagagcctcatccggctgacagaggcccgggcccggctggagctgcgggaggaggccaccaaggaggatgctgaggacatcgtggagatcatgaagtacagcatgctgggcacctacagtgatgaatttggaaacctggactttgagaggagccagcacggcagcggcatgagcaacagaagcacagccaagcgcttcatcagcgccctgaacaacgtggccgagaggacctacaacaacatcttccagttccaccagctgcggcagatcgccaaggagctgaacatccaggtggccgactttgagaacttcatcggcagcctgaatgaccagggctacctgctgaagaagggccccaaggtgtaccagctgcagaccatgtag

SEQ ID NO: 99947 - DNA, 3715 bp, Artificial Sequence
  derived and/or modified sequence
ctttgagcggaagttggatcactgaagcgccaaaaaagaatttaggggaagacctgattttcgcttgaggcatttttgcggcgctgtgcgctacagacaccttctggaagctgcggtggggaaactgagtttcccgagccgttgagacagatggggttcagcaccgcgcggggacgacaggaaagctgcggctgaagagaactgcggacttggcaggagtcgcctgaggagctaagatcccggagactcttagccccgtggtgcttctctacgggagggagggagggagaatccggccggacagatctgcgcgtatcctggagccggcccagttgtgaactaggagagctttgggacctctgtcccaagcaagagagatgaatggagagtatagaggcagaggatttggacgaggaagatttcaaagctggaaaaggggaagaggtggtgggaacttctcaggaaaatggagagaaagagaacacagacctgatctgagtaaaaccacaggaaaacgtacttctgaacaaaccccacagtttttgctttcaacaaagaccccacagtcaatgcagtcaacattggatcgattcataccatataaaggctggaagctttatttctctgaagtttacagcgatagctctcctttgattgagaagattcaagcatttgaaaaatttttcacaaggcatattgatttgtatgacaaggatgaaatagaaagaaagggaagtattttggtagattttaaagaactgacagaaggtggtgaagtaactaacttgataccagatatagcaactgaactaagagatgcacctgagaaaaccttggcttgcatgggtttggcaatacatcaggtgttaactaaggaccttgaaaggcatgcagctgagttacaagcccaggaaggattgtctaatgatggagaaacaatggtaaatgtgccacatattcatgcaagggtgtacaactatgagcctttgacacagctcaagaatgtcagagcaaattactatggaaaatacattgctctaagagggacagtggttcgtgtcagtaatataaagcctctttgcaccaagatggcttttctttgtgctgcatgtggagaaattcagagctttcctcttccagatggaaaatacagtcttcccacaaagtgtcctgtgcctgtgtgtcgaggcaggtcatttactgctctccgcagctctcctctcacagttacgatggactggcagtcaatcaaaatccaggaattgatgtctgatgatcagagagaagcaggtcggattccacgaacaatagaatgtgagcttgttcatgatcttgtggatagctgtgtcccgggagacacagtgactattactggaattgtcaaagtctcaaatgcggaagaaggttctcgaaataagaatgacaagtgtatgttccttttgtatattgaagcaaattctattagtaatagcaaaggacagaaaacaaagagttctgaggatgggtgtaagcatggaatgttgatggagttctcacttaaagacctttatgccatccaagagattcaagctgaagaaaacctgtttaaactcattgtcaactcgctttgccctgtcatttttggtcatgaacttgttaaagcaggtttggcattagcactctttggaggaagccagaaatacgcagatgacaaaaacagaattccaattcggggagacccccacatccttgttgttggagatccaggcctaggaaaaagtcaaatgctacaggcagcgtgcaatgttgccccacgtggcgtgtatgtttgtggtaacaccacgaccacctctggtctgacggtaactctttcaaaagatagttcctctggagattttgctttggaagctggtgccctggtacttggtgatcaaggtatttgtggaatcgatgaatttgataagatggggaatcaacatcaagccttgttggaagccatggagcagcaaagtattagtcttgctaaggctggtgtggtttgtagccttcctgcaagaacttccattattgctgctgcaaatccagttggaggacattacaataaagccaaaacagtttctgagaatttaaaaatggggagtgcactactatccagatttgatttggtctttatcctgttagatactccaaatgagcatcatgatcacttactctctgaacatgtgattgcaataagagctggaaagcagagaaccattagcagtgccacagtagctcgtatgaatagtcaagattcaaatacttccgtacttgaagtagtttctgagaagccattatcagaaagactaaaggtggttcctggagaaacaatagatcccattccccaccagctattgagaaagtacattggctatgctcggcagtatgtgtacccaaggctatccacagaagctgctcgagttcttcaagatttttaccttgagctccggaaacagagccagaggttaaatagctcaccaatcactaccaggcagctggaatctttgattcgtctgacagaggcacgagcaaggttggaattgagagaggaagcaaccaaagaagacgctgaggatatagtggaaattatgaaatatagcatgctaggaacttactctgatgaatttgggaacctagattttgagcgatcccagcatggttctggaatgagcaacaggtcaacagcgaaaagatttatttctgctctcaacaacgttgctgaaagaacttataataatatatttcaatttcatcaacttcggcagattgccaaagaactaaacattcaggttgctgattttgaaaattttattggatcactaaatgaccagggttacctcttgaaaaaaggcccaaaagtttaccagcttcaaactatgtaaaaggacttcaccaagttagggcctcctgggtttattgcagattaaagccatctcagtgaagatatgcgtgcacgcacagacagacagacacacacacacacacacacacacacacacacacacacacacacagtcaaatactgttctctgaaaaatgatgtcccaaaagtattataataggaaaaaagcattaaatataataaactaatttaagaagtgataaagtctccagatgcagtagctcacactgtaatcacagtgactcaggaggctgaggtgagaggattccttgaggccagggttcgagaccaaccttgggcaacatagcaagaccccatttcttaaaaaaaaaaaaaaaaaatttaaacttagctgggtatggtggcacatgcctatagtctcagctacttgtgaggctgaggcaggaggattctttgagcccaggagtttgaggttacagtgagccacaatcacaccaatcactgcactccagcctgggcaataaagtaactcttgactcaaaaaaataaaaaaaattgtagtggtagccatgtgttaattgttaaataaattctccaaagggctaaaagtaaattacttataaattttttatagttgtatttttgacctgccttttatatgtatgaatatttcatagttttgcatatcagatgtaggcatacagacaaatacataaaccaatgaatatattacatattctgtgttccaataaaactttatttatggacactaaaatttgaatttcataaaattttcccatgtcaagaatacaaaatacttgagttttgttttta

SEQ ID NO: 99948 - DNA, 2523 bp, Artificial Sequence
  derived and/or modified sequence
atgaacggcgagtaccggggccggggcttcggccggggccggttccagtcatggaaacgcgggagaggcgggggcaacttcagcggcaagtggcgcgaaagggaacaccgccctgatttaagcaagacaacaggaaagaggacgagcgagcagaccccacagttccttctcagtacaaaaaccccccaaagtatgcaatctaccctcgaccggttcatcccatataagggctggaagctgtacttttcagaggtgtactccgattcctcaccactcatcgaaaaaatccaggcctttgaaaagtttttcactagacacatagacctgtacgataaagacgaaatcgaaaggaaagggtctatacttgtggacttcaaggaactcacagagggtggggaagtaacgaatttgattcctgacatcgcaaccgagctgagggacgcaccagagaaaaccctggcttgcatgggcctcgcgattcatcaggtcctgacaaaagatcttgagagacacgccgccgagttacaggcccaggaaggtctctctaacgatggggagaccatggtgaacgtgccacatatacacgctcgagtttataattatgaacctctgacacagttaaagaatgtgcgagctaactattacggtaaatacatcgccttacgaggaacggtggtccgggtgagcaatatcaaacctctttgcactaagatggcattcctttgtgcagcttgcggcgaaatccagagctttccgctgcctgatggaaaatactcattacctacgaagtgccccgtaccagtttgtaggggccggagttttacagctctgcgctcgtctcccttaactgtcactatggactggcaatctatcaaaattcaggagctgatgagtgatgaccagcgagaagcaggtaggattcccagaaccatcgagtgcgagttggtgcacgacttggttgactcatgcgtacctggtgatactgttacaatcacaggaatcgtaaaagtaagcaatgccgaagagggaagccggaacaagaatgacaaatgcatgttccttctgtacatcgaggccaattctataagcaattcaaaggggcagaagaccaagagttctgaggatggatgcaagcatggaatgctgatggagttctccttgaaggacttatacgccattcaggagattcaggcggaggaaaatctgttcaagttaattgtcaattctctctgccctgtgatttttgggcacgagctcgtgaaagctggtctggctctggccctgtttgggggtagccagaagtacgccgatgataagaaccggatacctattcgaggcgaccctcatatactggttgtcggtgatcctggactgggcaagagccagatgttgcaggctgcttgtaatgtggccccccggggcgtgtatgtgtgtggcaacacaaccactacatcgggcctgactgttacgttgtctaaagactccagttcgggcgactttgcactcgaagcaggcgccctggtgctgggggaccaagggatttgtggaatcgacgagttcgacaaaatggggaaccagcatcaagctcttctcgaggctatggaacagcagtcaattagtctggcaaaagctggggtggtgtgctcattgccagctagaacttctataatcgcagccgctaaccctgtcgggggtcactacaacaaggcaaagacagtgagtgagaacctgaagatgggaagtgccttgctttctcggtttgacctcgttttcatcctcttggatactccgaatgagcaccatgatcacctgttatcagagcatgtgatagcaattagggccggcaagcagagaaccatttcaagcgctacagtggccaggatgaactctcaggactctaacacaagtgttctggaggtggtcagtgaaaagccactgagcgagcgcctgaaagtggtgcctggggagacgattgaccccatcccacatcaactcttaagaaaatacatcggttatgccaggcagtatgtctacccgagactcagcactgaggccgccagggtcctgcaggacttctacctggaactgcgcaagcagtcccagcgcctgaactcctccccaatcactacccggcagctggagtctctgataagattgacagaagcccgagcccgtctagaattgcgcgaagaggccaccaaggaggatgcagaggatatagttgaaattatgaaatactctatgcttggtacatattcagatgagttcggcaatcttgatttcgaaagatctcagcatggctccggtatgagcaatagatctacagctaaaagattcataagcgctctcaataatgtcgccgaaagaacttataataacatatttcagttccaccagctgcgccagattgctaaagagcttaatatccaagtcgctgattttgagaattttatcggcagtctgaatgatcaggggtacctcttgaagaaaggacccaaggtgtatcagttacagacaatgtag

SEQ ID NO: 99949 - DNA, 2523 bp, Artificial Sequence
  derived and/or modified sequence
atgaacggagaatacagggggaggggttttggaaggggacgtttccagtcctggaagcgaggacggggaggcggtaatttctcaggcaaatggagagaaagggagcatcggccagatctcagcaagacaaccggaaagcgcacatcagaacagactccccagttccttctcagcactaaaactcctcaatccatgcagtctacacttgatagattcattccctacaaggggtggaagctgtactttagcgaagtgtatagtgacagcagccccctgatcgagaaaatacaagcgtttgagaaattttttacgcggcacatcgacctgtatgacaaagacgagattgaaaggaagggcagcattttggtagatttcaaagagctaacagaggggggagaagtcacgaatttgatccccgacatcgcaacagaactcagagacgcccctgagaaaaccttagcttgcatggggctggcaatccaccaggtcctgacaaaagacctagagcggcacgccgctgaactgcaggcccaggagggcctgtcaaatgacggggagaccatggtgaatgtgcctcacattcacgcacgagtgtacaattacgaaccgctcacgcagctgaagaacgttcgggctaactactacggcaagtatatagccctgcgcggaaccgtagtccgcgtctccaatataaaacccttatgcacgaagatggctttcctgtgcgcagcctgtggggaaatccagtcatttccactgcctgacgggaagtattccctaccaaccaagtgccccgttccagtgtgtaggggacgcagctttactgcgctgcgatcgtcacccctcaccgtaacaatggattggcaaagcattaagatccaagagctgatgtccgacgatcagcgtgaggccggaagaattccaaggaccatcgagtgtgagctggtccatgaccttgttgattcttgtgtgcccggtgacacagtgaccatcactgggattgtcaaagtatccaatgcagaggagggctcgcggaataaaaatgacaaatgtatgttcttgctgtacatcgaagcaaatagtataagcaactcgaaaggacaaaaaactaaatcctccgaggacgggtgtaaacatggaatgctcatggaattcagcctaaaagacctttacgcaatccaggaaatccaggccgaagaaaacttatttaaattaatagtgaactccttgtgccctgtgatatttgggcacgaattggtgaaagccggactcgccttagcactctttgggggatcacagaagtacgctgatgataaaaataggattcctatacggggagatcctcatatcctagttgttggggaccctgggctcggcaagtctcagatgctgcaggccgcttgcaacgtcgcgcctcgcggagtatacgtttgtggcaatacgaccaccacaagtggcctcacagttactctgtctaaggactcctcctcgggcgatttcgctctagaagcgggtgcactcgtgctgggcgaccagggcatctgcggcattgatgagttcgataagatgggcaatcagcaccaggccttgcttgaagctatggagcagcaaagtatctccctggccaaggcaggagtcgtctgttccctgcctgcgcgaacctctattattgctgccgcaaatcctgtagggggacactataacaaagccaaaacagtgtcagaaaatttaaagatgggctccgcgctgctgtctcggtttgatttagtcttcatcctcctagacactcctaacgaacatcatgatcatctgctctcagagcatgtaatcgccataagggcaggcaagcaaagaacaattagttcagccacagttgccagaatgaatagccaggattcgaatacatcagtgttggaggtggtgagtgagaagccactcagcgagagactcaaggtggtccccggagagactattgacccgatccctcaccagttattacgaaagtacatcggctatgcgcgacagtatgtctacccacgcctctccacagaagccgcacgagtgttacaggacttttatctcgagctgcggaagcaaagccaaaggttgaatagtagtcctatcaccactagacagctcgaatctctgatccggctgaccgaagcacgtgcccgactggaacttagagaggaggctaccaaagaggacgccgaggatatagtggagatcatgaaatattcgatgcttggcacatattccgacgagtttggcaatctagactttgaaaggtcccagcatggtagcggtatgagtaatcggtccacagcgaagcgattcatcagtgcacttaataacgtggctgagaggacctacaataatatcttccagttccatcaactcagacagatcgccaaagaactgaatatccaggtggcggatttcgaaaatttcataggctcccttaatgatcagggatacctgctgaagaagggccctaaagtatatcaattgcagactatgtag

SEQ ID NO: 99950 - DNA, 2523 bp, Artificial Sequence
  derived and/or modified sequence
atgaacggcgagtacagaggcagaggcttcggcagaggcagattccagagctggaagagaggcagaggcggcggcaacttcagcggcaagtggagagagagagagcacagacccgacctgagcaagaccaccggcaagagaaccagcgagcagaccccccagttcctgctgagcaccaagaccccccagagcatgcagagcaccctggacagattcatcccctacaagggctggaagctgtacttcagcgaggtgtacagcgacagcagccccctgatcgagaagatccaggccttcgagaagttcttcaccagacacatcgacctgtacgacaaggacgagatcgagagaaagggcagcatcctggtggacttcaaggagctgaccgagggcggcgaggtgaccaacctgatccccgacatcgccaccgagctgagagacgcccccgagaagaccctggcctgcatgggcctggccatccaccaggtgctgaccaaggacctggagagacacgccgccgagctgcaggcccaggagggcctgagcaacgacggcgagaccatggtgaacgtgccccacatccacgccagagtgtacaactacgagcccctgacccagctgaagaacgtgagagccaactactacggcaagtacatcgccctgagaggcaccgtggtgagagtgagcaacatcaagcccctgtgcaccaagatggccttcctgtgcgccgcctgcggcgagatccagagcttccccctgcccgacggcaagtacagcctgcccaccaagtgccccgtgcccgtgtgcagaggcagaagcttcaccgccctgagaagcagccccctgaccgtgaccatggactggcagagcatcaagatccaggagctgatgagcgacgaccagagagaggccggcagaatccccagaaccatcgagtgcgagctggtgcacgacctggtggacagctgcgtgcccggcgacaccgtgaccatcaccggcatcgtgaaggtgagcaacgccgaggagggcagcagaaacaagaacgacaagtgcatgttcctgctgtacatcgaggccaacagcatcagcaacagcaagggccagaagaccaagagcagcgaggacggctgcaagcacggcatgctgatggagttcagcctgaaggacctgtacgccatccaggagatccaggccgaggagaacctgttcaagctgatcgtgaacagcctgtgccccgtgatcttcggccacgagctggtgaaggccggcctggccctggccctgttcggcggcagccagaagtacgccgacgacaagaacagaatccccatcagaggcgacccccacatcctggtggtgggcgaccccggcctgggcaagagccagatgctgcaggccgcctgcaacgtggcccccagaggcgtgtacgtgtgcggcaacaccaccaccaccagcggcctgaccgtgaccctgagcaaggacagcagcagcggcgacttcgccctggaggccggcgccctggtgctgggcgaccagggcatctgcggcatcgacgagttcgacaagatgggcaaccagcaccaggccctgctggaggccatggagcagcagagcatcagcctggccaaggccggcgtggtgtgcagcctgcccgccagaaccagcatcatcgccgccgccaaccccgtgggcggccactacaacaaggccaagaccgtgagcgagaacctgaagatgggcagcgccctgctgagcagattcgacctggtgttcatcctgctggacacccccaacgagcaccacgaccacctgctgagcgagcacgtgatcgccatcagagccggcaagcagagaaccatcagcagcgccaccgtggccagaatgaacagccaggacagcaacaccagcgtgctggaggtggtgagcgagaagcccctgagcgagagactgaaggtggtgcccggcgagaccatcgaccccatcccccaccagctgctgagaaagtacatcggctacgccagacagtacgtgtaccccagactgagcaccgaggccgccagagtgctgcaggacttctacctggagctgagaaagcagagccagagactgaacagcagccccatcaccaccagacagctggagagcctgatcagactgaccgaggccagagccagactggagctgagagaggaggccaccaaggaggacgccgaggacatcgtggagatcatgaagtacagcatgctgggcacctacagcgacgagttcggcaacctggacttcgagagaagccagcacggcagcggcatgagcaacagaagcaccgccaagagattcatcagcgccctgaacaacgtggccgagagaacctacaacaacatcttccagttccaccagctgagacagatcgccaaggagctgaacatccaggtggccgacttcgagaacttcatcggcagcctgaacgaccagggctacctgctgaagaagggccccaaggtgtaccagctgcagaccatgtag

SEQ ID NO: 99951 - protein, 880 aa, Artificial Sequence
  derived and/or modified sequence
MNGEYRGRGFGRGRFQSWKRGRGGGNFSGKWREREHRPDLSKTTGKRTSEQTPQFLLSTKTPQSMQSTLDRFIPYKGWKLYFSEVYSDSSPLIEKIQAFEKFFTRHIDLYDKDEIERKGSILVDFKELTEGGEVTNLIPDIATELRDAPEKTLACMGLAIHQVLTKDLERHAAELQAQEGLSNDGETMVNVPHIHARVYNYEPLTQLKNVRANYYGKYIALRGTVVRVSNIKPLCTKMAFLCAACGEIQSFPLPDGKYSLPTKCPVPVCRGRSFTALRSSPLTVTMDWQSIKIQELMSDDQREAGRIPRTIECELVHDLVDSCVPGDTVTITGIVKVSNAEEGSRNKNDKCMFLLYIEANSISNSKGQKTKSSEDGCKHGMLMEFSLKDLYAIQEIQAEENLFKLIVKWSLALSPRLEYSGAISAHCNLHLPSSNSSPTSACRVAGTTGMRHQTQLLLLVKAGLALALFGGSQKYADDKNRIPIRGDPHILVVGDPGLGKSQMLQAACNVAPRGVYVCGNTTTTSGLTVTLSKDSSSGDFALEAGALVLGDQGICGIDEFDKMGNQHQALLEAMEQQSISLAKAGVVCSLPARTSIIAAANPVGGHYNKAKTVSENLKMGSALLSRFDLVFILLDTPNEHHDHLLSEHVIAIRAGKQRTISSATVARMNSQDSNTSVLEVVSEKPLSERLKVVPGETIDPIPHQLLRKYIGYARQYVYPRLSTEAARVLQDFYLELRKQSQRLNSSPITTRQLESLIRLTEARARLELREEATKEDAEDIVEIMKYSMLGTYSDEFGNLDFERSQHGSGMSNRSTAKRFISALNNVAERTYNNIFQFHQLRQIAKELNIQVADFENFIGSLNDQGYLLKKGPKVYQLQTM

SEQ ID NO: 99952 - DNA, 2643 bp, Artificial Sequence
  derived and/or modified sequence
atgaacggagaataccggggaagaggcttcggaagaggacgctttcagtcttggaagagggggcggggagggggaaacttctctgggaagtggcgagagcgcgaacacagaccagatttgagcaaaaccacagggaagcgcacctctgaacagacaccccaattcctgctatccacaaagactcctcagtccatgcagagcaccctggaccggtttatcccctataaggggtggaagctctatttttcagaggtgtactcggattctagcccccttatcgagaaaatccaggcgtttgaaaagttcttcactagacacatcgatttatatgacaaagatgagatcgagcggaagggtagcatcctcgtagactttaaggaactcaccgagggcggcgaagtaaccaatctgatccctgatatcgccaccgaactccgcgacgccccggagaaaactctagcctgtatgggcttagcaatccatcaggtcctgacgaaagacctcgaaagacacgcggctgagttgcaagcacaggaaggacttagcaacgacggtgagacaatggtgaacgtccctcatatccacgctagagtttataactacgagccactgactcaactgaagaacgtacgggctaactattacggcaagtatattgccttgcgcggtacagtcgtcagagtgtccaacatcaaacctctctgtactaagatggccttcctctgtgccgcatgcggagaaatccagagctttcctttgccagatggtaagtactcccttccaaccaagtgtccggtgcctgtgtgtcgggggagaagcttcacggcactccgatcatcaccactgaccgtcacaatggattggcagagtattaagattcaggagcttatgagcgacgatcagcgggaggcgggtcggatcccacgcaccatcgagtgcgaactcgttcatgacctggttgacagctgcgtgcctggcgatacagttactatcactggcatagttaaagtcagcaacgcagaagaaggctcccgaaacaagaatgataaatgtatgttcctcctttacatagaagccaattccatctctaattccaagggacagaagaccaagtcgagtgaggacggctgtaagcacggcatgctcatggagttctccctcaaagacctgtatgcaatccaggagatccaggcagaagagaacctgttcaaactgattgtcaaatggtcccttgccttgtcaccccgtttggagtactccggagcaatatctgctcattgcaatctgcacctcccgagttcaaactcctcacctacatccgcttgtagggttgctggtacaaccggcatgcgccaccagactcagctcctgctattggtgaaggctggactggccctggccctgtttggaggttcgcaaaaatacgccgacgataagaaccgaatcccgattcggggggatcctcacatccttgttgtaggagatcctggtctggggaagagccagatgctgcaggccgcatgtaatgttgccccaagaggagtgtatgtttgcggaaataccacaactactagtgggctgacagtcaccctgtctaaagatagctccagtggcgactttgcgttagaggctggagctctcgtactcggggatcagggaatctgcggaattgatgagttcgacaagatgggcaaccagcaccaggcactcctggaggccatggagcagcaaagtatttcactagcgaaagcgggagtggtgtgctccctgccagctcgaacgagcatcatcgccgctgcaaatcctgtcggaggtcactataataaggcaaagaccgttagtgaaaacctcaaaatgggcagtgcactactctctagattcgacctagtattcatactgctggatacccccaacgaacaccatgatcatctgcttagcgaacacgtgatcgcaatccgggcagggaagcagcgtactatttcatccgcaacagttgcccgcatgaattcccaggatagcaacactagcgtgctcgaggtggtctccgaaaaacctctttccgagcgtctgaaagtggtccccggagaaacaattgaccccatcccccatcaactactgcggaagtacatcggctacgctagacagtatgtctatccaaggttgtctactgaagctgcacgcgttctccaagatttttacctggaacttcgcaagcaaagccagcgtctcaacagcagcccgattaccaccagacagctcgagtcattgattagactcacagaagctagggcacgcctagaactgcgagaagaggcaacaaaagaagatgccgaggatatcgtggaaataatgaagtactctatgcttgggacctattccgacgagttcggcaatctggacttcgagcgatcccagcatggcagcggaatgagcaacagatccacagctaaacggtttatttccgcgctgaataatgtggcggagaggacatataacaatatatttcagttccatcagttaaggcagattgctaaggagctgaatatacaggtggccgactttgaaaacttcatcgggagtctgaacgaccagggctaccttttgaagaagggaccaaaggtgtaccagcttcaaacaatgtag

SEQ ID NO: 99953 - DNA, 2643 bp, Artificial Sequence
  derived and/or modified sequence
atgaatggagagtaccggggccggggcttcggccggggccgcttccagagctggaagaggggccggggcggcggcaacttcagcggcaagtggagggagcgggagcacaggccagacctgagcaagaccaccgggaagaggaccagcgagcagaccccccagttcctgctgagcaccaagaccccccagagcatgcagagcaccctggaccgcttcatcccctacaagggctggaagctgtacttcagcgaggtgtacagcgacagcagccccctgattgagaagatccaggcctttgagaagttcttcaccaggcacatcgacctgtatgacaaggatgaaattgaaaggaagggcagcatcctggtggacttcaaggagctgacagaaggaggagaggtgaccaacctgatcccagacatcgccacagagctgagagatgcccctgagaagaccctggcctgcatgggcctggccatccaccaggtgctgaccaaggacctggagagacatgctgctgagctgcaggcccaggagggcctgagcaatgatggagagaccatggtgaatgtgccccacatccacgcccgggtgtacaactatgagcccctgacccagctgaagaatgtgcgggccaactactacggcaagtacatcgccctgcggggcaccgtggtgcgggtgagcaacatcaagcccctgtgcaccaagatggccttcctgtgtgccgcctgtggggagatccagagcttccccctgcctgatggcaagtacagcctgcccaccaagtgccctgtgcctgtgtgccggggccgctccttcaccgccctgcggagcagccccctgactgtgaccatggactggcagagcatcaagatccaggagctgatgtctgatgaccagcgggaggccggccgcatccccaggaccattgaatgtgagctggtgcatgacctggtggacagctgtgtgcctggggacacagtgaccatcaccggcatcgtgaaggtgtccaatgctgaggagggcagcaggaacaagaatgacaagtgcatgttcctgctgtacatcgaggccaacagcatcagcaacagcaagggccagaagaccaagagcagtgaagatggctgcaagcacggcatgctgatggagttcagcctgaaggacctgtatgccatccaggagatccaggccgaggagaacctcttcaagctgattgtgaagtggagcctggccctgagcccccggctggagtacagcggggccatcagcgcccactgcaacctgcacctgcccagcagcaacagcagccccaccagcgcctgccgggtggccggcaccaccggcatgaggcaccagacccagctgctgctgctggtgaaggccggcctggccctggccctgtttggaggcagccagaagtatgcagatgacaagaaccgcatccccatccggggggacccccacatcctggtggtgggggaccccggcctgggcaagagccagatgctgcaggccgcctgcaatgtggccccccggggcgtgtatgtgtgtggcaacaccaccaccaccagcggcctgactgtgaccctgagcaaggacagcagcagcggggactttgccctggaggccggggccctggtgctgggggaccagggcatctgtggcattgatgaatttgacaagatgggcaaccagcaccaggccctgctggaggccatggagcagcagagcatcagcctggccaaggccggcgtggtgtgcagcctgcctgcccggaccagcatcatcgctgctgccaaccctgtgggcggccactacaacaaggccaagacagtgtctgagaacctgaagatgggcagcgccctgctgagcagatttgacctggtgttcatcctgctggacaccccaaatgagcaccacgaccacctgctgtctgagcacgtgattgccatccgggccggcaagcagaggaccatcagcagcgccaccgtggccaggatgaacagccaggacagcaacacctctgtgctggaggtggtgtctgagaagcccctgtctgagcggctgaaggtggtgcctggagagaccatcgaccccatcccccaccagctgctgaggaagtacatcggctacgcccggcagtatgtgtacccccggctgagcacagaagctgcccgggtgctgcaggacttctacctggagctgaggaagcagagccagaggctgaacagcagccccatcaccacccggcagctggagagcctcatccggctgacagaggcccgggcccggctggagctgcgggaggaggccaccaaggaggatgctgaggacatcgtggagatcatgaagtacagcatgctgggcacctacagtgatgaatttggaaacctggactttgagaggagccagcacggcagcggcatgagcaacagaagcacagccaagcgcttcatcagcgccctgaacaacgtggccgagaggacctacaacaacatcttccagttccaccagctgcggcagatcgccaaggagctgaacatccaggtggccgactttgagaacttcatcggcagcctgaatgaccagggctacctgctgaagaagggccccaaggtgtaccagctgcagaccatgtag

SEQ ID NO: 99954 - DNA, 2859 bp, Artificial Sequence
  derived and/or modified sequence
aactgcggacttggcaggagtcgcctgaggagctaagatcccggagactcttagccccgtggtgcttctctacgggagggagggagggagaatccggccggacagatctgcgcgtatcctggagccggcccagttgtgaactaggagagctttgggacctctgtcccaagcaagagagatgaatggagagtatagaggcagaggatttggacgaggaagatttcaaagctggaaaaggggaagaggtggtgggaacttctcaggaaaatggagagaaagagaacacagacctgatctgagtaaaaccacaggaaaacgtacttctgaacaaaccccacagtttttgctttcaacaaagaccccacagtcaatgcagtcaacattggatcgattcataccatataaaggctggaagctttatttctctgaagtttacagcgatagctctcctttgattgagaagattcaagcatttgaaaaatttttcacaaggcatattgatttgtatgacaaggatgaaatagaaagaaagggaagtattttggtagattttaaagaactgacagaaggtggtgaagtaactaacttgataccagatatagcaactgaactaagagatgcacctgagaaaaccttggcttgcatgggtttggcaatacatcaggtgttaactaaggaccttgaaaggcatgcagctgagttacaagcccaggaaggattgtctaatgatggagaaacaatggtaaatgtgccacatattcatgcaagggtgtacaactatgagcctttgacacagctcaagaatgtcagagcaaattactatggaaaatacattgctctaagagggacagtggttcgtgtcagtaatataaagcctctttgcaccaagatggcttttctttgtgctgcatgtggagaaattcagagctttcctcttccagatggaaaatacagtcttcccacaaagtgtcctgtgcctgtgtgtcgaggcaggtcatttactgctctccgcagctctcctctcacagttacgatggactggcagtcaatcaaaatccaggaattgatgtctgatgatcagagagaagcaggtcggattccacgaacaatagaatgtgagcttgttcatgatcttgtggatagctgtgtcccgggagacacagtgactattactggaattgtcaaagtctcaaatgcggaagaaggttctcgaaataagaatgacaagtgtatgttccttttgtatattgaagcaaattctattagtaatagcaaaggacagaaaacaaagagttctgaggatgggtgtaagcatggaatgttgatggagttctcacttaaagacctttatgccatccaagagattcaagctgaagaaaacctgtttaaactcattgtcaaatggagtcttgctctgtcgcccaggctagagtacagtggtgcgatctcagctcactgcaacctccacctcccaagttcaaacagttctcccacctcagcctgccgagtagctgggactacaggcatgcgccaccagacccagctacttttgcttgttaaagcaggtttggcattagcactctttggaggaagccagaaatacgcagatgacaaaaacagaattccaattcggggagacccccacatccttgttgttggagatccaggcctaggaaaaagtcaaatgctacaggcagcgtgcaatgttgccccacgtggcgtgtatgtttgtggtaacaccacgaccacctctggtctgacggtaactctttcaaaagatagttcctctggagattttgctttggaagctggtgccctggtacttggtgatcaaggtatttgtggaatcgatgaatttgataagatggggaatcaacatcaagccttgttggaagccatggagcagcaaagtattagtcttgctaaggctggtgtggtttgtagccttcctgcaagaacttccattattgctgctgcaaatccagttggaggacattacaataaagccaaaacagtttctgagaatttaaaaatggggagtgcactactatccagatttgatttggtctttatcctgttagatactccaaatgagcatcatgatcacttactctctgaacatgtgattgcaataagagctggaaagcagagaaccattagcagtgccacagtagctcgtatgaatagtcaagattcaaatacttccgtacttgaagtagtttctgagaagccattatcagaaagactaaaggtggttcctggagaaacaatagatcccattccccaccagctattgagaaagtacattggctatgctcggcagtatgtgtacccaaggctatccacagaagctgctcgagttcttcaagatttttaccttgagctccggaaacagagccagaggttaaatagctcaccaatcactaccaggcagctggaatctttgattcgtctgacagaggcacgagcaaggttggaattgagagaggaagcaaccaaagaagacgctgaggatatagtggaaattatgaaatatagcatgctaggaacttactctgatgaatttgggaacctagattttgagcgatcccagcatggttctggaatgagcaacaggtcaacagcgaaaagatttatttctgctctcaacaacgttgctgaaagaacttataataatatatttcaatttcatcaacttcggcagattgccaaagaactaaacattcaggttgctgattttgaaaattttattggatcactaaatgaccagggttacctcttgaaaaaaggcccaaaagtttaccagcttcaaactatgtaaaaggacttcaccaagttagggcctcctgggtttattgc

SEQ ID NO: 99955 - DNA, 2643 bp, Artificial Sequence
  derived and/or modified sequence
atgaacggcgagtaccggggccggggcttcggccggggccggttccagagctggaaaagggggagggggggcggcaacttcagcggaaagtggcgcgagcgggagcaccggcccgatttgtcaaagacaactggcaagagaacgagtgaacagacaccacaatttctcctgtccactaagacaccgcagagcatgcagagcacattggatcggttcattccctataaggggtggaaactatatttttcagaggtttactctgacagctctccactgatcgaaaagatccaagcctttgaaaagtttttcacaaggcacatcgatctgtatgacaaggatgagattgaaaggaaaggctcaattctggtcgactttaaagaactcacagaagggggcgaggtgactaacctgattcctgatattgcaaccgaactgcgggacgcgcccgaaaagacactcgcttgtatgggtctggcaatccatcaggttctgactaaggatctggaacgccatgcagccgagctgcaggctcaagaagggctgagtaacgacggggaaacaatggtcaacgttcctcatatacatgctcgggtctacaattatgagcctttaactcagctgaagaacgtaagggccaattattatggtaaatatatcgcattgagagggactgtcgtcagagtgagcaacattaaacccctgtgcaccaagatggccttcttatgtgcagcttgtggcgaaatccagagttttcctttaccagacggaaaatactctctgcccacaaaatgcccggtcccagtgtgccggggtagatccttcactgccctccgctcgagtcccttgacggtgacaatggattggcagtctatcaaaattcaggaactgatgagcgacgatcagcgcgaggcgggacgcattccgagaacgatcgagtgcgaactggtacacgacctggtcgactcatgcgttcccggtgacacggtcacaattacaggaattgtgaaagtcagcaacgctgaagaagggtctcggaataaaaacgataaatgtatgttccttctgtacatcgaagctaatagtatttctaatagcaagggccaaaagacaaaatcttctgaagacggttgcaagcatggaatgttgatggagttctctctgaaggatctctatgcaattcaggagatccaggccgaagagaatttgttcaaactgatagttaaatggagtctcgcactgagccctcgcctggagtactccggggctatctccgcacattgtaatctccacctgcctagttccaattcctcaccaactagcgcttgccgcgttgctggaaccaccgggatgcggcatcaaactcagcttctgctgctggtgaaggcagggttggcactcgctctgttcggaggatcgcagaaatacgcagatgataagaaccgcatccccatccggggagacccccacatcctggttgtcggcgacccaggacttggaaagtctcaaatgctgcaggcggcatgtaatgttgccccaagaggcgtgtacgtctgcggcaacaccaccacaacaagcggcctgacagtcaccctttctaaagattcatcgagcggggactttgccctggaagccggcgccttggtgttgggcgatcaaggaatatgcggtatagacgagtttgataaaatgggcaaccagcatcaggcacttctggaggctatggaacagcaaagtatcagtctggccaaggcaggcgtcgtatgttctctcccagctaggaccagcatcatcgctgccgctaaccctgttggcggccactacaataaagccaagaccgtgtccgagaatctgaaaatgggttctgctctcttgagcaggtttgacttagtttttatcttgctcgatacacccaatgaacaccacgatcaccttctgagtgaacatgtaatagcaattcgagccggaaagcagcggaccataagctctgcaaccgtggcacgtatgaactcacaagactctaatactagcgttctagaagtggtgtccgagaaaccacttagtgaaaggctgaaggtggtccctggggaaaccattgacccaattcctcatcagctgctgagaaagtacataggctatgctagacaatacgtgtatcccagactctctacagaagctgcaagagtcttgcaggacttctaccttgagttgcgtaagcaatctcagagactcaattcatcccccataaccacgcgccagctcgagtcattaatcagactgacggaagcccgcgctcgactcgagctccgagaggaagccaccaaggaggatgccgaggacatagtggagataatgaaatattcaatgctcggtacatactccgacgaattcggaaatctggactttgaaagatcccagcatggctccggcatgagcaataggagcacagccaagcgatttatttccgccttgaacaacgtggcggagaggacctacaataacatatttcagttccatcagctgagacagatagcgaaggagctgaatatacaggttgcagatttcgagaacttcataggatctcttaacgatcagggctacctccttaagaaagggcctaaggtctatcagctgcagacaatgtag

SEQ ID NO: 99956 - DNA, 2643 bp, Artificial Sequence
  derived and/or modified sequence
atgaacggtgaatataggggacgtgggtttggcagaggacggttccaatcctggaagcggggtcggggaggaggaaatttcagcggaaagtggagggagcgggagcaccggccagatctgtcaaagaccactggcaaaaggacctcggaacagacgccccagttcctgctgtccaccaagactcctcaaagcatgcagtcaactctcgaccgctttattccatacaagggttggaagctgtacttcagtgaggtgtattctgattcaagcccactcatcgagaaaattcaggccttcgaaaaattcttcacgcggcacatcgacctatacgacaaagatgagattgagcgaaaggggagtatcctggtggattttaaagagctgaccgaaggcggagaggtgacaaacctgattccagacattgctacggagctgcgcgatgctccagaaaagacgctggcttgcatgggcctggctattcaccaggttctgacaaaggacctagagaggcacgccgcagagcttcaggcccaggagggcttgtccaatgacggcgagactatggttaatgtaccccacatccacgccagggtgtacaattatgagcccctgacccagctcaagaatgtgagggctaattattatggaaaatatatcgcacttcggggtaccgtggtgagggtgtctaacatcaagcccctgtgtacaaaaatggcctttctgtgtgccgcatgcggcgagatccagtcctttcctctgcccgacggtaaatattccttaccgaccaagtgccctgtccctgtgtgccggggaaggtcttttacagctctccgctcaagccccttaacggtcaccatggactggcagtcaattaaaatacaagagttaatgtccgatgaccagagggaggccggtcgcatacccagaacaatcgagtgtgagctcgtgcacgacctcgtggactcctgtgtgcctggagatacagtgactattacagggatcgtgaaggtttcaaacgccgaggagggaagcaggaataaaaacgacaaatgcatgttcctgctctacattgaggccaactctatctcgaactcaaaaggccagaagactaaatcttcagaagatgggtgcaagcatgggatgcttatggaatttagtctcaaagatctctacgccatccaggagattcaagctgaggagaacctcttcaagttgatcgtcaaatggtcacttgccctttcccctcggctcgagtattcaggggctatatccgcccattgtaacctgcacctgccatcgtcaaactcctcgcccaccagcgcctgccgcgtcgccggtactactggcatgcgccatcaaacccagctcttactgcttgtgaaagctggactcgcacttgccctttttggaggtagtcaaaaatacgctgacgacaagaaccgcattcctatccgaggggacccacatattctggtcgtgggcgatcccggactcggaaagagccaaatgctacaggccgcttgcaatgtcgccccaaggggcgtgtacgtatgcggaaatacaactaccaccagtggactcaccgttaccttgagcaaagatagcagctcaggcgatttcgccctggaggcaggagccctcgtgctgggtgaccagggaatttgcggaatagacgaatttgacaaaatgggaaaccagcaccaggcactgctcgaggcgatggaacagcagtcgatctctctggccaaggccggagtagtgtgttctttacccgctcgcactagcatcattgccgcagctaaccctgttggaggccattacaacaaggctaaaacggtgtcagaaaaccttaaaatgggctccgcacttttaagtcgcttcgacctggtgttcatcttgctggacactcccaacgagcatcacgaccacctcttgtctgagcacgtgatcgccatccgggcaggcaagcagagaacaattagctcagcaactgtggcaagaatgaactctcaggattctaacacatccgtgcttgaggttgtgtcagaaaagcccctgagcgaaagactcaaggtggtgcccggagagaccattgatccaattcctcaccagttgctacgaaagtatatagggtacgcccgacagtatgtttatcccaggctgtctaccgaggcagctcgcgtactccaggacttttaccttgaactgcggaaacaatcgcaacgcctgaactcatctcccattaccacccggcagctagaatcgctgataaggctgaccgaagccagggccaggcttgaattacgggaggaagcaacaaaggaagatgctgaggatattgtggaaattatgaagtacagtatgctggggacatactcagacgagttcggcaaccttgactttgagcgtagccaacacggatcagggatgtctaacaggtccacagcaaaacgctttatcagcgccctgaacaatgttgccgaacgtacctacaacaatatttttcaattccaccagctgcgccagatcgccaaggagctcaacattcaagttgcagactttgaaaacttcataggtagcctgaacgaccaaggttatctgctcaagaaaggcccaaaagtctaccagcttcaaaccatgtag

SEQ ID NO: 99957 - DNA, 2643 bp, Artificial Sequence
  derived and/or modified sequence
atgaacggcgagtacagaggcagaggcttcggcagaggcagattccagagctggaagagaggcagaggcggcggcaacttcagcggcaagtggagagagagagagcacagacccgacctgagcaagaccaccggcaagagaaccagcgagcagaccccccagttcctgctgagcaccaagaccccccagagcatgcagagcaccctggacagattcatcccctacaagggctggaagctgtacttcagcgaggtgtacagcgacagcagccccctgatcgagaagatccaggccttcgagaagttcttcaccagacacatcgacctgtacgacaaggacgagatcgagagaaagggcagcatcctggtggacttcaaggagctgaccgagggcggcgaggtgaccaacctgatccccgacatcgccaccgagctgagagacgcccccgagaagaccctggcctgcatgggcctggccatccaccaggtgctgaccaaggacctggagagacacgccgccgagctgcaggcccaggagggcctgagcaacgacggcgagaccatggtgaacgtgccccacatccacgccagagtgtacaactacgagcccctgacccagctgaagaacgtgagagccaactactacggcaagtacatcgccctgagaggcaccgtggtgagagtgagcaacatcaagcccctgtgcaccaagatggccttcctgtgcgccgcctgcggcgagatccagagcttccccctgcccgacggcaagtacagcctgcccaccaagtgccccgtgcccgtgtgcagaggcagaagcttcaccgccctgagaagcagccccctgaccgtgaccatggactggcagagcatcaagatccaggagctgatgagcgacgaccagagagaggccggcagaatccccagaaccatcgagtgcgagctggtgcacgacctggtggacagctgcgtgcccggcgacaccgtgaccatcaccggcatcgtgaaggtgagcaacgccgaggagggcagcagaaacaagaacgacaagtgcatgttcctgctgtacatcgaggccaacagcatcagcaacagcaagggccagaagaccaagagcagcgaggacggctgcaagcacggcatgctgatggagttcagcctgaaggacctgtacgccatccaggagatccaggccgaggagaacctgttcaagctgatcgtgaagtggagcctggccctgagccccagactggagtacagcggcgccatcagcgcccactgcaacctgcacctgcccagcagcaacagcagccccaccagcgcctgcagagtggccggcaccaccggcatgagacaccagacccagctgctgctgctggtgaaggccggcctggccctggccctgttcggcggcagccagaagtacgccgacgacaagaacagaatccccatcagaggcgacccccacatcctggtggtgggcgaccccggcctgggcaagagccagatgctgcaggccgcctgcaacgtggcccccagaggcgtgtacgtgtgcggcaacaccaccaccaccagcggcctgaccgtgaccctgagcaaggacagcagcagcggcgacttcgccctggaggccggcgccctggtgctgggcgaccagggcatctgcggcatcgacgagttcgacaagatgggcaaccagcaccaggccctgctggaggccatggagcagcagagcatcagcctggccaaggccggcgtggtgtgcagcctgcccgccagaaccagcatcatcgccgccgccaaccccgtgggcggccactacaacaaggccaagaccgtgagcgagaacctgaagatgggcagcgccctgctgagcagattcgacctggtgttcatcctgctggacacccccaacgagcaccacgaccacctgctgagcgagcacgtgatcgccatcagagccggcaagcagagaaccatcagcagcgccaccgtggccagaatgaacagccaggacagcaacaccagcgtgctggaggtggtgagcgagaagcccctgagcgagagactgaaggtggtgcccggcgagaccatcgaccccatcccccaccagctgctgagaaagtacatcggctacgccagacagtacgtgtaccccagactgagcaccgaggccgccagagtgctgcaggacttctacctggagctgagaaagcagagccagagactgaacagcagccccatcaccaccagacagctggagagcctgatcagactgaccgaggccagagccagactggagctgagagaggaggccaccaaggaggacgccgaggacatcgtggagatcatgaagtacagcatgctgggcacctacagcgacgagttcggcaacctggacttcgagagaagccagcacggcagcggcatgagcaacagaagcaccgccaagagattcatcagcgccctgaacaacgtggccgagagaacctacaacaacatcttccagttccaccagctgagacagatcgccaaggagctgaacatccaggtggccgacttcgagaacttcatcggcagcctgaacgaccagggctacctgctgaagaagggccccaaggtgtaccagctgcagaccatgtag

SEQ ID NO: 99958 - protein, 793 aa, Artificial Sequence
  derived and/or modified sequence
MNGEYRGRGFGRGRFQSWKRGRGGGNFSGKWREREHRPDLSKTTGKRTSEQTPQFLLSTKTPQSMQSTLDRFIPYKGWKLYFSEVYSDSSPLIEKIQAFEKFFTRHIDLYDKDEIERKGSILVDFKELTEGGEVTNLIPDIATELRDAPEKTLACMGLAIHQVLTKDLERHAAELQAQEGLSNDGETMVNVPHIHARVYNYEPLTQLKNVRANYYGKYIALRGTVVRVSNIKPLCTKMAFLCAACGEIQSFPLPDGKYSLPTKCPVPVCRGRSFTALRSSPLTVTMDWQSIKIQELMSDDQREAGRIPRTIECELVHDLVDSCVPGDTVTITGIVKVSNAEEGSRNKNDKCMFLLYIEANSISNSKGQKTKSSEDGCKHGMLMEFSLKDLYAIQEIQAEENLFKLIVNSLCPVIFGHEAACNVAPRGVYVCGNTTTTSGLTVTLSKDSSSGDFALEAGALVLGDQGICGIDEFDKMGNQHQALLEAMEQQSISLAKAGVVCSLPARTSIIAAANPVGGHYNKAKTVSENLKMGSALLSRFDLVFILLDTPNEHHDHLLSEHVIAIRAGKQRTISSATVARMNSQDSNTSVLEVVSEKPLSERLKVVPGETIDPIPHQLLRKYIGYARQYVYPRLSTEAARVLQDFYLELRKQSQRLNSSPITTRQLESLIRLTEARARLELREEATKEDAEDIVEIMKYSMLGTYSDEFGNLDFERSQHGSGMSNRSTAKRFISALNNVAERTYNNIFQFHQLRQIAKELNIQVADFENFIGSLNDQGYLLKKGPKVYQLQTM

SEQ ID NO: 99959 - protein, 203 aa, Artificial Sequence
  derived and/or modified sequence
MNGEYRGRGFGRGRFQSWKRGRGGGNFSGKWREREHRPDLSKTTGKRTSEQTPQFLLSTKTPQSMQSTLDRFIPYKGWKLYFSEVYSDSSPLIEKIQAFEKFFTRHIDLYDKDEIERKGSILVDFKELTEGGEVTNLIPDIATELRDAPEKTLACMGLAIHQVLTKDLERHAAELQAQEGLSNDGETMVNVPHIHFLKKKKKI

SEQ ID NO: 99960 - DNA, 2382 bp, Artificial Sequence
  derived and/or modified sequence
atgaatggcgagtataggggacgcgggttcggcagagggagatttcagagttggaaaagaggtagaggtgggggtaatttcagcggcaagtggcgcgaacgcgagcaccggcctgacctgagcaaaactactggcaagcgcacatctgaacagactccgcaatttctcctgagtaccaagaccccccagagcatgcagagcacgttggaccgatttatcccctataaaggatggaaactgtacttctccgaagtgtactcagatagttctccgctcatagaaaagattcaagcgttcgagaaattcttcactagacacattgacctgtacgacaaagacgaaattgaacgcaagggatccatattggtggattttaaggagctgactgaaggtggagaggtgaccaatctgatacctgacattgctacagaactgagagacgccccggagaaaacgcttgcctgtatgggcctggctatccaccaggtgctgacaaaggacctcgagagacacgccgccgagctgcaggcacaggaaggccttagtaacgatggagagaccatggtaaacgtgcctcacattcatgcccgcgtctataattatgagccactcactcagctgaaaaacgtcagagctaattattatggaaagtatattgccctcagaggtactgtggtgcgcgtctccaatattaagcctttgtgcaccaagatggcctttctctgcgccgcctgcggcgagatccagtccttccctctgccagatggcaagtacagcctccccaccaagtgccccgtcccagtctgtagagggaggagtttcacagcccttcgctcttcccctctgactgtaaccatggattggcagtcaatcaagatccaggagctgatgtccgacgaccaaagggaagctggtagaattcctaggaccatcgaatgcgagctcgtacacgatctcgttgactcctgcgttcccggagacacggtgaccatcacggggatcgtcaaggttagcaacgcagaggagggttcccggaataaaaacgacaagtgtatgtttctgttgtatattgaagccaacagcatcagcaatagcaaaggtcagaaaacaaagtcttctgaggatggttgcaagcacgggatgctgatggaattctcgctcaaagatctgtacgccattcaggaaattcaggccgaggagaacttgttcaagctgatagtgaatagcctctgcccagtaatttttggccatgaagctgcctgtaacgtcgcaccgaggggcgtgtacgtatgcggaaataccacgaccacctccgggctgacagttactctcagcaaagattcatcctcaggcgattttgccctggaggccggcgcgctggtgcttggcgaccaaggaatttgtggtatcgacgaatttgacaaaatgggcaaccagcaccaagccctccttgaagctatggaacagcagtcgatctcactcgcgaaggccggtgtggtctgctcccttcccgccaggacatctatcattgccgccgcaaatcctgtcggggggcactacaataaggcaaaaactgtctctgaaaacctgaagatggggtccgccttgctgagtcgcttcgatctcgtgttcatcctccttgacacccccaacgagcatcacgatcatctgctgtccgaacacgtgatcgccatccgggcaggcaagcagagaaccatatcaagcgccaccgtggctcgtatgaactcccaagactcaaacacgtccgtgttggaggtcgtgagcgagaaacctttgtccgagcgcttgaaggttgtcccgggagaaacaatcgatccaatcccacatcaactgctgaggaagtatataggctacgccaggcaatatgtgtacccaaggctgtcgaccgaggccgcgagggttctgcaggatttctacctagagctccgcaaacaatcacaacgtctcaatagcagccctatcactacacgccagctggagagtttaattcgccttaccgaagctcgggctcggctggaacttagggaagaggccaccaaagaggacgctgaggacattgtcgagattatgaagtacagcatgctgggaacctattccgacgagtttgggaatttagatttcgagcgttcccagcacgggagcggaatgagcaaccgcagcaccgcaaaacgctttatctccgccctgaacaatgtggcagaacgaacctataacaatattttccagtttcatcaactgcgtcagatcgccaaagaactgaatattcaggttgccgatttcgaaaatttcatcggatccttaaacgaccaaggatatttgttgaaaaaggggcctaaagtttaccaactccagactatgtag

SEQ ID NO: 99961 - DNA, 2382 bp, Artificial Sequence
  derived and/or modified sequence
atgaatggagagtaccggggccggggcttcggccggggccgcttccagagctggaagaggggccggggcggcggcaacttcagcggcaagtggagggagcgggagcacaggccagacctgagcaagaccaccgggaagaggaccagcgagcagaccccccagttcctgctgagcaccaagaccccccagagcatgcagagcaccctggaccgcttcatcccctacaagggctggaagctgtacttcagcgaggtgtacagcgacagcagccccctgattgagaagatccaggcctttgagaagttcttcaccaggcacatcgacctgtatgacaaggatgaaattgaaaggaagggcagcatcctggtggacttcaaggagctgacagaaggaggagaggtgaccaacctgatcccagacatcgccacagagctgagagatgcccctgagaagaccctggcctgcatgggcctggccatccaccaggtgctgaccaaggacctggagagacatgctgctgagctgcaggcccaggagggcctgagcaatgatggagagaccatggtgaatgtgccccacatccacgcccgggtgtacaactatgagcccctgacccagctgaagaatgtgcgggccaactactacggcaagtacatcgccctgcggggcaccgtggtgcgggtgagcaacatcaagcccctgtgcaccaagatggccttcctgtgtgccgcctgtggggagatccagagcttccccctgcctgatggcaagtacagcctgcccaccaagtgccctgtgcctgtgtgccggggccgctccttcaccgccctgcggagcagccccctgactgtgaccatggactggcagagcatcaagatccaggagctgatgtctgatgaccagcgggaggccggccgcatccccaggaccattgaatgtgagctggtgcatgacctggtggacagctgtgtgcctggggacacagtgaccatcaccggcatcgtgaaggtgtccaatgctgaggagggcagcaggaacaagaatgacaagtgcatgttcctgctgtacatcgaggccaacagcatcagcaacagcaagggccagaagaccaagagcagtgaagatggctgcaagcacggcatgctgatggagttcagcctgaaggacctgtatgccatccaggagatccaggccgaggagaacctcttcaagctgattgtgaacagcctgtgccctgtgatctttggacatgaagctgcctgcaatgtggccccccggggcgtgtatgtgtgtggcaacaccaccaccaccagcggcctgactgtgaccctgagcaaggacagcagcagcggggactttgccctggaggccggggccctggtgctgggggaccagggcatctgtggcattgatgaatttgacaagatgggcaaccagcaccaggccctgctggaggccatggagcagcagagcatcagcctggccaaggccggcgtggtgtgcagcctgcctgcccggaccagcatcatcgccgccgccaaccctgtgggcggccactacaacaaggccaagacagtgtctgagaacctgaagatgggcagcgccctgctgagcagatttgacctggtgttcatcctgctggacaccccaaatgagcaccacgaccacctgctgtctgaacatgtgattgccatccgggccggcaagcagaggaccatcagcagcgccaccgtggccaggatgaacagccaggacagcaacacctctgtgctggaggtggtgtctgagaagcccctgtctgagcggctgaaggtggtgcctggagagaccatcgaccccatcccccaccagctgctgaggaagtacatcggctacgcccggcagtatgtgtacccccggctgagcacagaggccgcccgggtgctgcaggacttctacctggagctgaggaagcagagccagaggctgaacagcagccccatcaccacccggcagctggagagcctcatccggctgacagaggcccgggcccggctggagctgcgggaggaggccaccaaggaggatgctgaagatattgtggagatcatgaagtacagcatgctgggcacctacagtgatgaatttggaaacctggactttgagaggagccagcacggcagcggcatgagcaacagaagcacagccaagcgcttcatcagcgccctgaacaacgtggccgagaggacctacaacaacatcttccagttccaccagctgcggcagatcgccaaggagctgaacatccaggtggccgactttgagaacttcatcggcagcctgaatgaccagggctacctgctgaagaagggccccaaggtgtaccagctgcagaccatgtag

SEQ ID NO: 99962 - DNA, 3549 bp, Artificial Sequence
  derived and/or modified sequence
ctttgagcggaagttggatcactgaagcgccaaaaaagaatttaggggaagacctgattttcgcttgaggcatttttgcggcgctgtgcgctacagacaccttctggaagctgcggtggggaaactgagtttcccgagccgttgagacagatggggttcagcaccgcgcggggacgacaggaaagctgcggctgaagagaactgcggacttggcaggagtcgcctgaggagctaagatcccggagactcttagccccgtggtgcttctctacgggagggagggagggagaatccggccggacagatctgcgcgtatcctggagccggcccagttgtgaactaggagagctttgggacctctgtcccaagcaagagagatgaatggagagtatagaggcagaggatttggacgaggaagatttcaaagctggaaaaggggaagaggtggtgggaacttctcaggaaaatggagagaaagagaacacagacctgatctgagtaaaaccacaggaaaacgtacttctgaacaaaccccacagtttttgctttcaacaaagaccccacagtcaatgcagtcaacattggatcgattcataccatataaaggctggaagctttatttctctgaagtttacagcgatagctctcctttgattgagaagattcaagcatttgaaaaatttttcacaaggcatattgatttgtatgacaaggatgaaatagaaagaaagggaagtattttggtagattttaaagaactgacagaaggtggtgaagtaactaacttgataccagatatagcaactgaactaagagatgcacctgagaaaaccttggcttgcatgggtttggcaatacatcaggtgttaactaaggaccttgaaaggcatgcagctgagttacaagcccaggaaggattgtctaatgatggagaaacaatggtaaatgtgccacatattcatgcaagggtgtacaactatgagcctttgacacagctcaagaatgtcagagcaaattactatggaaaatacattgctctaagagggacagtggttcgtgtcagtaatataaagcctctttgcaccaagatggcttttctttgtgctgcatgtggagaaattcagagctttcctcttccagatggaaaatacagtcttcccacaaagtgtcctgtgcctgtgtgtcgaggcaggtcatttactgctctccgcagctctcctctcacagttacgatggactggcagtcaatcaaaatccaggaattgatgtctgatgatcagagagaagcaggtcggattccacgaacaatagaatgtgagcttgttcatgatcttgtggatagctgtgtcccgggagacacagtgactattactggaattgtcaaagtctcaaatgcggaagaaggttctcgaaataagaatgacaagtgtatgttccttttgtatattgaagcaaattctattagtaatagcaaaggacagaaaacaaagagttctgaggatgggtgtaagcatggaatgttgatggagttctcacttaaagacctttatgccatccaagagattcaagctgaagaaaacctgtttaaactcattgtcaactcgctttgccctgtcatttttggtcatgaagcagcgtgcaatgttgccccacgtggcgtgtatgtttgtggtaacaccacgaccacctctggtctgacggtaactctttcaaaagatagttcctctggagattttgctttggaagctggtgccctggtacttggtgatcaaggtatttgtggaatcgatgaatttgataagatggggaatcaacatcaagccttgttggaagccatggagcagcaaagtattagtcttgctaaggctggtgtggtttgtagccttcctgcaagaacttccattattgctgctgcaaatccagttggaggacattacaataaagccaaaacagtttctgagaatttaaaaatggggagtgcactactatccagatttgatttggtctttatcctgttagatactccaaatgagcatcatgatcacttactctctgaacatgtgattgcaataagagctggaaagcagagaaccattagcagtgccacagtagctcgtatgaatagtcaagattcaaatacttccgtacttgaagtagtttctgagaagccattatcagaaagactaaaggtggttcctggagaaacaatagatcccattccccaccagctattgagaaagtacattggctatgctcggcagtatgtgtacccaaggctatccacagaagctgctcgagttcttcaagatttttaccttgagctccggaaacagagccagaggttaaatagctcaccaatcactaccaggcagctggaatctttgattcgtctgacagaggcacgagcaaggttggaattgagagaggaagcaaccaaagaagacgctgaggatatagtggaaattatgaaatatagcatgctaggaacttactctgatgaatttgggaacctagattttgagcgatcccagcatggttctggaatgagcaacaggtcaacagcgaaaagatttatttctgctctcaacaacgttgctgaaagaacttataataatatatttcaatttcatcaacttcggcagattgccaaagaactaaacattcaggttgctgattttgaaaattttattggatcactaaatgaccagggttacctcttgaaaaaaggcccaaaagtttaccagcttcaaactatgtaaaaggacttcaccaagttagggcctcctgggtttattgcagattaaagccatctcagtgaagatatgcgtgcacgcacagacagacagacacacacacacacacacacacacacacacacacacacacacacagtcaaatactgttctctgaaaaatgatgtcccaaaagtattataataggaaaaaagcattaaatataataaactaatttaagaagtgataaagtctccagatgcagtagctcacactgtaatcacagtgactcaggaggctgaggtgagaggattccttgaggccagggttcgagaccaaccttgggcaacatagcaagaccccatttcttaaaaaaaaaaaaaaaaaatttaaacttagctgggtatggtggcacatgcctatagtctcagctacttgtgaggctgaggcaggaggattctttgagcccaggagtttgaggttacagtgagccacaatcacaccaatcactgcactccagcctgggcaataaagtaactcttgactcaaaaaaataaaaaaaattgtagtggtagccatgtgttaattgttaaataaattctccaaagggctaaaagtaaattacttataaattttttatagttgtatttttgacctgccttttatatgtatgaatatttcatagttttgcatatcagatgtaggcatacagacaaatacataaaccaatgaatatattacatattctgtgttccaataaaactttatttatggacactaaaatttgaatttcataaaattttcccatgtcaagaat

SEQ ID NO: 99963 - DNA, 2382 bp, Artificial Sequence
  derived and/or modified sequence
atgaacggcgagtaccggggccggggcttcggccggggccggttccagagctggaagaggggacgggggggcggcaatttcagcggcaagtggcgcgagagagagcacagacccgatctcagcaaaaccacgggaaagcgtacctcagaacagactccgcaattccttctctccacaaagacacctcaatcaatgcaaagtaccctcgatcggttcatcccttacaaagggtggaaactttattttagtgaagtatattcagatagctcccccctcatagaaaaaatccaggccttcgagaaattttttactcgccacatcgacctgtacgataaggatgaaatcgagaggaagggtagtattcttgtcgactttaaagaactaaccgagggcggcgaagttaccaacctgatcccagatatcgcaaccgagttgagggacgcccccgagaaaaccctggcctgcatgggtctggctattcaccaggtgctgacgaaagatctcgagaggcatgccgccgaactacaggcccaggagggactatccaacgatggcgagaccatggttaacgtgccacacatacacgcaagagtttataattacgagcctctaacacagttgaaaaatgtgcgtgccaactattacggaaaatacatcgcactcagaggaactgttgttcgggtttctaatattaagcctctgtgtaccaagatggcgtttttatgtgctgcctgcggagaaatccagtccttccctctgccagacggcaaatattcactgcccaccaagtgccccgtgcctgtttgcaggggcaggtcatttaccgctctgcgctcatcgccactaactgttacgatggactggcagagcataaagatccaagagttgatgagcgatgatcagcgggaagcaggacgaatccccagaaccatagagtgcgagctggtgcatgaccttgtcgattcttgtgtgcctggggatacagtcaccattacaggaatagtgaaagtgtccaatgcagaggaggggagtagaaacaagaacgataaatgcatgttcctgctgtatattgaggcgaactcaatcagcaactctaagggacagaaaactaaatcgagcgaggacggctgtaaacacggaatgttgatggagtttagccttaaagatctgtacgccatccaggaaatccaagctgaggagaacctatttaagctcatcgtgaattccttgtgccctgtgatctttgggcacgaagctgcctgtaacgtggctccacgcggcgtgtatgtttgtgggaacacaactaccacttccggcttgaccgtcaccctcagcaaggatagcagcagcggcgacttcgcgctcgaggcaggagctttggtgttgggtgaccagggcatatgcggaatcgacgaatttgataagatggggaatcaacaccaggcactgcttgaggcaatggagcaacagtccatcagtttggcgaaggctggagtggtttgcagtttgccagcccgcacatcaataattgctgcagcaaaccctgtgggcggccactacaataaggccaagacggttagcgaaaatctcaaaatgggctctgccctgctgagtcggttcgaccttgtattcatccttcttgatacgcccaatgagcatcacgaccatcttctctctgagcatgtgattgccatccgcgccggcaagcagagaactatcagtagcgccacagtggccaggatgaactcccaggacagtaacacatccgtgctcgaggtagtatccgagaaaccactgagcgaaagactgaaggttgtgcccggggagacgatcgacccaatcccccatcaactgttaagaaagtatataggttatgcccggcaatacgtctaccccaggctgagcacggaagcagctcgcgtccttcaggatttctacttggagctgagaaagcaatcacagaggctgaactctagtcccatcactactcgccaacttgagtcactgattcgtttgaccgaagcccgcgcccggctagagctaagggaagaggcaactaaagaggacgcggaggacatcgttgagatcatgaagtacagcatgctggggacatacagcgacgaatttggcaacctcgattttgagcgttcgcaacacgggagcgggatgagtaatcgttcaaccgccaaacggtttatcagcgcactgaacaacgtggcggagcgcacttataataacatttttcagtttcaccagcttcgacagatagccaaggagcttaacatacaagtggccgacttcgagaatttcattggatccttgaatgaccagggatacttactcaagaaaggaccaaaggtgtatcagttgcagacaatgtag

SEQ ID NO: 99964 - DNA, 2382 bp, Artificial Sequence
  derived and/or modified sequence
atgaacggcgagtaccggggacgtgggttcggaaggggcaggttccagtcatggaaacggggaaggggagggggaaacttctctggcaagtggcgggaaagggagcatagacccgacttgtccaagacaaccggtaagcgcaccagtgagcaaactcctcagttcctgctgagtaccaagactccacagtctatgcagtcaaccttagacagattcattccgtacaagggttggaaactctacttctcggaagtgtatagtgacagcagtcccctgattgaaaagatccaggcctttgaaaagttcttcacccggcacattgatctgtacgacaaggatgaaatagagcgcaaaggcagcatattggtcgattttaaagaattgactgaggggggtgaagtgacgaatctgatcccagatatcgcaacagagttgagagacgcccctgaaaagacactggcctgcatgggcctcgcaattcatcaagtgttaactaaagatcttgagcgtcacgcggctgagttgcaggctcaggagggcctttctaatgatggggagacgatggtgaacgtccctcacatacacgctagggtatacaactacgagcctctcacccagttgaaaaatgtgcgcgcaaattattacggaaagtacattgccctgcggggaaccgtagtacgggttagcaatataaaaccactatgtaccaagatggcattcctttgtgctgcctgtggagagatacagtctttccccttgccagacggaaagtactccctgcctactaaatgtccagtgccagtatgtagggggaggtctttcaccgcactgaggagctcaccgctcactgtgacaatggactggcagtctattaaaatccaggagctgatgtccgatgaccagcgtgaggcaggcagaataccacgaacgatcgagtgcgaactggtccacgatctggttgactcctgtgtgccaggcgacacggtgaccattacaggcatcgtgaaagtttccaatgcagaggaaggaagcagaaataagaacgacaagtgcatgtttctgctttacatcgaggcaaattcaatttccaattcgaagggccagaagacaaagtcgtcagaggacggatgcaaacacgggatgctaatggaattcagcttgaaggatctgtatgccatacaggaaatccaggccgaagagaaccttttcaaactaatcgtgaacagcctgtgcccagttatatttgggcatgaggccgcatgtaatgtcgccccacggggagtgtacgtgtgtgggaacaccacaacaacctctggcctgaccgtgaccctgtcgaaagacagctctagcggcgattttgccctggaggccggtgctctggtcctaggggatcaaggcatttgcggcattgatgagttcgacaaaatgggaaaccagcaccaggcactcctagaggctatggagcagcagtctatctccctagctaaggccggagtcgtatgcagtctgcctgctcggacttctattatcgccgcagcaaatccagtcggaggccattacaataaggcaaaaactgtgagcgaaaatctgaaaatggggtctgctttactgagtaggtttgatttagtctttatactgctggacacacccaatgagcaccatgaccaccttctgagtgagcacgttatcgccatccgcgcaggcaagcagcgcacaattagttcggccactgtggccagaatgaatagtcaggattcaaatacaagtgttttagaggtcgtctccgaaaagcccctgagcgagaggctcaaggtggttcctggtgaaaccattgatcccattccccatcagctgctgcggaaatatatcggctatgccaggcagtacgtgtaccccagactttccacggaggcggcacgcgtgctccaggatttttatttagaactccgtaaacagagccagcggcttaactcttcacctatcacgacgcgtcaactggagagcctgattaggctgaccgaggctcgggctagactagagctccgagaggaagcaacaaaggaagatgctgaagacatcgtcgaaattatgaaatacagtatgcttggcacatatagcgatgagttcggcaacctcgacttcgaaagatcacagcatggttcaggtatgtccaatagatccaccgccaagcgctttatatcggctctaaacaatgtagctgagcgcacctacaataatatctttcagtttcaccagttgcgccaaatagccaaggaactgaatattcaggtggctgactttgaaaattttattggcagtttaaatgatcagggatacctacttaaaaagggtccgaaggtgtaccagctgcagactatgtag

SEQ ID NO: 99965 - DNA, 2382 bp, Artificial Sequence
  derived and/or modified sequence
atgaacggcgagtacagaggcagaggcttcggcagaggcagattccagagctggaagagaggcagaggcggcggcaacttcagcggcaagtggagagagagagagcacagacccgacctgagcaagaccaccggcaagagaaccagcgagcagaccccccagttcctgctgagcaccaagaccccccagagcatgcagagcaccctggacagattcatcccctacaagggctggaagctgtacttcagcgaggtgtacagcgacagcagccccctgatcgagaagatccaggccttcgagaagttcttcaccagacacatcgacctgtacgacaaggacgagatcgagagaaagggcagcatcctggtggacttcaaggagctgaccgagggcggcgaggtgaccaacctgatccccgacatcgccaccgagctgagagacgcccccgagaagaccctggcctgcatgggcctggccatccaccaggtgctgaccaaggacctggagagacacgccgccgagctgcaggcccaggagggcctgagcaacgacggcgagaccatggtgaacgtgccccacatccacgccagagtgtacaactacgagcccctgacccagctgaagaacgtgagagccaactactacggcaagtacatcgccctgagaggcaccgtggtgagagtgagcaacatcaagcccctgtgcaccaagatggccttcctgtgcgccgcctgcggcgagatccagagcttccccctgcccgacggcaagtacagcctgcccaccaagtgccccgtgcccgtgtgcagaggcagaagcttcaccgccctgagaagcagccccctgaccgtgaccatggactggcagagcatcaagatccaggagctgatgagcgacgaccagagagaggccggcagaatccccagaaccatcgagtgcgagctggtgcacgacctggtggacagctgcgtgcccggcgacaccgtgaccatcaccggcatcgtgaaggtgagcaacgccgaggagggcagcagaaacaagaacgacaagtgcatgttcctgctgtacatcgaggccaacagcatcagcaacagcaagggccagaagaccaagagcagcgaggacggctgcaagcacggcatgctgatggagttcagcctgaaggacctgtacgccatccaggagatccaggccgaggagaacctgttcaagctgatcgtgaacagcctgtgccccgtgatcttcggccacgaggccgcctgcaacgtggcccccagaggcgtgtacgtgtgcggcaacaccaccaccaccagcggcctgaccgtgaccctgagcaaggacagcagcagcggcgacttcgccctggaggccggcgccctggtgctgggcgaccagggcatctgcggcatcgacgagttcgacaagatgggcaaccagcaccaggccctgctggaggccatggagcagcagagcatcagcctggccaaggccggcgtggtgtgcagcctgcccgccagaaccagcatcatcgccgccgccaaccccgtgggcggccactacaacaaggccaagaccgtgagcgagaacctgaagatgggcagcgccctgctgagcagattcgacctggtgttcatcctgctggacacccccaacgagcaccacgaccacctgctgagcgagcacgtgatcgccatcagagccggcaagcagagaaccatcagcagcgccaccgtggccagaatgaacagccaggacagcaacaccagcgtgctggaggtggtgagcgagaagcccctgagcgagagactgaaggtggtgcccggcgagaccatcgaccccatcccccaccagctgctgagaaagtacatcggctacgccagacagtacgtgtaccccagactgagcaccgaggccgccagagtgctgcaggacttctacctggagctgagaaagcagagccagagactgaacagcagccccatcaccaccagacagctggagagcctgatcagactgaccgaggccagagccagactggagctgagagaggaggccaccaaggaggacgccgaggacatcgtggagatcatgaagtacagcatgctgggcacctacagcgacgagttcggcaacctggacttcgagagaagccagcacggcagcggcatgagcaacagaagcaccgccaagagattcatcagcgccctgaacaacgtggccgagagaacctacaacaacatcttccagttccaccagctgagacagatcgccaaggagctgaacatccaggtggccgacttcgagaacttcatcggcagcctgaacgaccagggctacctgctgaagaagggccccaaggtgtaccagctgcagaccatgtag

SEQ ID NO: 99966 - protein, 101 aa, Artificial Sequence
  derived and/or modified sequence
MNLERVSNEEKLNLCRKYYLGGFAFLPFLWLVNIFWFFREAFLVPAYTEQSQIKGYVWRSAVGFLFWVIVLTSWITIFQIYRPRWGALGDYLSFTIPLGTP

SEQ ID NO: 99967 - DNA, 306 bp, Artificial Sequence
  derived and/or modified sequence
atgaaccttgagcgtgtgagtaacgaggagaaactcaatttgtgtcggaaatattacttggggggtttcgccttcctcccctttctttggcttgtcaatatcttctggttttttagagaagcctttctggtccctgcctatactgagcagtcgcagatcaaaggctacgtttggcgaagtgcagtcggattcttattttgggtgatcgtgctgactagctggattacgatctttcagatttacaggccaaggtggggagccttaggagactacctgagcttcaccatcccgctcggtactccatag

SEQ ID NO: 99968 - DNA, 306 bp, Artificial Sequence
  derived and/or modified sequence
atgaacctggagcgggtgtccaatgaggagaagctgaacctgtgcaggaagtactacctgggcggctttgccttcctgcccttcctgtggctggtgaacatcttctggttcttccgggaggccttcctggtgcctgcctacacagagcagagccagatcaagggctacgtgtggaggtctgctgtgggcttcctgttctgggtgattgtgctgacctcctggatcaccatcttccagatctaccggccccgctggggcgccctgggggactacctgtccttcaccatccccctgggcaccccctag

SEQ ID NO: 99969 - DNA, 306 bp, Artificial Sequence
  derived and/or modified sequence
atgaacctggagcgggtgagcaacgaggagaagctgaacctgtgccggaagtactacctgggaggcttcgcttttctgccgttcctgtggctggttaacattttctggttctttagggaggcgttcctcgtgcctgcctacacggaacagagccagatcaaggggtacgtttggcgatccgccgtcggattcctgttctgggtcattgtgctgacttcgtggattaccattttccagatttatcggcctcggtggggcgcactaggcgactacctgagcttcaccattccactggggactccttag

SEQ ID NO: 99970 - DNA, 306 bp, Artificial Sequence
  derived and/or modified sequence
atgaatcttgaacgcgtaagcaacgaggagaagctgaacctttgtagaaagtactatttggggggattcgcctttctgccctttttatggttggttaatatcttttggttttttcgggaggcctttctggttccagcatataccgagcagagccagataaaggggtatgtatggcggtccgccgtggggttcttattttgggtgatcgtgctgacctcctggatcaccatcttccaaatttatcggcctagatggggagccttaggagattacctctcttttacaatccccctcggaactccctag

SEQ ID NO: 99971 - DNA, 306 bp, Artificial Sequence
  derived and/or modified sequence
atgaacctggagagagtgagcaacgaggagaagctgaacctgtgcagaaagtactacctgggcggcttcgccttcctgcccttcctgtggctggtgaacatcttctggttcttcagagaggccttcctggtgcccgcctacaccgagcagagccagatcaagggctacgtgtggagaagcgccgtgggcttcctgttctgggtgatcgtgctgaccagctggatcaccatcttccagatctacagacccagatggggcgccctgggcgactacctgagcttcaccatccccctgggcaccccctag

SEQ ID NO: 99972 - DNA, 306 bp, Artificial Sequence
  derived and/or modified sequence
atgaatttggagagagtgtctaatgaggagaagctcaatctttgccgaaaatactatctgggaggcttcgcgtttctacccttcctgtggctggtcaatattttctggttttttagagaagcctttttggtgccggcgtataccgagcagtcacagatcaaaggctacgtgtggagatcagctgtcgggtttctgttctgggtgatcgtgctcacaagctggatcacaatcttccaaatctatagaccccggtggggagccttgggagattaccttagcttcacaatcccacttggtacaccatag

SEQ ID NO: 99973 - DNA, 306 bp, Artificial Sequence
  derived and/or modified sequence
atgaacctggagcgggtgagcaacgaggagaagctgaacctgtgcagaaaatattatcttggcggctttgcattcttaccttttttatggctcgttaatattttttggtttttcagagaggcgtttctggtccctgcttacacagaacagagccagattaaaggttacgtctggcgatctgcagttggattcctgttctgggtcattgtactgacttcctggataacgatcttccagatttatcgtccacggtggggtgcattgggtgattatctttcattcacaatccccctaggaactccctag

SEQ ID NO: 99974 - DNA, 665 bp, Artificial Sequence
  derived and/or modified sequence
ctcgcccaaagaagactacaatctccagggaaacctggggcgtctcgcgcaaacgtccataactgaaagtagctaaggcaccccagccggaggaagtgagctctcctggggcgtggttgttcgtgatccttgcatctgttacttagggtcaaggcttgggtcttgccccgcagacccttgggacgacccggccccagcgcagctatgaacctggagcgagtgtccaatgaggagaaattgaacctgtgccggaagtactacctgggggggtttgctttcctgccttttctctggttggtcaacatcttctggttcttccgagaggccttccttgtcccagcctacacagaacagagccaaatcaaaggctatgtctggcgctcagctgtgggcttcctcttctgggtgatagtgctcacctcctggatcaccatcttccagatctaccggccccgctggggtgcccttggggactacctctccttcaccatacccctgggcaccccctgacaacttctgcacatactggggccctgcttattctcccaggacaggctccttaaagcagaggagcctgtcctgggagccccttctcaaactcctaagacttgttttcatgtcccacgttctctgctgacatcccccaataaaggaccctaactttc

SEQ ID NO: 99975 - DNA, 1144 bp, Artificial Sequence
  derived and/or modified sequence
ccgggtctcacctggctgaatgtcggcttgttgtgaagccgggagcaccggtccccgtgccggcagaccccgatcttaaagtaaaaagagcagttaaccctggaaaaggtgcaaagacaaaggtgaaccgagggccggggaagctgggcaccccagaaacaccgccccaccacccaggaccccagtaccccggccccgaccccccgagagtccactcccagcgcccgttctcacttgtccttctcagtcccgaatatcgaagctaaatattcagccatttttacccaagccctccaggtctggctgctcttacgtcacttccgttgcttaggagcactgggaagtgtagttcgttgccctctccaggcgcttaccaagcgctcggaaacgccccagggcgcttgcgcgtgggaggcgcgcgccctccccatagactccccggtaggagttcttttaacagcgcatgcgtgcagtgttgcctcgcccaaagaagactacaatctccagggaaacctggggcgtctcgcgcaaacgtccataactgaaagtagctaaggcaccccagccggaggaagtgagctctcctggggcgtggttgttcgtgatccttgcatctgttacttagggtcaaggcttgggtcttgccccgcagacccttgggacgacccggccccagcgcagctatgaacctggagcgagtgtccaatgaggagaaattgaacctgtgccggaagtactacctgggggggtttgctttcctgccttttctctggttggtcaacatcttctggttcttccgagaggccttccttgtcccagcctacacagaacagagccaaatcaaaggctatgtctggcgctcagctgtgggcttcctcttctgggtgatagtgctcacctcctggatcaccatcttccagatctaccggccccgctggggtgcccttggggactacctctccttcaccatacccctgggcaccccctgacaacttctgcacatactggggccctgcttattctcccaggacaggctccttaaagcagaggagcctgtcctgggagccccttctcaaactcctaagacttgttttcatgtcccacgttctctgctgacatcccccaataaaggaccctaactttc

SEQ ID NO: 99976 - DNA, 306 bp, Artificial Sequence
  derived and/or modified sequence
atgaacctggaaagggtttcgaatgaggaaaaactaaatctatgcaggaagtattatttaggagggttcgcattcctgccatttctctggctggtcaatatcttttggttcttcagggaagctttcctcgtgccagcatacactgaacaaagccagattaaaggatatgtgtggcgctctgcggtgggatttctgttttgggtgatcgtgcttactagttggattacaatctttcagatctacagacctcgatggggcgcactaggggattatctgtcctttacaattccccttggaacaccgtag

SEQ ID NO: 99977 - DNA, 2652 bp, Artificial Sequence
  derived and/or modified sequence
atgacaaccgagagcggaagcgatagcgagagtaagccagatcaagaggccgaacctcaggaggccgctggagctcaaggccgggccggcgcccccgtcccagaacccccaaaagaggaacagcaacaggctctggaacaattcgctgcagccgccgcacactctactcccgtgcgcagagaggtgacggacaaggaacaagagtttgcggccagagccgccaaacagctagagtatcagcagctagaagacgataaactgtcacagaagtcctcctcttctaaattgagtcgctcacccttaaagattgtcaaaaaaccaaagagcatgcaatgcaaggtgatcttgctggatggatctgaatatacatgtgatgtcgagaaaagaagccgcggccaggtgcttttcgataaagtgtgtgagcaccttaacttgttagagaaagactacttcggtctcacctatcgggacgcagagaatcagaaaaactggcttgatcccgctaaggagatcaaaaagcaggtgagaagtggcgcttggcacttcagcttcaacgttaagttctaccccccggatcccgcccagctctctgaggatattacaagatactacttatgcctgcagctgcgcgacgatatcgtttctgggaggctgccctgtagcttcgtcacactcgccctgctaggttcatacaccgtgcagagcgagctgggagactacgaccctgacgagtgtggaagtgactacattagcgaattccgttttgcgccaaaccacacgaaggagcttgaagacaaggtcatcgaattacacaaatcccatagggggatgacccccgcggaagccgagatgcatttcctggaaaacgccaaaaaactgtctatgtacggagttgacctgcatcacgctaaagatagcgagggggtcgagattatgctgggagtgtgtgcgtccggcttactgatctatcgagatcgcctcagaatcaaccgatttgcctggcccaaagtgttaaagatcagctacaaaaggaacaacttttatattaagattaggccaggggagttcgagcagtttgaaagcacaattggattcaaattgcctaatcatagagccgctaaacggctgtggaaagtgtgtgtggagcaccatactttcttcagactgctcctcccagaagctccaccgaagaagttcttgactctgggttccaagttccgctacagcggacgcactcaggcccagacaaggagagccagcgcgctcattgacaggccggcaccatacttcgaaaggtcttcttctaagcgatacactatgagccgatctctggacggagcatccgttaatgagaatcatgagatctacatgaaggactctatgtcggctgccgaggtgggaaccggtcaatacgcaacaaccaaagggataagtcagaccaacctaatcacaactgtgacgcccgagaagaaggcagaagaagagagggacgaggaagaggacaaaaggcgaaagggggaggaggtgacgcccatttcagcaattcgccatgagggaaaaacagattcagagcgcactgataccgctgctgatggggagaccacagctaccgagtcagatcaagaagaggacgccgagctgaaagcccaggaactggaaaagacgcaggacgacttgatgaaacaccagactaacatttctgaactgaagcggacttttctggaaacttctactgacaccgctgtgacaaacgagtgggagaaacggctctccacctcccccgtccggctagcagcgcgccaggaggatgcccctatgatagagcctctcgttcccgaggaaacaaagcagagctccggtgaaaaactgatggatggaagtgagatattcagtctccttgagtctgcacggaagccgacagagtttattggcggtgtcacctccacctctcagtcctgggttcagaagatggagactaagacagaaagttctggaattgagactgagcctaccgtgcaccacctacccctgagcacagaaaaggtggtgcaggaaactgtgttggtggaggaaagaagggtggtgcatgcatctggagatgcgagctactccgctggcgatagtggcgacgctgcggcacagccagcctttacaggcatcaaaggtaaggaaggcagcgcactcaccgaaggcgccaaggaggagggaggtgaagaggtggccaaggccgtcctggaacaggaggaaaccgccgccgctagtcgcgagcgtcaggaggagcaatctgccgctatacacattagcgagaccctggaacaaaagcctcatttcgagagcagcactgtgaagaccgagactattagcttcggtagcgttagtcccggaggtgttaagctcgaaatcagtactaaagaggtccctgtagtacacacagagactaaaaccattacatacgagtcttctcaggttgaccccggcactgatctcgaacctggtgtgctgatgtcggcccagacaattacatccgagacaactagcaccaccaccaccacacatattactaaaacagtaaaaggcggtatctctgaaacccgtattgaaaaaaggattgttattacaggagacgccgacatcgaccatgatcaggagtag

SEQ ID NO: 99978 - DNA, 2652 bp, Artificial Sequence
  derived and/or modified sequence
atgaccacagaaagtggcagtgacagcgagagcaagccagaccaggaggccgagccccaggaggccgccggggcccagggccgggccggggcccctgtgcctgagccccccaaggaggagcagcagcaggccctggagcagtttgctgctgctgctgcccacagcacccctgtgagaagagaggtgacagacaaggagcaggagtttgctgcccgggccgccaagcagctggagtaccagcagctggaggatgacaagctgagccagaagagcagcagcagcaagctgagccgcagccccctgaagatcgtgaagaagcccaagtccatgcagtgcaaggtgatcctgctggatggcagcgagtacacctgtgatgtggagaagaggagccggggccaggtgctgtttgacaaggtgtgtgagcacctgaacctgctggagaaggactacttcggcctgacctacagagatgctgagaaccagaagaactggctggaccctgccaaggagatcaagaagcaggtgcgcagcggggcctggcacttctccttcaacgtgaagttctaccccccagaccctgcccagctgtctgaggacatcacccgctactacctgtgcctgcagctgagagatgacatcgtgtctggccgcctgccctgcagctttgtgaccctggccctgctgggcagctacacagtgcagagcgagctgggggactatgaccctgatgaatgtggcagtgactacatcagcgagttccgctttgcccccaaccacaccaaggagctggaggacaaggtgattgagctgcacaagagccaccggggcatgaccccagctgaggccgagatgcacttcctggagaatgccaagaagctgtccatgtatggagtggacctgcaccacgccaaggacagcgagggcgtggagatcatgctgggcgtgtgtgccagcggcctgctgatctacagagaccggctgcgcatcaacagatttgcctggcccaaggtgctgaagatctcctacaagaggaacaacttctacatcaagatccggcctggagaatttgagcagtttgagagcaccatcggcttcaagctgcccaaccaccgggccgccaagaggctgtggaaggtgtgtgtggagcaccacaccttcttccggctgctgctgcctgaggccccacccaagaagttcctgaccctgggcagcaagttccgctacagcggccgcacccaggcccagacccggcgggccagcgccctgattgacaggcctgccccctactttgagaggagcagcagcaagcgctacaccatgagccgcagcctggatggagcctctgtgaatgaaaatcatgagatctacatgaaggacagcatgtctgctgctgaggtgggcaccggccagtatgccaccaccaagggcatcagccagaccaacctgatcaccaccgtgaccccagagaagaaggccgaggaggagagagatgaggaggaggacaagagaagaaaaggagaggaggtgacccccatcagcgccatcagacatgagggcaagacagattctgagaggacagacacagctgctgatggagagaccacagccacagaaagtgaccaggaggaggatgctgagctgaaggcccaggagctggagaagacccaggatgacctgatgaagcaccagaccaacatcagcgagctgaagaggaccttcctggagaccagcacagacacagctgtgaccaatgagtgggagaagaggctgagcaccagccctgtgcggctggccgcccggcaggaggatgcccccatgattgagcccctggtgcctgaggagaccaagcagagcagtggagagaagctgatggatggcagcgagatcttcagcctgctggagagcgccaggaagcccacagagttcatcggcggcgtgaccagcaccagccagagctgggtgcagaagatggagaccaagacagagagcagcggcatcgagacagagcccaccgtgcaccacctgcccctgagcacagagaaggtggtgcaggagaccgtgctggtggaggagcggcgggtggtgcacgccagcggagatgccagctacagcgctggggacagcggagatgctgctgcccagcctgccttcaccggcatcaagggcaaggagggcagcgccctgacagaaggagccaaggaggagggcggggaggaggtggccaaggctgtgctggagcaggaggagacagctgctgccagccgggagcggcaggaggagcagagcgctgccatccacatcagcgagaccctggagcagaagccccactttgagagcagcacagtgaagacagagaccatcagctttggatctgtgtcccctgggggcgtgaagctggagatcagcaccaaggaggtgcctgtggtgcacacagagaccaagaccatcacctatgagagcagccaggtggaccctggaacagacctggagcccggggtgctgatgtctgcccagaccatcaccagcgagaccaccagcaccaccaccaccacccacatcaccaagacagtgaagggcggcatcagcgagacccgcatcgagaagagaattgtcatcactggagatgctgacatcgaccatgaccaggagtag

SEQ ID NO: 99979 - DNA, 2652 bp, Artificial Sequence
  derived and/or modified sequence
atgaccaccgagagcggcagcgacagcgagagcaagcccgaccaggaggcggagccccaggaagcagctggtgcccaaggacgggccggtgctccagtccctgaacctcccaaggaagagcagcagcaagctttggaacagttcgcggccgctgctgctcattcgactcccgtgaggagagaggtcacagacaaagaacaggaatttgccgctagggccgcaaaacaacttgagtaccaacagttggaggatgacaagctgtcccagaagagctcatccagcaaactttcaaggagccctctgaaaatcgtgaagaagccaaagtctatgcagtgtaaagtaatattgctcgatggatccgagtatacctgcgacgtagagaagaggagccggggtcaggtcctattcgataaggtgtgcgaacacttgaatctgctcgaaaaggactattttggcctaacctaccgcgatgccgagaatcaaaagaactggctggacccggcaaaggaaatcaagaaacaggttcgttctggcgcatggcacttcagtttcaacgttaaattctatccccccgaccctgctcagctgtctgaggatataacgcgctactacctctgccttcagctgcgcgacgatatcgtaagcgggaggttgccttgctcattcgtgacccttgcgctgttggggagctataccgtgcagtcagagctgggggattacgatccagacgagtgcggtagcgattatatctccgaattccgttttgctcccaaccacaccaaggaacttgaggacaaggtgattgaactgcataagtcacacaggggaatgacacctgcagaggccgagatgcacttcctggagaacgctaagaagctcagtatgtacggggtcgatttgcatcacgccaaagactcggaaggagtggagatcatgctgggggtttgtgcttcagggctgctgatctatcgggatcggctcagaatcaaccgcttcgcctggcctaaggtgcttaagatctcatataagagaaataatttttacattaagattaggcccggtgagttcgagcagttcgagtccactatcggtttcaagctccccaatcacagagccgccaagaggctctggaaggtgtgcgtggagcaccatacattcttccgcctgcttctaccagaggccccccccaagaagttcctgacactcgggtcgaaattccggtactccgggcgcacgcaggcccagacgcgcagagcctccgctctgattgaccggccggcgccatactttgagcgctcctctagtaagcggtatacgatgtctcgttcacttgacggcgccagcgtcaacgagaatcacgagatatacatgaaggacagtatgtcagcagctgaggtggggaccggccagtacgctacaaccaagggcatctcacagacgaatctcatcactactgtcacccctgagaagaaagctgaagaagagagagacgaggaagaggataaacgacgaaagggtgaagaagtgacccccatcagcgccattagacatgaaggcaagactgacagcgaacgcacggacacagcagccgatggtgaaaccactgctactgaaagtgatcaagaggaagatgctgaactcaaagctcaggagctggagaaaacacaagatgatctcatgaaacatcagactaacatcagcgagctgaaaagaaccttcctcgagacatctacggataccgcagtcaccaatgagtgggaaaaacgactgtcaacttcccccgtacgcctcgccgctcggcaggaggatgcccctatgattgagccgctcgtgcctgaagagaccaagcagtcttctggcgaaaaattgatggacggttctgaaatcttcagccttctcgagagcgcccgtaagccaaccgaattcatagggggtgttaccagcacatcacaatcttgggtacaaaaaatggagaccaaaactgagtctagcgggatcgagaccgaacctactgtgcaccatttaccgctgagcaccgagaaagtcgttcaagaaacagttctggttgaagagaggagagtggtgcacgcatccggcgatgcctcctatagcgccggtgacagcggtgatgccgcggctcagcccgcattcactgggattaagggaaaagagggctccgccctgacagagggggctaaggaagagggcggggaggaagtagctaaagccgtgcttgagcaggaagagacagccgcggcatcccgggagcgccaagaggaacaatctgctgctattcacatttccgaaactcttgagcaaaaacctcacttcgagtcctcaaccgtcaagacagagaccatatctttcggatcagtgagcccgggaggcgtgaaactggaaatttccacaaaggaagtgccagtggtacacaccgaaacaaaaacaattacctatgaaagctctcaggtcgaccctggcacggatctagaaccaggcgtgctgatgagcgcacaaactatcacctccgaaactacaagtaccacgacaaccacgcatatcacaaagactgttaaaggaggtatctcagagaccaggatcgagaagaggattgtgatcacaggagacgctgatattgatcatgatcaggaatag

SEQ ID NO: 99980 - DNA, 2652 bp, Artificial Sequence
  derived and/or modified sequence
atgacgaccgagtccggttctgattctgagtcaaagcctgatcaggaggccgagccccaagaagctgcaggggctcaaggcagagctggagccccagttcctgagccaccaaaggaagagcaacagcaggcactggagcaattcgccgcagcggcagcccactccactccggtacggagggaggtcaccgacaaagagcaagagtttgcggctagagctgcaaaacagctagagtaccagcagctggaagacgataaactgagccagaaaagttcatcctcaaagctgagtaggtctcctctgaaaatcgtgaaaaagcctaagtccatgcagtgtaaagtgatccttctcgacggaagcgagtatacttgtgacgttgagaagagaagcagggggcaggttctgttcgataaggtgtgcgagcatttgaacctgctggaaaaggattacttcggtttgacttaccgcgacgctgaaaatcagaagaattggcttgatcctgctaaggagataaagaaacaggtgcggtcaggcgcttggcacttttccttcaatgttaagttctacccgcctgatccggcacaactctctgaggacataacaagatattacctctgcctgcagctgcgcgacgacatcgtctccggacgattgccttgcagttttgtaacgctcgcgcttctcggaagttacaccgtacaaagcgaattgggggactacgatcctgatgagtgtggctccgattatatctcagaatttcgctttgctccaaaccacacaaaggagttagaagataaggtgatcgaacttcacaaatcccatagggggatgactccagccgaggccgagatgcacttcctggagaacgccaagaagctgagcatgtatggggtagacctgcaccacgccaaagattctgagggcgtggagatcatgcttggagtatgcgcaagtggcttgctgatatacagagaccgattgcggattaatagatttgcgtggcccaaggtgttaaagatttcatataagcgcaataacttctatattaagatcagacctggagagtttgaacaattcgaaagcactattgggttcaaacttcctaaccatagagccgcaaaacgcctctggaaggtatgcgtcgaacaccacacctttttccggttactgctgccagaggcgccaccaaagaaattcctaactctggggagcaagttccgctacagtgggaggactcaggctcaaactcgtcgagcatcggccctgatcgaccgtcccgcaccatacttcgagaggtcgtcctccaaaagatataccatgtcccggtctctggacggtgcctcggtcaacgagaatcacgaaatatatatgaaagattcaatgtccgctgctgaagttgggaccggccagtatgcaaccactaagggtatatctcagaccaacttgattacaacagtcacacccgaaaaaaaagctgaagaggagagagacgaggaagaagataagcggcgaaaaggagaagaggttaccccaatcagtgctatccggcacgagggcaagaccgatagcgaacggactgacaccgctgcagatggcgagacaaccgcaacagagtccgatcaagaggaggacgctgaactaaaggcccaggagctggaaaaaacgcaggatgatcttatgaagcaccagacaaacatctctgagttgaaacgcactttcctcgagacatccaccgataccgccgtaactaacgagtgggagaagcggctgtcaacgtctcctgttagacttgctgccaggcaagaggatgcccctatgatagagcctctcgtacctgaggaaacaaagcagtcttctggcgaaaaactgatggatggctctgagattttttccctacttgagtccgcacgcaagcccactgaatttataggtggagtgacctctacctcccagtcgtgggtgcagaaaatggaaacaaaaacagaatctagcggaattgaaactgagcccaccgtgcaccatctgccgttgtctaccgaaaaggttgtgcaggagacagtgttggtcgaagagagaagggtggtgcacgcgagcggcgacgcttcctattccgcgggtgactctggtgatgcagccgcacagcctgctttcactggcataaagggtaaagaggggagcgcactgacagagggtgccaaagaggaaggaggagaagaggtggccaaggcggtcttagagcaagaggagaccgcagcagcttcaagagagaggcaggaagaacagagtgctgccattcacatctcagagacccttgaacagaaaccacactttgaaagtagtaccgtcaagacagagaccataagcttcggaagtgtttctcctggaggcgtaaaacttgagatcagtaccaaagaagtgccagttgtccacaccgagacgaagaccataacttatgagagtagccaggtagaccctgggaccgatctggaaccaggagttctcatgagtgcccagacaataacctccgagaccacttccaccaccaccacgacccatattactaaaactgtcaaaggtgggatttcagaaacgcggatcgagaaacggatcgtaattactggcgacgcagacatcgaccacgatcaggaatag

SEQ ID NO: 99981 - DNA, 2652 bp, Artificial Sequence
  derived and/or modified sequence
atgaccaccgagagcggcagcgacagcgagagcaagcccgaccaggaggccgagccccaggaggccgccggcgcccagggcagagccggcgcccccgtgcccgagccccccaaggaggagcagcagcaggccctggagcagttcgccgccgccgccgcccacagcacccccgtgagaagagaggtgaccgacaaggagcaggagttcgccgccagagccgccaagcagctggagtaccagcagctggaggacgacaagctgagccagaagagcagcagcagcaagctgagcagaagccccctgaagatcgtgaagaagcccaagagcatgcagtgcaaggtgatcctgctggacggcagcgagtacacctgcgacgtggagaagagaagcagaggccaggtgctgttcgacaaggtgtgcgagcacctgaacctgctggagaaggactacttcggcctgacctacagagacgccgagaaccagaagaactggctggaccccgccaaggagatcaagaagcaggtgagaagcggcgcctggcacttcagcttcaacgtgaagttctacccccccgaccccgcccagctgagcgaggacatcaccagatactacctgtgcctgcagctgagagacgacatcgtgagcggcagactgccctgcagcttcgtgaccctggccctgctgggcagctacaccgtgcagagcgagctgggcgactacgaccccgacgagtgcggcagcgactacatcagcgagttcagattcgcccccaaccacaccaaggagctggaggacaaggtgatcgagctgcacaagagccacagaggcatgacccccgccgaggccgagatgcacttcctggagaacgccaagaagctgagcatgtacggcgtggacctgcaccacgccaaggacagcgagggcgtggagatcatgctgggcgtgtgcgccagcggcctgctgatctacagagacagactgagaatcaacagattcgcctggcccaaggtgctgaagatcagctacaagagaaacaacttctacatcaagatcagacccggcgagttcgagcagttcgagagcaccatcggcttcaagctgcccaaccacagagccgccaagagactgtggaaggtgtgcgtggagcaccacaccttcttcagactgctgctgcccgaggccccccccaagaagttcctgaccctgggcagcaagttcagatacagcggcagaacccaggcccagaccagaagagccagcgccctgatcgacagacccgccccctacttcgagagaagcagcagcaagagatacaccatgagcagaagcctggacggcgccagcgtgaacgagaaccacgagatctacatgaaggacagcatgagcgccgccgaggtgggcaccggccagtacgccaccaccaagggcatcagccagaccaacctgatcaccaccgtgacccccgagaagaaggccgaggaggagagagacgaggaggaggacaagagaagaaagggcgaggaggtgacccccatcagcgccatcagacacgagggcaagaccgacagcgagagaaccgacaccgccgccgacggcgagaccaccgccaccgagagcgaccaggaggaggacgccgagctgaaggcccaggagctggagaagacccaggacgacctgatgaagcaccagaccaacatcagcgagctgaagagaaccttcctggagaccagcaccgacaccgccgtgaccaacgagtgggagaagagactgagcaccagccccgtgagactggccgccagacaggaggacgcccccatgatcgagcccctggtgcccgaggagaccaagcagagcagcggcgagaagctgatggacggcagcgagatcttcagcctgctggagagcgccagaaagcccaccgagttcatcggcggcgtgaccagcaccagccagagctgggtgcagaagatggagaccaagaccgagagcagcggcatcgagaccgagcccaccgtgcaccacctgcccctgagcaccgagaaggtggtgcaggagaccgtgctggtggaggagagaagagtggtgcacgccagcggcgacgccagctacagcgccggcgacagcggcgacgccgccgcccagcccgccttcaccggcatcaagggcaaggagggcagcgccctgaccgagggcgccaaggaggagggcggcgaggaggtggccaaggccgtgctggagcaggaggagaccgccgccgccagcagagagagacaggaggagcagagcgccgccatccacatcagcgagaccctggagcagaagccccacttcgagagcagcaccgtgaagaccgagaccatcagcttcggcagcgtgagccccggcggcgtgaagctggagatcagcaccaaggaggtgcccgtggtgcacaccgagaccaagaccatcacctacgagagcagccaggtggaccccggcaccgacctggagcccggcgtgctgatgagcgcccagaccatcaccagcgagaccaccagcaccaccaccaccacccacatcaccaagaccgtgaagggcggcatcagcgagaccagaatcgagaagagaatcgtgatcaccggcgacgccgacatcgaccacgaccaggagtag

SEQ ID NO: 99982 - DNA, 3284 bp, Artificial Sequence
  derived and/or modified sequence
gttatttgatttgccttggctgtggggaattctgtgctcagaagcaaggactggagcagtgaagtcattgtcctgcctggtgttgtgacatcactatggctcaaaggaaacaagggtggggcaggcaaaaccagaccatctgaagcatcttgctggctttaaaactttgcctgatcaatcaatgagactcctttctcaagttgaactgcattgcgagaacaatcaaccatgacgaccgaatctggatcagactcggaatccaagccggaccaggaggccgagccccaggaggcggcgggggcgcaggggcgcgcgggggcgcccgtgccggagccgcccaaggaggagcagcagcaggccctggagcagttcgccgccgctgcagcgcacagcaccccggtgcggagggaggtcactgacaaggaacaggagtttgctgccagggctgcaaaacagctcgaatatcagcaattagaagacgataaactttctcagaaatcatctagcagtaaactctctcggtctccattaaagattgtcaaaaagcctaaaagcatgcagtgcaaagtgatacttctcgatggatcagaatatacctgtgatgtagagaaacgctccagaggacaagtgctgtttgataaagtgtgtgaacacttgaacttgctagagaaagactactttgggcttacgtatcgagatgctgaaaaccagaagaattggttggaccctgctaaggaaataaaaaaacaggttcgaagtggtgcttggcacttttcatttaatgtgaaattttatccaccagaccctgcccaactatctgaagatatcaccaggtactacctctgcttgcagttgcgagatgacatcgtgtccggaaggctgccctgctcctttgttaccctggccttgctgggctcctacactgtccagtcagagctcggagactatgacccagatgaatgtgggagcgattacattagtgagttccgctttgcaccaaaccacactaaagaactggaagacaaagtgatcgagctgcacaagagccacagaggaatgacgccagcagaagcagagatgcatttcttggaaaatgccaaaaaattatcaatgtatggggtagatttacatcatgctaaggactcagaaggggtagaaattatgttaggagtttgtgcaagtggtctgttgatatatcgcgaccggctgcgaataaacagatttgcctggcccaaggttctaaagatttcatacaaacggaacaacttttacattaagatccggccgggagagtttgaacaatttgaaagcaccattgggtttaagctgccaaaccatcgagctgccaagcgtttatggaaagtatgtgttgagcatcatacatttttcagactactgttaccagaagcacctcccaagaaattcctaaccttgggttccaagtttcgttatagtggcaggacacaagcgcaaacgagaagagccagtgcgttgatagatcgcccagcaccttactttgaacgctcatccagcaaacgttataccatgtctcgcagcttggatggagcatcagtgaatgaaaaccatgaaatatacatgaaggattctatgtctgctgcagaggttggtactggccagtacgccacaacaaaaggcatctctcagaccaacttgatcaccactgtgactccggagaagaaggctgaggaggagcgggacgaggaagaggacaaacggaggaagggggaagaagtcacgcccatctcggccatccggcacgagggaaagactgacagtgagcgcacggacaccgcagccgacggggagaccactgccactgagtcggaccaggaggaagatgcagagctcaaggcacaggagctagaaaaaactcaagatgacctgatgaaacatcaaaccaacattagcgagctgaaaagaaccttcttagaaacctcaacagacactgccgtaacgaatgaatgggagaagaggctttccacctcccccgtgcgactggccgccaggcaggaggatgcccccatgatcgaaccacttgtccctgaagagactaagcagtcttctggggaaaagctcatggatggctctgaaatcttcagtttattagagtctgcgcgaaaaccaacagaattcataggaggggttacttctacttctcaaagctgggttcagaaaatggaaaccaagacggagtccagtggaatagagacggaacccaccgtgcaccacctgccgcttagcactgagaaggtggtgcaggagaccgtgttggtggaggagcggcgtgtggtgcacgcgagtggggatgcttcttactcggcgggagacagcggggatgctgcagcacagcccgcattcacaggcattaaagggaaagagggctctgccttgacggagggggctaaagaggaaggaggggaggaggtcgctaaagctgtcctggaacaggaagagacagccgctgcttcccgtgagcgacaagaggagcagagtgcagccatccacatttcagaaactttggaacaaaaacctcattttgagtcctcaacggtgaagacggaaaccatcagttttggcagtgtttcaccgggaggagtaaagctagaaatttccacgaaggaagtgccagtagttcacaccgaaaccaaaaccatcacatatgaatcatcacaggtcgatccaggcacagatctggagccaggcgtgctgatgagtgcacagacgatcacatctgaaaccaccagtaccaccaccactacgcacatcaccaaaactgtgaaagggggcatttcagagacaagaattgagaagcgaatagtcatcacgggggatgcagacattgaccatgaccaggaataacttagcttgcacatgaatgcagtcatgcaaaccgttaggaaaaccagagcctatatggagttccctcttctaacccaactgacttgtatctgtccgtggaaaatttcagtccagaagaattgaccttgaccattaataaagacactggcagagagatcttcccataataaagcaatctgattcagcatcactaaaccgataatgcatgaagcaacgataaaattacaaaagagcagcatttttaattttcacaaaatgtctcagttttcagctatacctgcacgttcataaccaacaatataaaccgtggtctcatgtaacacataaacaattcatgcctttcatagtttattattattaaagtctaaacaaaattgcaatttcttaggtaaccttatatttac

SEQ ID NO: 99983 - protein, 865 aa, Artificial Sequence
  derived and/or modified sequence
MTTESGSDSESKPDQEAEPQEAAGAQGRAGAPVPEPPKEEQQQALEQFAAAAAHSTPVRREVTDKEQEFAARAAKQLEYQQLEDDKLSQKSSSSKLSRSPLKIVKKPKSMQCKVILLDGSEYTCDVEKRSRGQVLFDKVCEHLNLLEKDYFGLTYRDAENQKNWLDPAKEIKKQVRSGAWHFSFNVKFYPPDPAQLSEDITRYYLCLQLRDDIVSGRLPCSFVTLALLGSYTVQSELGDYDPDECGSDYISEFRFAPNHTKELEDKVIELHKSHRGMTPAEAEMHFLENAKKLSMYGVDLHHAKDSEGVEIMLGVCASGLLIYRDRLRINRFAWPKVLKISYKRNNFYIKIRPGEFEQFESTIGFKLPNHRAAKRLWKVCVEHHTFFRLLLPEAPPKKFLTLGSKFRYSGRTQAQTRRASALIDRPAPYFERSSSKRYTMSRSLDGASVNENHEIYMKDSMSAAEVGTGQYATTKGISQTNLITTVTPEKKAEEERDEEEDKRRKGEEVTPISAIRHEGKTDSERTDTAADGETTATEELEKTQDDLMKHQTNISELKRTFLETSTDTAVTNEWEKRLSTSPVRLAARQEDAPMIEPLVPEEKMETKTESSGIETEPTVHHLPLSTEKVVQETVLVEERRVVHASGDASYSAGDSGDAAAQPAFTGIKGKEGSALTEGAKEEGGEEVAKAVLEQEETAAASRERQEEQSAAIHISETLEQKPHFESSTVKTETISFGSVSPGGVKLEISTKEVPVVHTETKTITYESSQVDPGTDLEPGVLMSAQTITSETTSTTTTTHITKTVKGGISETRIEKRIVITGDADIDHDQALAQAIKEAKEQHPDMSVTKVVVHKETEITPEDGED

SEQ ID NO: 99984 - protein, 756 aa, Artificial Sequence
  derived and/or modified sequence
MQCKVILLDGSEYTCDVEKRSRGQVLFDKVCEHLNLLEKDYFGLTYRDAENQKNWLDPAKEIKKQVRSGAWHFSFNVKFYPPDPAQLSEDITRYYLCLQLRDDIVSGRLPCSFVTLALLGSYTVQSELGDYDPDECGSDYISEFRFAPNHTKELEDKVIELHKSHRGMTPAEAEMHFLENAKKLSMYGVDLHHAKDSEGVEIMLGVCASGLLIYRDRLRINRFAWPKVLKISYKRNNFYIKIRPGEFEQFESTIGFKLPNHRAAKRLWKVCVEHHTFFRLLLPEAPPKKFLTLGSKFRYSGRTQAQTRRASALIDRPAPYFERSSSKRYTMSRSLDGASVNENHEIYMKDSMSAAEVGTGQYATTKGISQTNLITTVTPEKKAEEERDEEEDKRRKGEEVTPISAIRHEGKTDSERTDTAADGETTATEELEKTQDDLMKHQTNISELKRTFLETSTDTAVTNEWEKRLSTSPVRLAARQEDAPMIEPLVPEEKMETKTESSGIETEPTVHHLPLSTEKVVQETVLVEERRVVHASGDASYSAGDSGDAAAQPAFTGIKGKEGSALTEGAKEEGGEEVAKAVLEQEETAAASRERQEEQSAAIHISETLEQKPHFESSTVKTETISFGSVSPGGVKLEISTKEVPVVHTETKTITYESSQVDPGTDLEPGVLMSAQTITSETTSTTTTTHITKTVKGGISETRIEKRIVITGDADIDHDQALAQAIKEAKEQHPDMSVTKVVVHKETEITPEDGED

SEQ ID NO: 99985 - DNA, 2598 bp, Artificial Sequence
  derived and/or modified sequence
atgacgaccgagtccgggagtgattccgagagcaagccggaccaggaggctgagccccaagaggctgctggagctcagggcagggcaggcgcacctgtgccggagccccctaaagaagaacagcagcaggccctcgagcagttcgcagctgcagctgcacactctacacctgttcgtcgagaagtcactgacaaggagcaggagttcgcggctcgagctgccaagcagctggaataccagcagcttgaggacgacaagctgtcccagaagtcgtctagctccaagctgagtaggtctcccttgaaaatagtcaaaaagcctaagagcatgcagtgtaaagtgatcctattggatggctcggaatatacgtgcgacgttgagaaacggtcaagaggccaggtgctgtttgataaagtttgcgaacacctcaatctgctggagaaggattacttcggattgacttatcgggatgctgaaaaccagaagaactggctcgaccctgccaaggagatcaagaaacaggtgagatccggagcgtggcatttttcgttcaatgtgaaattctatccccctgacccggcacagctgtcggaagacatcactcgctattacctgtgtttgcagttgcgggacgatatcgtttctggccggctcccctgctccttcgtgaccctagccttattgggctcatacactgtgcaaagtgagttgggcgattatgatcccgatgaatgcgggtccgactacatttccgaatttagattcgctccgaatcatacaaaggagctcgaggataaagtgatcgagctgcacaagagtcacagaggcatgacccctgctgaagctgagatgcacttcctcgaaaacgcaaaaaagctaagtatgtacggagtggatctgcaccatgccaaggactctgagggggtcgaaatcatgctcggggtatgtgccagcggtcttctgatttatcgagaccgcctgcgcatcaaccgcttcgcttggccaaaagtgctcaaaatctcatataagcgtaataatttctacattaaaatcagacctggtgaatttgagcagttcgaatcaaccatcggatttaaactcccaaaccatcgagcagcgaagagactgtggaaggtttgcgttgaacaccacacgttcttccgactgctgttgccggaggcgcctcccaaaaagtttctgactctgggctcgaagttccggtattccggtagaacccaggctcagacaaggcgtgccagtgccctcatcgataggcctgcaccttattttgaaaggagcagctccaaacggtatactatgtcccggtcattggatggcgcttcagtgaacgagaaccacgaaatatacatgaaggacagcatgtccgccgctgaagtgggaacaggacagtacgccacaacaaagggaataagtcaaacgaatctgataactaccgttaccccggaaaaaaaggcagaggaggagagagacgaagaagaagacaagagacgtaaaggagaggaggtgacacccatctccgctattcggcatgaaggtaagaccgatagcgaacgcactgatactgccgctgatggagagaccacagcaaccgaggaactcgagaaaactcaggatgacctgatgaaacaccagaccaatattagcgaactgaaacgcaccttcttggagacctccacggatacagctgtcaccaacgagtgggaaaaaagactgtccacatcccctgtgcgtcttgccgcacgccaagaagacgccccaatgatcgagcctttggtgccagaggagaaaatggaaacgaaaaccgagagttcagggattgagacagaaccaaccgtccatcatctgcccctgagcacggaaaaagtggtgcaagaaactgtactggtcgaagaaagaagggtggtacatgccagtggcgacgcaagctatagtgcaggtgacagtggcgacgcagctgcccagcccgcatttacgggaataaaaggtaaggagggctccgcattgaccgagggggcaaaggaggaaggcggcgaggaagtggccaaggccgtgctggaacaggaagaaaccgccgccgccagccgcgaaagacaggaggaacagagcgccgcaatacacatctcagagactctagagcagaaaccccattttgagtcatcaactgtgaaaaccgaaaccatctcatttggatcggtctctcccgggggagtgaaactcgagatcagcactaaggaggtgcctgtggtgcacaccgaaaccaaaacgatcacgtacgagtcctcacaggtagacccaggcacagacttggagccaggtgtactgatgtccgcccagaccatcacaagcgagacaactagtacaactacgaccacacacattaccaagactgtgaagggaggcatatccgagaccagaatcgaaaaaaggatcgtcatcacaggcgatgcagatattgaccacgaccaagcacttgctcaggccatcaaagaagctaaagaacagcatcccgatatgagtgtcacgaaagttgtagtgcacaaagagactgaaatcacccctgaggatggcgaagactag

SEQ ID NO: 99986 - DNA, 2598 bp, Artificial Sequence
  derived and/or modified sequence
atgaccacagaaagtggcagtgacagcgagagcaagccagaccaggaggccgagccccaggaggccgccggggcccagggccgggccggggcccctgtgcctgagccccccaaggaggagcagcagcaggccctggagcagtttgctgctgctgctgcccacagcacccctgtgagaagagaggtgacagacaaggagcaggagtttgctgcccgggccgccaagcagctggagtaccagcagctggaggatgacaagctgagccagaagagcagcagcagcaagctgagccgcagccccctgaagatcgtgaagaagcccaagtccatgcagtgcaaggtgatcctgctggatggcagcgagtacacctgtgatgtggagaagaggagccggggccaggtgctgtttgacaaggtgtgtgagcacctgaacctgctggagaaggactacttcggcctgacctacagagatgctgagaaccagaagaactggctggaccctgccaaggagatcaagaagcaggtgcgcagcggggcctggcacttctccttcaacgtgaagttctaccccccagaccctgcccagctgtctgaggacatcacccgctactacctgtgcctgcagctgagagatgacatcgtgtctggccgcctgccctgcagctttgtgaccctggccctgctgggcagctacacagtgcagagcgagctgggggactatgaccctgatgaatgtggcagtgactacatcagcgagttccgctttgcccccaaccacaccaaggagctggaggacaaggtgattgagctgcacaagagccaccggggcatgaccccagctgaggccgagatgcacttcctggagaatgccaagaagctgtccatgtatggagtggacctgcaccacgccaaggacagcgagggcgtggagatcatgctgggcgtgtgtgccagcggcctgctgatctacagagaccggctgcgcatcaacagatttgcctggcccaaggtgctgaagatctcctacaagaggaacaacttctacatcaagatccggcctggagaatttgagcagtttgagagcaccatcggcttcaagctgcccaaccaccgggccgccaagaggctgtggaaggtgtgtgtggagcaccacaccttcttccggctgctgctgcctgaggccccacccaagaagttcctgaccctgggcagcaagttccgctacagcggccgcacccaggcccagacccggcgggccagcgccctgattgacaggcctgccccctactttgagaggagcagcagcaagcgctacaccatgagccgcagcctggatggagcctctgtgaatgaaaatcatgagatctacatgaaggacagcatgtctgctgctgaggtgggcaccggccagtatgccaccaccaagggcatcagccagaccaacctgatcaccaccgtgaccccagagaagaaggccgaggaggagagagatgaggaggaggacaagagaagaaaaggagaggaggtgacccccatcagcgccatcagacatgagggcaagacagattctgagaggacagacacagctgctgatggagagaccacagccacagaggagctggagaagacccaggatgacctgatgaagcaccagaccaacatcagcgagctgaagaggaccttcctggagaccagcacagacacagctgtgaccaatgagtgggagaagaggctgagcaccagccctgtgcggctggccgcccggcaggaggatgcccccatgattgagcccctggtgcctgaggagaagatggagaccaagacagagagcagcggcattgaaacagagcccaccgtgcaccacctgcccctgagcacagagaaggtggtgcaggagaccgtgctggtggaggagaggagagtggtgcacgccagcggagatgccagctacagcgctggggacagcggagatgctgctgcccagcctgccttcaccggcatcaagggcaaggagggcagcgccctgacagagggcgccaaggaggagggcggggaggaggtggccaaggctgtgctggagcaggaggagacagctgctgccagccgggagcggcaggaggagcagagcgctgccatccacatcagcgagaccctggagcagaagccccactttgagagcagcacagtgaagacagagaccatcagctttggatctgtgtccccaggaggagtgaagctggagatcagcaccaaggaggtgcctgtggtgcacacagagaccaagaccatcacctatgagagcagccaggtggaccccggcacagacctggagcccggggtgctgatgtctgcccagaccatcaccagcgagaccaccagcaccaccaccaccacccacatcaccaagacagtgaagggcggcatcagcgagaccagaattgagaagagaattgtcatcactggagatgctgacatcgaccatgaccaggccctggcccaggccatcaaggaggccaaggagcagcacccagacatgtctgtgaccaaggtggtggtgcacaaggagacagagatcaccccagaagatggagaggactag

SEQ ID NO: 99987 - DNA, 2598 bp, Artificial Sequence
  derived and/or modified sequence
atgaccaccgagagcggcagcgacagcgagagcaagcccgaccaggaggcggagccccaagaagccgctggcgcccaaggacgcgccggggccccagtgcctgaaccacccaaggaagagcagcaacaggctttggaacaattcgcggcggccgccgcacactcaaccccggtacgaagagaagtgactgataaggagcaggaattcgccgctcgtgctgcaaagcagctggagtaccaacagctggaagacgataagctgtctcagaagtcaagctcttcaaagcttagtaggtcgccgttaaaaatcgtgaagaagcctaaatccatgcaatgtaaggtgattctgttggatggctcagagtacacctgcgatgtggagaagcgatcccggggccaggtgctattcgacaaagtttgtgaacatctcaatttgctggagaaggactatttcggactcacttatagagacgccgagaaccagaagaactggctcgatcccgctaaagagataaagaaacaggttagatccggtgcctggcatttcagtttcaatgtgaaattctatcccccagaccccgctcagctgagtgaggacataacaaggtattacctgtgtctgcaactgcgcgatgatattgtaagtggaagattgccctgttcattcgtgacactcgctctgctggggtcttacacagtgcaatctgaactcggagactacgacccagatgagtgcggtagtgactatattagtgaattcagatttgccccaaatcacaccaaggagttagaggacaaggtgatcgagttgcataaaagtcatagaggcatgactcccgccgaagctgagatgcactttctcgaaaacgccaagaaactgagcatgtacggagtggatttgcaccatgccaaggacagtgaaggcgtggaaatcatgctgggagtttgcgcttccggcctccttatctaccgcgacagactgaggatcaatcgctttgcctggccaaaagttttgaaaatcagctacaagaggaataacttttacataaaaatccggcccggtgaatttgagcagtttgaatccaccatcggatttaagctgccaaatcatagagctgcaaagcgtctgtggaaagtgtgcgttgagcaccacacgttttttcggctgctactccctgaagcaccaccaaaaaagttcctgaccctgggctccaaattccggtactccggtagaacccaggctcagacccgtagagcttcagcacttatagaccggcctgccccctatttcgagagaagcagcagtaagaggtatactatgagcagatcccttgacggcgcctccgtcaatgagaaccacgaaatctatatgaaggacagtatgagcgcagccgaagtggggactggacagtacgcaacaaccaagggaattagccagactaacttgattaccaccgtcacacctgagaagaaggcagaagaggagcgagacgaagaagaagacaagcgcaggaagggtgaagaagtgacccctatatcagccatccgccatgagggcaaaaccgacagcgaaaggactgacaccgccgccgacggtgaaaccaccgcaacggaggagctcgaaaagacacaggatgatctgatgaagcaccagactaatatttcagaactgaaacgcacttttttggagacctcaactgacactgctgttacaaatgagtgggaaaagcggctatctacatctcctgtcagactggcggctagacaggaagacgcacccatgatagagccattagtaccagaagaaaaaatggagaccaaaacagaatccagcggaatcgagactgagcccactgtgcatcacctacccctgtctacagaaaaggtcgttcaagagaccgtcctcgtggaggagcgtagggtcgtacacgcgtcaggagatgccagctactcagccggagattccggcgatgctgccgcacaaccggcatttaccggcattaaaggcaaagagggcagcgcactgaccgagggtgccaaagaggaggggggtgaggaagtcgctaaggcagttcttgaacaggaagaaacagccgccgcctccagggaacgccaggaggagcagagtgccgccattcacatcagcgaaacactcgagcagaaacctcattttgagtcctccaccgtcaagacagaaacgatctcctttggttctgtgagccctggtggagtaaagctggaaatctctactaaggaggtgcctgttgtgcacaccgagacaaaaactataacctacgagtcctctcaggtggaccctgggactgatctggagcccggcgtcctcatgtccgcccagacaattaccagtgagactacaagtacaacaaccaccacccacatcactaaaactgtgaaaggtggcatctccgaaacccgcattgagaaacgtattgttattacaggcgatgcggacattgaccatgaccaggccctggcccaagccatcaaggaagctaaagagcaacatcccgacatgtccgtgacaaaggtggtggtccacaaagaaactgaaattacccctgaggacggagaggactag

SEQ ID NO: 99988 - DNA, 2598 bp, Artificial Sequence
  derived and/or modified sequence
atgactacagagagcggctccgatagcgagtctaaacccgaccaggaagctgagccccaggaggccgctggcgctcaggggcgagcaggcgctcctgtgccagaaccgccaaaagaggagcagcagcaagctctggagcaatttgcagccgcagctgcacactcaacacccgtgcggagggaggtcaccgataaggagcaggagttcgctgctagagccgcaaagcagctcgagtaccaacagctcgaggatgataagttaagccagaagagctccagcagcaagctctccaggtcacccttaaagattgtaaagaagccgaagtctatgcagtgcaaggtgattctactcgacggcagtgaatacacttgtgatgtggaaaagaggtctcgcggacaagttctatttgacaaagtatgtgagcatctgaatctgcttgaaaaggattacttcggtcttacatatagagacgccgagaatcagaaaaactggttagatcccgctaaagagattaagaagcaggtgcgctcaggagcctggcattttagctttaatgtcaagttttacccaccagatccggcacagttatcggaggacatcacaaggtattatctgtgcctgcagctgagggacgacatagtttccggacgcctgccatgctcattcgtgacgcttgcacttttggggtcctacacagtacagtcggaactgggggattatgatcctgatgagtgtggttcggactacatctcagaattcaggttcgctccaaaccatactaaagagttagaagataaggtgatcgagttgcacaagtcacaccgcggaatgactcctgctgaggctgagatgcacttcctggagaacgcaaaaaagctctccatgtatggagtagatcttcatcatgccaaggatagcgagggggtcgaaataatgcttggagtgtgtgcctcaggtttactcatttatagagatcgtctgaggatcaatcgattcgcatggcctaaggtgctgaaaatttcatataagcgcaacaatttctacattaaaattaggccgggagagttcgagcaatttgagtccactatcgggtttaaactgcctaatcatagggctgctaagagactgtggaaagtttgcgtcgagcaccacactttcttcaggctgcttctgccagaggccccaccaaagaaatttttgacgctcggaagcaaattccgctatagcggcagaacacaggcccagacccggcgagcatcggctcttatcgataggcccgctccgtattttgagcggagttcatctaaacgatatacaatgtcacgaagccttgatggggctagcgtaaatgaaaaccacgaaatatatatgaaggattccatgtcggccgctgaggtgggtaccggacagtatgcaaccaccaaaggcatctcccagacaaacctcatcacaaccgttaccccagaaaagaaggctgaggaagaaagagacgaagaagaggacaaacgtcggaaaggtgaagaagtaactcctatcagcgctattcgccacgagggcaaaacagacagcgaaaggacggacacggctgcagatggtgagaccacagcgaccgaggagctggagaaaactcaggacgatttgatgaagcatcagaccaacatctccgaactgaagaggaccttcctggagacctcgaccgacacagctgtgacgaacgaatgggagaaaagactctctaccagtcctgtacgtctcgcggcacggcaagaggatgctcctatgatcgagccactcgtgcccgaagagaaaatggaaaccaagacagagagctctgggattgagacggaacccaccgtccaccatctgccgctcagtaccgaaaaggttgtacaagaaacagtgctggtcgaagagcggagagtggtacatgcaagcggcgatgcttcttactctgctggagactctggtgacgctgccgcacaacccgcatttacaggaataaagggcaaagaaggcagcgccctgactgagggggctaaagaggaagggggagaagaagtggcgaaagccgtcctcgagcaggaagaaacagctgctgcctctagggagcgccaagaagaacagagtgcagccatccacatttctgagaccctggagcaaaaaccccacttcgagtcctcgactgtcaaaactgaaactatcagctttggttctgtttcacctggcggagtcaagcttgagatctcaaccaaggaggtgcccgtcgtgcacacagagacaaagacaattacctacgagagctctcaggtggacccaggcactgacctggagccaggtgttctaatgtccgcacagactattacaagcgagaccacgagcaccaccactaccacccacatcaccaagaccgtaaaaggcggaatcagcgagactcgaatcgagaagcgtatcgttatcaccggtgatgcagacattgatcacgaccaggcgctggctcaagcgattaaagaagccaaggaacagcaccccgatatgtctgtgactaaggtcgtggtgcacaaggagacagagattaccccggaggatggtgaggactag

SEQ ID NO: 99989 - DNA, 2598 bp, Artificial Sequence
  derived and/or modified sequence
atgaccaccgagagcggcagcgacagcgagagcaagcccgaccaggaggccgagccccaggaggccgccggcgcccagggcagagccggcgcccccgtgcccgagccccccaaggaggagcagcagcaggccctggagcagttcgccgccgccgccgcccacagcacccccgtgagaagagaggtgaccgacaaggagcaggagttcgccgccagagccgccaagcagctggagtaccagcagctggaggacgacaagctgagccagaagagcagcagcagcaagctgagcagaagccccctgaagatcgtgaagaagcccaagagcatgcagtgcaaggtgatcctgctggacggcagcgagtacacctgcgacgtggagaagagaagcagaggccaggtgctgttcgacaaggtgtgcgagcacctgaacctgctggagaaggactacttcggcctgacctacagagacgccgagaaccagaagaactggctggaccccgccaaggagatcaagaagcaggtgagaagcggcgcctggcacttcagcttcaacgtgaagttctacccccccgaccccgcccagctgagcgaggacatcaccagatactacctgtgcctgcagctgagagacgacatcgtgagcggcagactgccctgcagcttcgtgaccctggccctgctgggcagctacaccgtgcagagcgagctgggcgactacgaccccgacgagtgcggcagcgactacatcagcgagttcagattcgcccccaaccacaccaaggagctggaggacaaggtgatcgagctgcacaagagccacagaggcatgacccccgccgaggccgagatgcacttcctggagaacgccaagaagctgagcatgtacggcgtggacctgcaccacgccaaggacagcgagggcgtggagatcatgctgggcgtgtgcgccagcggcctgctgatctacagagacagactgagaatcaacagattcgcctggcccaaggtgctgaagatcagctacaagagaaacaacttctacatcaagatcagacccggcgagttcgagcagttcgagagcaccatcggcttcaagctgcccaaccacagagccgccaagagactgtggaaggtgtgcgtggagcaccacaccttcttcagactgctgctgcccgaggccccccccaagaagttcctgaccctgggcagcaagttcagatacagcggcagaacccaggcccagaccagaagagccagcgccctgatcgacagacccgccccctacttcgagagaagcagcagcaagagatacaccatgagcagaagcctggacggcgccagcgtgaacgagaaccacgagatctacatgaaggacagcatgagcgccgccgaggtgggcaccggccagtacgccaccaccaagggcatcagccagaccaacctgatcaccaccgtgacccccgagaagaaggccgaggaggagagagacgaggaggaggacaagagaagaaagggcgaggaggtgacccccatcagcgccatcagacacgagggcaagaccgacagcgagagaaccgacaccgccgccgacggcgagaccaccgccaccgaggagctggagaagacccaggacgacctgatgaagcaccagaccaacatcagcgagctgaagagaaccttcctggagaccagcaccgacaccgccgtgaccaacgagtgggagaagagactgagcaccagccccgtgagactggccgccagacaggaggacgcccccatgatcgagcccctggtgcccgaggagaagatggagaccaagaccgagagcagcggcatcgagaccgagcccaccgtgcaccacctgcccctgagcaccgagaaggtggtgcaggagaccgtgctggtggaggagagaagagtggtgcacgccagcggcgacgccagctacagcgccggcgacagcggcgacgccgccgcccagcccgccttcaccggcatcaagggcaaggagggcagcgccctgaccgagggcgccaaggaggagggcggcgaggaggtggccaaggccgtgctggagcaggaggagaccgccgccgccagcagagagagacaggaggagcagagcgccgccatccacatcagcgagaccctggagcagaagccccacttcgagagcagcaccgtgaagaccgagaccatcagcttcggcagcgtgagccccggcggcgtgaagctggagatcagcaccaaggaggtgcccgtggtgcacaccgagaccaagaccatcacctacgagagcagccaggtggaccccggcaccgacctggagcccggcgtgctgatgagcgcccagaccatcaccagcgagaccaccagcaccaccaccaccacccacatcaccaagaccgtgaagggcggcatcagcgagaccagaatcgagaagagaatcgtgatcaccggcgacgccgacatcgaccacgaccaggccctggcccaggccatcaaggaggccaaggagcagcaccccgacatgagcgtgaccaaggtggtggtgcacaaggagaccgagatcacccccgaggacggcgaggactag

SEQ ID NO: 99990 - DNA, 2826 bp, Artificial Sequence
  derived and/or modified sequence
gttatttgatttgccttggctgtggggaattctgtgctcagaagcaaggactggagcagtgaagtcattgtcctgcctggtgttgtgacatcactatggctcaaaggaaacaagggtggggcaggcaaaaccagaccatctgaagcatcttgctggctttaaaactttgcctgatcaatcaatgagactcctttctcaagttgaactgcattgcgagaacaatcaaccatgacgaccgaatctggatcagactcggaatccaagccggaccaggaggccgagccccaggaggcggcgggggcgcaggggcgcgcgggggcgcccgtgccggagccgcccaaggaggagcagcagcaggccctggagcagttcgccgccgctgcagcgcacagcaccccggtgcggagggaggtcactgacaaggaacaggagtttgctgccagggctgcaaaacagctcgaatatcagcaattagaagacgataaactttctcagaaatcatctagcagtaaactctctcggtctccattaaagattgtcaaaaagcctaaaagcatgcagtgcaaagtgatacttctcgatggatcagaatatacctgtgatgtagagaaacgctccagaggacaagtgctgtttgataaagtgtgtgaacacttgaacttgctagagaaagactactttgggcttacgtatcgagatgctgaaaaccagaagaattggttggaccctgctaaggaaataaaaaaacaggttcgaagtggtgcttggcacttttcatttaatgtgaaattttatccaccagaccctgcccaactatctgaagatatcaccaggtactacctctgcttgcagttgcgagatgacatcgtgtccggaaggctgccctgctcctttgttaccctggccttgctgggctcctacactgtccagtcagagctcggagactatgacccagatgaatgtgggagcgattacattagtgagttccgctttgcaccaaaccacactaaagaactggaagacaaagtgatcgagctgcacaagagccacagaggaatgacgccagcagaagcagagatgcatttcttggaaaatgccaaaaaattatcaatgtatggggtagatttacatcatgctaaggactcagaaggggtagaaattatgttaggagtttgtgcaagtggtctgttgatatatcgcgaccggctgcgaataaacagatttgcctggcccaaggttctaaagatttcatacaaacggaacaacttttacattaagatccggccgggagagtttgaacaatttgaaagcaccattgggtttaagctgccaaaccatcgagctgccaagcgtttatggaaagtatgtgttgagcatcatacatttttcagactactgttaccagaagcacctcccaagaaattcctaaccttgggttccaagtttcgttatagtggcaggacacaagcgcaaacgagaagagccagtgcgttgatagatcgcccagcaccttactttgaacgctcatccagcaaacgttataccatgtctcgcagcttggatggagcatcagtgaatgaaaaccatgaaatatacatgaaggattctatgtctgctgcagaggttggtactggccagtacgccacaacaaaaggcatctctcagaccaacttgatcaccactgtgactccggagaagaaggctgaggaggagcgggacgaggaagaggacaaacggaggaagggggaagaagtcacgcccatctcggccatccggcacgagggaaagactgacagtgagcgcacggacaccgcagccgacggggagaccactgccactgaggagctagaaaaaactcaagatgacctgatgaaacatcaaaccaacattagcgagctgaaaagaaccttcttagaaacctcaacagacactgccgtaacgaatgaatgggagaagaggctttccacctcccccgtgcgactggccgccaggcaggaggatgcccccatgatcgaaccacttgtccctgaagagaaaatggaaaccaagacggagtccagtggaatagagacggaacccaccgtgcaccacctgccgcttagcactgagaaggtggtgcaggagaccgtgttggtggaggagcggcgtgtggtgcacgcgagtggggatgcttcttactcggcgggagacagcggggatgctgcagcacagcccgcattcacaggcattaaagggaaagagggctctgccttgacggagggggctaaagaggaaggaggggaggaggtcgctaaagctgtcctggaacaggaagagacagccgctgcttcccgtgagcgacaagaggagcagagtgcagccatccacatttcagaaactttggaacaaaaacctcattttgagtcctcaacggtgaagacggaaaccatcagttttggcagtgtttcaccgggaggagtaaagctagaaatttccacgaaggaagtgccagtagttcacaccgaaaccaaaaccatcacatatgaatcatcacaggtcgatccaggcacagatctggagccaggcgtgctgatgagtgcacagacgatcacatctgaaaccaccagtaccaccaccactacgcacatcaccaaaactgtgaaagggggcatttcagagacaagaattgagaagcgaatagtcatcacgggggatgcagacattgaccatgaccaggcgctggctcaggcaattaaagaggccaaagagcagcaccctgacatgtcagtgaccaaagtagtggtccataaagagacagagatcacaccagaagatggagaggattga

SEQ ID NO: 99991 - DNA, 3771 bp, Artificial Sequence
  derived and/or modified sequence
ttcctccccacgcccgagtctcctgcgcaccgccgccgaggacgcgcgcccgagcctagtccccacgccgcggcgcgcccgggctccctgctgatcccagaacaatcaaccatgacgaccgaatctggatcagactcggaatccaagccggaccaggaggccgagccccaggaggcggcgggggcgcaggggcgcgcgggggcgcccgtgccggagccgcccaaggaggagcagcgcacagcaccccggtgcggagggaggtcactgacaaggaacaggagtttgctgccagggctgcaaaacagctcgaatatcagcaattagaagacgataaactttctcagaaatcatctagcagtaaactctctcggtctccattaaagattgtcaaaaagcctaaaagcatgcagtgcaaagtgatacttctcgatggatcagaatatacctgtgatgtagagaaacgctccagaggacaagtgctgtttgataaagtgtgtgaacacttgaacttgctagagaaagactactttgggcttacgtatcgagatgctgaaaaccagaagaattggttggaccctgctaaggaaataaaaaaacaggttcgaagtggtgcttggcacttttcatttaatgtgaaattttatccaccagaccctgcccaactatctgaagatatcaccaggtactacctctgcttgcagttgcgagatgacatcgtgtccggaaggctgccctgctcctttgttaccctggccttgctgggctcctacactgtccagtcagagctcggagactatgacccagatgaatgtgggagcgattacattagtgagttccgctttgcaccaaaccacactaaagaactggaagacaaagtgatcgagctgcacaagagccacagaggaatgacgccagcagaagcagagatgcatttcttggaaaatgccaaaaaattatcaatgtatggggtagatttacatcatgctaaggactcagaaggggtagaaattatgttaggagtttgtgcaagtggtctgttgatatatcgcgaccggctgcgaataaacagatttgcctggcccaaggttctaaagatttcatacaaacggaacaacttttacattaagatccggccgggagagtttgaacaatttgaaagcaccattgggtttaagctgccaaaccatcgagctgccaagcgtttatggaaagtatgtgttgagcatcatacatttttcagactactgttaccagaagcacctcccaagaaattcctaaccttgggttccaagtttcgttatagtggcaggacacaagcgcaaacgagaagagccagtgcgttgatagatcgcccagcaccttactttgaacgctcatccagcaaacgttataccatgtctcgcagcttggatggagcatcagtgaatgaaaaccatgaaatatacatgaaggattctatgtctgctgcagaggttggtactggccagtacgccacaacaaaaggcatctctcagaccaacttgatcaccactgtgactccggagaagaaggctgaggaggagcgggacgaggaagaggacaaacggaggaagggggaagaagtcacgcccatctcggccatccggcacgagggaaagactgacagtgagcgcacggacaccgcagccgacggggagaccactgccactgaggagctagaaaaaactcaagatgacctgatgaaacatcaaaccaacattagcgagctgaaaagaaccttcttagaaacctcaacagacactgccgtaacgaatgaatgggagaagaggctttccacctcccccgtgcgactggccgccaggcaggaggatgcccccatgatcgaaccacttgtccctgaagagaaaatggaaaccaagacggagtccagtggaatagagacggaacccaccgtgcaccacctgccgcttagcactgagaaggtggtgcaggagaccgtgttggtggaggagcggcgtgtggtgcacgcgagtggggatgcttcttactcggcgggagacagcggggatgctgcagcacagcccgcattcacaggcattaaagggaaagagggctctgccttgacggagggggctaaagaggaaggaggggaggaggtcgctaaagctgtcctggaacaggaagagacagccgctgcttcccgtgagcgacaagaggagcagagtgcagccatccacatttcagaaactttggaacaaaaacctcattttgagtcctcaacggtgaagacggaaaccatcagttttggcagtgtttcaccgggaggagtaaagctagaaatttccacgaaggaagtgccagtagttcacaccgaaaccaaaaccatcacatatgaatcatcacaggtcgatccaggcacagatctggagccaggcgtgctgatgagtgcacagacgatcacatctgaaaccaccagtaccaccaccactacgcacatcaccaaaactgtgaaagggggcatttcagagacaagaattgagaagcgaatagtcatcacgggggatgcagacattgaccatgaccaggcgctggctcaggcaattaaagaggccaaagagcagcaccctgacatgtcagtgaccaaagtagtggtccataaagagacagagatcacaccagaagatggagaggattgaccagaggaataacttagcttgcacatgaatgcagtcatgcaaaccgttaggaaaaccagagcctatatggagttccctcttctaacccaactgacttgtatctgtccgtggaaaatttcagtccagaagaattgaccttgaccattaataaagacactggcagagagatcttcccataataaagcaatctgattcagcatcactaaaccgataatgcatgaagcaacgataaaattacaaaagagcagcatttttaattttcacaaaatgtctcagttttcagctatacctgcacgttcataaccaacaatataaaccgtggtctcatgtaacacataaacaattcatgcctttcatagtttattattattaaagtctaaacaaaattgcaatttcttaggtaaccttatatttacaataaatgaagattaccctcaaatgctagaagctgtctaggtccgtccggtgtgtcagattttcctcagattagatgtgccaataaccaagtttattcagtaaacaacttgtacttgtttcatctggttttattactctcacccataaacagtaatgactctctgaccctctggaaatatgtaatgcttccaatcttgctttgtgtatctcatttaatttgttataaggtagtactgattttagcatattaatgcgatttcttccttgttgtttgctttggtctgtgttcaatccagagagcttaaattgtcattattttgggaagaaaacctgtatttttgttagtttacaatattatgaaatttcacttcaggagaaactgctgggcttcctgtggctttgttttcttagttactttttccgtgccgtgtattttttaattgatttttcttcttttacttgaaaagaaagtgttttattttcaaatctggtccatatttacattctagttcagagccaagccttaaactgtacagaatttccactgtaattaaaactatttagtgttagttataaatagccttcaaaaagagagattctccattacacgatcacctgcatcacagcccatggtgaatgtatgtttctgcatagcgaaataaaaatggcaaatgcactg

SEQ ID NO: 99992 - DNA, 2083 bp, Artificial Sequence
  derived and/or modified sequence
aggtggcaacttggaggtgccgccaccgcagctgcgggaggagcccgggtctggcggccccttccagcctccaggagctctttcccgccgccgagcccgagactggaccccggagaattcgaaggaaagagcccctgcggagggacctgtgagcagccctacctctctctgcccttgcgctactttttttctccaaggaaggttgtgcctgcgggctgcgaacaagctccgggaggggccccaaaggaaggcttcggtgactcagactcggaatccaagccggaccaggaggccgagccccaggaggcggcgggggcgcaggggcgcgcgggggcgcccgtgccggagccgcccaaggaggagcagcagcaggccctggagcagttcgccgccgctgcagcgcacagcaccccggtgcggagggaggtcactgacaaggaacaggagtttgctgccagggctgcaaaacagctcgaatatcagcaattagaagacgataaactttctcagaaatcatctagcagtaaactctctcggtctccattaaagattgtcaaaaagcctaaaagcatgcagtgcaaagtgatacttctcgatggatcagaatatacctgtgatgtagagaaacgctccagaggacaagtgctgtttgataaagtgtgtgaacacttgaacttgctagagaaagactactttgggcttacgtatcgagatgctgaaaaccagaagaattggttggaccctgctaaggaaataaaaaaacaggttcgaagtggtgcttggcacttttcatttaatgtgaaattttatccaccagaccctgcccaactatctgaagatatcaccaggtactacctctgcttgcagttgcgagatgacatcgtgtccggaaggctgccctgctcctttgttaccctggccttgctgggctcctacactgtccagtcagagctcggagactatgacccagatgaatgtgggagcgattacattagtgagttccgctttgcaccaaaccacactaaagaactggaagacaaagtgatcgagctgcacaagagccacagaggaatgacgccagcagaagcagagatgcatttcttggaaaatgccaaaaaattatcaatgtatggggtagatttacatcatgctaaggactcagaaggggtagaaattatgttaggagtttgtgcaagtggtctgttgatatatcgcgaccggctgcgaataaacagatttgcctggcccaaggttctaaagatttcatacaaacggaacaacttttacattaagatccggccgggagagtttgaacaatttgaaagcaccattgggtttaagctgccaaaccatcgagctgccaagcgtttatggaaagtatgtgttgagcatcatacatttttcagactactgttaccagaagcacctcccaagaaattcctaaccttgggttccaagtttcgttatagtggcaggacacaagcgcaaacgagaagagccagtgcgttgatagatcgcccagcaccttactttgaacgctcatccagcaaacgttataccatgtctcgcagcttggatggagcatcagtgaatgaaaaccatgaaatatacatgaaggattctatgtctgctgcagaggttggtactggccagtacgccacaacaaaaggcatctctcagaccaacttgatcaccactgtgactccggagaagaaggctgaggaggagcgggacgaggaagaggacaaacggaggaagggggaagaagtcacgcccatctcggccatccggcacgagggaaagactgacagtgagcgcacggacaccgcagccgacggggagaccactgccactgaggagctagaaaaaactcaagatgacctgatgaaacatcaaaccaacattagcgagctgaaaagaaccttcttagaaacctcaacagacactgccgtaacgaatgaatgggagaagaggctttccacctcccccgtgcgactggccgccaggcaggaggatgcccccatgatcgaaccacttgtccctgaagagaaaatggaaaccaagacggagtccagtggaatag

SEQ ID NO: 99993 - DNA, 3190 bp, Artificial Sequence
  derived and/or modified sequence
ctttggcgcgtcctgctcagaagccggggagctcctggccggcggctggcggggaagcgcggcgcgggaggaggtattgggagacaaaagaagctcatctataaacattttccatgaatcaagcagaaacttgggttttaaaggattcgcatagaacgggatgccacaggcaaggacagatcccctgaggctgtggaatgagtggggacatccccgcccatctctggtcttgactcggaatccaagccggaccaggaggccgagccccaggaggcggcgggggcgcaggggcgcgcgggggcgcccgtgccggagccgcccaaggaggagcagcagcaggccctggagcagttcgccgccgctgcagcgcacagcaccccggtgcggagggaggtcactgacaaggaacaggagtttgctgccagggctgcaaaacagctcgaatatcagcaattagaagacgataaactttctcagaaatcatctagcagtaaactctctcggtctccattaaagattgtcaaaaagcctaaaagcatgcagtgcaaagtgatacttctcgatggatcagaatatacctgtgatgtagagaaacgctccagaggacaagtgctgtttgataaagtgtgtgaacacttgaacttgctagagaaagactactttgggcttacgtatcgagatgctgaaaaccagaagaattggttggaccctgctaaggaaataaaaaaacaggttcgaagtggtgcttggcacttttcatttaatgtgaaattttatccaccagaccctgcccaactatctgaagatatcaccaggtactacctctgcttgcagttgcgagatgacatcgtgtccggaaggctgccctgctcctttgttaccctggccttgctgggctcctacactgtccagtcagagctcggagactatgacccagatgaatgtgggagcgattacattagtgagttccgctttgcaccaaaccacactaaagaactggaagacaaagtgatcgagctgcacaagagccacagaggaatgacgccagcagaagcagagatgcatttcttggaaaatgccaaaaaattatcaatgtatggggtagatttacatcatgctaaggactcagaaggggtagaaattatgttaggagtttgtgcaagtggtctgttgatatatcgcgaccggctgcgaataaacagatttgcctggcccaaggttctaaagatttcatacaaacggaacaacttttacattaagatccggccgggagagtttgaacaatttgaaagcaccattgggtttaagctgccaaaccatcgagctgccaagcgtttatggaaagtatgtgttgagcatcatacatttttcagactactgttaccagaagcacctcccaagaaattcctaaccttgggttccaagtttcgttatagtggcaggacacaagcgcaaacgagaagagccagtgcgttgatagatcgcccagcaccttactttgaacgctcatccagcaaacgttataccatgtctcgcagcttggatggagcatcagtgaatgaaaaccatgaaatatacatgaaggattctatgtctgctgcagaggttggtactggccagtacgccacaacaaaaggcatctctcagaccaacttgatcaccactgtgactccggagaagaaggctgaggaggagcgggacgaggaagaggacaaacggaggaagggggaagaagtcacgcccatctcggccatccggcacgagggaaagactgacagtgagcgcacggacaccgcagccgacggggagaccactgccactgaggagctagaaaaaactcaagatgacctgatgaaacatcaaaccaacattagcgagctgaaaagaaccttcttagaaacctcaacagacactgccgtaacgaatgaatgggagaagaggctttccacctcccccgtgcgactggccgccaggcaggaggatgcccccatgatcgaaccacttgtccctgaagagaaaatggaaaccaagacggagtccagtggaatagagacggaacccaccgtgcaccacctgccgcttagcactgagaaggtggtgcaggagaccgtgttggtggaggagcggcgtgtggtgcacgcgagtggggatgcttcttactcggcgggagacagcggggatgctgcagcacagcccgcattcacaggcattaaagggaaagagggctctgccttgacggagggggctaaagaggaaggaggggaggaggtcgctaaagctgtcctggaacaggaagagacagccgctgcttcccgtgagcgacaagaggagcagagtgcagccatccacatttcagaaactttggaacaaaaacctcattttgagtcctcaacggtgaagacggaaaccatcagttttggcagtgtttcaccgggaggagtaaagctagaaatttccacgaaggaagtgccagtagttcacaccgaaaccaaaaccatcacatatgaatcatcacaggtcgatccaggcacagatctggagccaggcgtgctgatgagtgcacagacgatcacatctgaaaccaccagtaccaccaccactacgcacatcaccaaaactgtgaaagggggcatttcagagacaagaattgagaagcgaatagtcatcacgggggatgcagacattgaccatgaccaggcgctggctcaggcaattaaagaggccaaagagcagcaccctgacatgtcagtgaccaaagtagtggtccataaagagacagagatcacaccagaagatggagaggattgaccagaggaataacttagcttgcacatgaatgcagtcatgcaaaccgttaggaaaaccagagcctatatggagttccctcttctaacccaactgacttgtatctgtccgtggaaaatttcagtccagaagaattgaccttgaccattaataaagacactggcagagagatcttcccataataaagcaatctgattcagcatcactaaaccgataatgcatgaagcaacgataaaattacaaaagagcagcatttttaattttcacaaaatgtctcagttttcagctatacctgcacgttcataaccaacaatataaaccgtggtctcatgtaacacataaacaattcatgcctttcatagtttattattattaaagtctaaac

SEQ ID NO: 99994 - DNA, 2271 bp, Artificial Sequence
  derived and/or modified sequence
atgcaatgcaaagtgatccttttagatggttccgagtatacgtgcgatgtagaaaagcgatccaggggtcaggttctttttgataaggtatgtgagcacctgaacctgctggagaaagactactttggattaacgtaccgtgatgccgaaaatcagaaaaactggctggaccccgctaaggagattaagaaacaggttagaagcggcgcctggcactttagctttaatgtgaaattttatccacccgaccccgcacagttatcagaggatataacgcgatactatctgtgtcttcagctgagggatgacattgtaagtggaagactgccgtgttcatttgtgacgctggccctgttaggcagctataccgtgcagagcgagttaggagactatgatccagacgagtgtggctctgattatattagcgaattccggtttgctccaaatcacacaaaggaattggaagacaaagtgatcgaacttcataagagccaccgtggcatgacacccgcggaggcagaaatgcatttcctagagaatgccaagaagctgtctatgtatggcgtcgacctgcaccacgctaaggacagcgaaggggttgaaatcatgttaggtgtctgtgcctctggactgctgatttaccgggataggctgcggatcaaccggtttgcctggcctaaggtgttgaagatatcatacaagaggaataacttctacatcaaaataaggccaggagagttcgagcaattcgagagcactatagggtttaagcttcccaaccaccgggctgctaagcgattgtggaaggtgtgcgtggagcaccacactttctttaggctcctgcttcctgaagctccccctaagaaatttctgactttgggcagtaagttcagatattccgggcggactcaggctcagactcgccgtgcttcagctctgattgataggcctgccccatattttgagcggtccagtagcaaacggtatacaatgagccgttcactcgacggcgcgagtgtcaatgagaaccacgaaatctacatgaaagattccatgagtgcagccgaagtgggtactggtcagtacgctaccacaaaagggattagccagacaaatctcataacaaccgtcacacctgagaagaaggcagaggaggaaagggatgaggaggaggataaaaggagaaaaggcgaagaagtaacaccgatatcagccattcgtcatgagggtaaaaccgattcagaacgcaccgataccgccgcggacggcgagactacagcaactgaggaattagagaaaacccaagatgacctcatgaagcatcaaacaaatatcagcgagctgaaaagaacttttctggaaacgtctaccgacaccgctgtgaccaacgaatgggagaaacgcctgtctacttctcctgtgagactagcggcccggcaggaagatgcacccatgatcgagcctctggtacccgaggagaagatggaaactaagaccgagtctagcgggatcgaaaccgaacccacagtgcatcacctcccactgagcacagaaaaggtggtgcaggagaccgtcctagttgaagaacggcgcgtagtccacgcatccggggatgcttcttacagcgcaggagattcaggcgatgcagccgcccagcctgcttttaccggcattaagggcaaggaaggatccgccctcaccgaaggggctaaggaagagggtggagaggaagtggcgaaggcagtgttggagcaggaagagacagcagcagctagtagagagaggcaggaagaacagtccgcagccatacatatcagtgaaaccctcgagcagaaacctcactttgaaagctccactgtgaagactgagaccataagttttggctccgtgagccccggcggggtcaaactagaaatttcaacaaaggaagtgccagttgttcatactgaaaccaagacaatcacatacgagtcaagccaggtggaccccggcacagacttagaacctggtgtcttgatgagcgcccagacaatcacttcagaaactaccagcactactacgacaacccacattacaaagaccgtgaaggggggaatatcagagacacgaattgagaaaaggatagtcattacgggcgatgctgacattgatcacgaccaggcattagcacaggctatcaaagaagcaaaagagcagcatcccgacatgtcagtcacaaaggtcgtcgttcacaaggaaaccgagatcacaccagaagacggtgaagactag

SEQ ID NO: 99995 - DNA, 2271 bp, Artificial Sequence
  derived and/or modified sequence
atgcagtgcaaagttatactactggacggatccgaatatacctgtgatgtcgagaaacgaagccgcggtcaggtgttatttgacaaggtctgtgagcatcttaacctcctcgagaaagattattttggtctcacctaccgagacgcagaaaatcaaaaaaactggctggaccctgcaaaggagatcaagaaacaagtcagatctggagcatggcatttctccttcaacgttaagttttacccacctgacccagctcagctatcagaagacattactcgatactatctttgcctccaactgcgcgatgacatagtatcaggacgactgccctgctcattcgtgacgctcgcattgcttgggagctacactgtccaaagtgagctgggtgattacgacccggacgaatgcggttctgactacatttccgagttcagatttgctcccaatcacaccaaggaactggaagataaggtgatcgaactccacaagtcacaccgcggcatgaccccagctgaggcggaaatgcacttcctggaaaacgccaaaaaactgtccatgtatggcgtcgatctccatcatgccaaggacagcgagggtgtggaaattatgcttggcgtttgtgctagcggattactgatctaccgggacaggctcagaatcaatcgcttcgcctggcccaaagtgcttaaaatcagttataagaggaataacttctacattaaaatcagacccggagaattcgaacagttcgagtctaccattggattcaagctgcccaaccacagggcagcgaaacgactttggaaagtttgtgtggagcaccacacattttttagactgctactgccagaggcacctcctaagaagttcctgaccttgggaagcaaatttcgctactccggccgtactcaagctcagaccaggcgggcttcagccctgatcgatagaccagctccctactttgagagaagctctagcaagcgctacactatgagcagatccctcgatggagcttcagtgaacgaaaaccacgaaatttacatgaaagacagtatgagcgccgcagaagtggggactggacagtacgccacgaccaaaggcatcagtcagacgaacctcattaccaccgttacccctgaaaaaaaggctgaggaggagcgcgatgaggaggaggacaaaagaagaaagggcgaggaagttacccctattagcgctatccggcacgaggggaaaacagattcagagcgtaccgacacagccgcggatggggagacaacagccacggaagagctcgagaagactcaagacgatctgatgaaacaccagacaaatattagcgaactgaagcgcacattccttgagacttcaacggacaccgcggtcacgaacgagtgggagaagcgcctgagtacttcgccggtgcgactggccgcacgccaggaggatgcccctatgatcgagccgttggtgccagaagagaagatggaaacaaagaccgagagctcagggattgaaactgagcccacagtccaccacctgcccctgagcacggagaaagtggttcaagaaactgtgttagtggaagaaagaagagtcgttcacgcctccggcgatgcctcttacagtgccggtgactcaggcgatgccgctgcacagcccgcattcaccggcatcaaaggtaaagagggcagcgccttaacagaaggcgcaaaggaagaggggggggaggaagtggccaaagcagtcctggaacaagaggagaccgctgccgccagtcgggagaggcaggaagaacagtccgccgccatccacatctcagagaccctcgaacagaaacctcactttgagtcttcgaccgtcaaaacggagaccatcagcttcggatcagtttctccaggcggcgtgaaacttgaaatttccaccaaggaggtccccgtggtgcatacagagaccaaaacaataacctacgagtcctcacaggtcgatcccggaacagatctggaaccaggcgtcctgatgagcgcccagaccatcacaagtgaaacgacctctactacaaccacgacccatattactaaaacagttaagggaggaatcagcgaaacccgcattgaaaagcgtattgtgataactggtgatgctgacattgaccacgatcaagctctcgcccaggctatcaaggaagctaaggagcagcacccagatatgtccgtcacaaaagttgtggtacacaaagagacagaaatcactcctgaggatggagaggactag

SEQ ID NO: 99996 - DNA, 2271 bp, Artificial Sequence
  derived and/or modified sequence
atgcagtgcaaggtgatcctgctggatggcagcgagtacacctgtgatgtggagaagaggagccggggccaggtgctgtttgacaaggtgtgtgagcacctgaacctgctggagaaggactacttcggcctgacctacagagatgctgagaaccagaagaactggctggaccctgccaaggagatcaagaagcaggtgcgcagcggggcctggcacttctccttcaacgtgaagttctaccccccagaccctgcccagctgtctgaggacatcacccgctactacctgtgcctgcagctgagagatgacatcgtgtctggccgcctgccctgcagctttgtgaccctggccctgctgggcagctacacagtgcagagcgagctgggggactatgaccctgatgaatgtggcagtgactacatcagcgagttccgctttgcccccaaccacaccaaggagctggaggacaaggtgattgagctgcacaagagccaccggggcatgaccccagctgaggccgagatgcacttcctggagaatgccaagaagctgtccatgtatggagtggacctgcaccacgccaaggacagcgagggcgtggagatcatgctgggcgtgtgtgccagcggcctgctgatctacagagaccggctgcgcatcaacagatttgcctggcccaaggtgctgaagatctcctacaagaggaacaacttctacatcaagatccggcctggagaatttgagcagtttgagagcaccatcggcttcaagctgcccaaccacagagctgccaagaggctgtggaaggtgtgtgtggagcaccacaccttcttccggctgctgctgcctgaggccccacccaagaagttcctgaccctgggcagcaagttccgctacagcggccgcacccaggcccagacccggcgggccagcgccctgattgacaggcctgccccctactttgagaggagcagcagcaagcgctacaccatgagccgcagcctggatggagcctctgtgaatgaaaaccacgagatctacatgaaggacagcatgtctgctgctgaggtgggcaccggccagtatgccaccaccaagggcatcagccagaccaacctgatcaccaccgtgaccccagagaagaaggccgaggaggagagagatgaggaggaggacaagaggaggaagggggaggaggtgacccccatcagcgccatcagacatgagggcaagacagacagcgagaggacagacacagctgctgatggagagaccacagccacagaggagctggagaagacccaggatgacctgatgaagcaccagaccaacatcagcgagctgaagaggaccttcctggagaccagcacagacacagctgtgaccaatgagtgggagaagaggctgagcaccagccctgtgcggctggccgcccggcaggaggatgcccccatgattgagcccctggtgcctgaggagaagatggagaccaagacagagagcagcggcatcgagacagagcccaccgtgcaccacctgcccctgagcacagagaaggtggtgcaggagaccgtgctggtggaggagcggcgggtggtgcacgccagcggagatgccagctacagcgctggggacagcggagatgctgctgcccagcctgccttcaccggcatcaagggcaaggagggcagcgccctgacagaaggagccaaggaggagggcggggaggaggtggccaaggctgtgctggagcaggaggagacagctgctgccagccgggagcggcaggaggagcagagcgctgccatccacatcagcgagaccctggagcagaagccccactttgagagcagcacagtgaagacagagaccatcagctttggatctgtgtcccctgggggcgtgaagctggagatcagcaccaaggaggtgcctgtggtgcacacagagaccaagaccatcacctatgagagcagccaggtggaccctggaacagacctggagcccggggtgctgatgtctgcccagaccatcaccagcgagaccaccagcaccaccaccaccacccacatcaccaagacagtgaagggcggcatcagcgagacccgcatcgagaagagaattgtcatcactggagatgctgacatcgaccatgaccaggccctggcccaggccatcaaggaggccaaggagcagcacccagacatgtctgtgaccaaggtggtggtgcacaaggagacagagatcaccccagaagatggagaagattag

SEQ ID NO: 99997 - DNA, 2271 bp, Artificial Sequence
  derived and/or modified sequence
atgcagtgcaaggtgatcctgctggacggcagcgagtacacctgcgacgtagagaaaaggagcaggggccaggtgctgttcgataaagtttgtgagcatttgaatctcttggaaaaagactattttgggctgacctatcgcgacgccgagaaccagaagaattggttggaccccgcgaaggagattaagaagcaagtccggagcggagcctggcacttcagctttaacgtgaagttctatccacccgaccctgcacaactttctgaagacattacacgatactacttgtgtctccagctgcgcgatgatattgtgtcaggacgtttgccatgctcatttgtcactctagcgctccttggatcatacaccgtacagtctgaattgggcgactatgatcccgatgagtgcgggtctgattatatttctgagttcaggttcgctccaaatcataccaaagaacttgaagataaggtcatcgagcttcacaagtcacacagggggatgacacccgctgaggcggaaatgcacttcctcgagaatgcaaaaaaattgtctatgtacggcgtagatctgcaccacgctaaagactccgaaggagtggagattatgctcggagtatgtgcgagcggactgttgatatatagggacaggttgagaattaatagatttgcctggcctaaagtcttgaagattagctacaagagaaacaatttttacatcaaaatcagacccggcgagtttgaacagttcgaaagcaccatcggatttaagctgccaaatcaccgcgcggcaaagaggctctggaaagtttgcgttgagcaccacacattctttcggctgttgctccctgaagcccctcccaaaaagtttctgaccctggggagcaagttcagatattctgggcgtacccaggctcagactagaagagcttcagcactgatagaccgaccagcaccttatttcgaaagaagtagctcaaaaagatatacaatgtcaagaagcctggatggggcgagtgtcaacgaaaatcacgaaatttacatgaaagattctatgagcgccgccgaagtggggaccggacagtatgccaccaccaaaggaatttctcagactaaccttataacaacagtgacaccagaaaagaaggccgaggaggagcgcgacgaggaggaggacaaaagacggaaaggagaggaggtcacacccatatcagccatacgacacgagggcaagaccgactcagaacggaccgacaccgccgccgatggtgagacgactgccacggaggagttggaaaaaacgcaggatgatcttatgaaacatcagactaacattagcgagcttaaacggaccttcctggaaacctcgaccgacacagcagtcaccaacgaatgggagaaaaggctgtccacgtcccccgtgcgcctggctgcacgtcaagaagacgcacccatgatcgagcctctcgtacctgaggaaaagatggagacgaaaactgagtccagtggtatcgaaaccgagcccacagtccatcaccttccactcagcaccgagaaagtcgtgcaggagactgttcttgtggaggaacggagagtagttcacgcttcaggggacgcctcttattcagccggagattccggtgacgcggccgcacagcccgccttcacggggatcaaagggaaggagggttcagccctgaccgaaggcgcgaaggaggagggtggcgaggaagtggctaaagccgtactggaacaggaagagaccgctgctgcatctagggagaggcaggaagagcagtccgccgccatccatatttccgagactctcgaacagaagcctcacttcgagagcagcaccgtgaagacagaaacaatctctttcggatcagtatctcccgggggggttaaattggaaattagcaccaaggaggtgcccgtcgtgcacactgagactaagacaattacctacgagtcgtcccaagttgacccaggcacagacctggaacctggtgtccttatgagcgctcagaccatcaccagtgagactacctctaccactactacgactcacatcaccaagaccgtgaagggcggtatctctgagacccggatcgagaagcgcattgttattacaggagacgcggatatcgatcatgatcaggctttagctcaggctattaaggaagctaaggagcaacatcccgatatgtccgttaccaaagtggtggtgcacaaggaaactgagattacacccgaggatggagaggattag

SEQ ID NO: 99998 - DNA, 2271 bp, Artificial Sequence
  derived and/or modified sequence
atgcagtgcaaggtgatcctgctggacggcagcgagtacacctgcgacgtggagaagagatccaggggtcaggtgctgtttgacaaagtgtgcgagcatctcaatctgcttgagaaggactattttggtctgacctatcgagatgcggagaaccaaaaaaactggctggacccagccaaagagatcaagaaacaggttcgtagcggcgcctggcatttttccttcaacgtgaaattctaccccccagatcccgcacagctaagcgaggacatcactcggtactatctgtgtttacagctgcgggacgatatagtttccggcaggctgccctgctccttcgtgaccctggcactgctgggctcctacactgtgcagagtgagttgggggactacgatcctgatgaatgtgggtccgactatatttctgagttcagatttgcgccaaatcacaccaaggaactcgaggataaagtgattgagctccacaaaagtcacaggggtatgacaccggccgaggcagaaatgcacttcttggaaaatgccaagaagctcagcatgtacggggtggaccttcatcacgcaaaagatagtgagggagtggaaattatgctcggggtttgcgcatcgggcctcttgatctatcgcgatcggttaaggatcaataggttcgcctggccaaaggtactgaagatcagctacaaacggaacaacttttatatcaagataagacccggagagtttgagcagttcgagagtacaataggcttcaagcttcccaaccatagagccgctaagagactgtggaaagtctgcgtggagcaccacacttttttccgcctgctgctccccgaagcacctccaaaaaaattcctgactcttggatccaaatttagatactccgggagaacccaggctcagacccgccgagctagcgccttgatcgaccgtccggcaccctatttcgagcggagcagtagtaaaaggtacactatgagtagatcgttagacggggcatcagtcaatgaaaatcatgaaatttacatgaaagattcaatgtccgccgctgaggtgggaacaggacagtacgccacgacgaagggcatctcccagaccaacctcatcacaaccgtgacccctgagaaaaaagccgaagaggagagagacgaggaggaggacaaacgtcgaaagggggaggaagtcacccctatctcagccatccggcatgagggcaaaacggattccgagcgaaccgatactgctgccgacggcgagaccacagccaccgaagagttagagaaaactcaagatgacctgatgaaacatcaaacaaatatctcagagcttaaaagaacctttctggaaacatctacagacacagcagtcacgaacgagtgggagaaaagactctcaacctctcctgttcggctcgctgccaggcaggaagatgcacctatgatagagccactggtccccgaggagaaaatggaaaccaagacagaatcttccggtatcgaaacagaaccaacagtacatcatcttcccttgtccacagagaaggtggtgcaggagacagttctggttgaggaaagacgggtagttcatgcatccggagacgcgtcttactccgccggcgattcaggggacgccgcggcacagccagcatttaccggcatcaagggcaaagagggctcagctttgacagagggagccaaggaggagggcggcgaggaagtggcgaaagcggtgctggagcaggaagagactgccgcagcatccagggagcgccaagaagagcaatctgcggccattcatatctctgagacattagaacagaagccccactttgaatcctcaaccgtgaaaactgagaccatcagcttcgggagtgtgtccccgggcggcgtgaaactggagatctcaaccaaagaagtgccagtggtgcacaccgaaaccaagacgatcacttacgagtctagtcaggtcgatccaggcacagatcttgagccaggtgttctgatgagtgcccagaccataacatcagagaccacgtcgactacaaccaccacccacatcaccaagacggtgaaagggggtatcagcgaaacacgtattgagaagcggattgtcatcactggggatgccgacattgaccacgatcaagctttggcccaagcaatcaaagaggccaaagaacagcaccccgatatgagcgtcacaaaagttgtcgtgcacaaggaaacagaaataacgcctgaggatggagaggattag

SEQ ID NO: 99999 - DNA, 2271 bp, Artificial Sequence
  derived and/or modified sequence
atgcaatgcaaggtgatcctgttggatggatctgagtacacttgcgatgtggagaagagatcacgcggacaggtgctattcgataaagtgtgcgagcacctgaacttactggagaaagattatttcggtcttacatatcgcgacgctgagaaccagaaaaactggctcgatcctgcaaaggagataaaaaaacaggtgaggtcgggcgcatggcatttcagctttaatgtgaaattctacccgccagatcccgcacagctgagcgaggacatcacccgctactatctatgcttacagctgcgtgacgatattgtttctggccgactcccttgctccttcgtgacactcgccttattaggcagttatactgtgcagagtgaactgggggactacgatccggacgagtgtggcagcgattacatcagcgagtttaggttcgcccctaatcatactaaagagcttgaagacaaggtgatcgagctacacaaatcccatcggggtatgactccagccgaagctgaaatgcatttcttggagaatgccaagaaactttccatgtatggggtggacctgcaccatgccaaagattcggagggcgtggagatcatgctgggggtgtgtgccagcgggctgctgatctatcgcgacagactaaggatcaaccgatttgcatggcctaaggtccttaagatctcctacaagcggaacaacttctacattaaaatcagaccaggagaattcgaacagtttgagtccacgattggttttaaacttcccaatcaccgggcagcaaagcgcctgtggaaggtctgcgtggagcatcataccttttttcgcctgcttctgccggaggctcctcctaaaaagttcctgacactaggatccaagttccgctactcaggcaggactcaggctcagacacgccgtgcgagcgcactgatagataggcccgctccctacttcgagcggtcctcttccaagaggtacaccatgtctagaagtttggacggcgcttcggtcaacgaaaaccacgagatttatatgaaggactcaatgtcagccgcagaggtcgggaccgggcagtacgccactacaaagggtatcagtcagacaaacctcataaccacagtgactcctgagaaaaaagccgaagaagaacgcgacgaagaggaggacaagagaaggaagggtgaggaagtgactccaatttctgcaatcaggcatgagggtaagaccgattcagagagaacagataccgccgctgacggcgagacaaccgccacagaagagttggagaaaactcaggacgacctcatgaaacatcaaaccaatattagcgagctcaagcgaacatttttggaaacctctacagataccgcagttaccaacgaatgggaaaagcggctgtcaacatccccggtccgtctggctgccaggcaggaggatgcacccatgatagaaccgctggtgcccgaggagaaaatggaaaccaaaactgagtccagcggcatcgaaacagagccaacagtgcatcatctcccattatcaacagaaaaagtagtgcaagaaacagtgctggttgaagagagaagggtcgttcacgcctctggcgacgccagctattcagccggagattccggcgatgccgctgcccagcccgcattcactggcatcaaagggaaggagggcagtgcccttaccgagggcgcaaaggaagagggcggagaggaggttgcgaaggccgtgctcgagcaagaggagactgcagctgcctcccgcgaacggcaggaggaacagtccgcggcaatccacatttccgagactctggaacagaagccacacttcgaatccagcaccgtgaagaccgagacaataagcttcgggtcagtgtcccctggcggagttaagctggagatatctactaaagaagtccccgtcgttcacacagagaccaagactattacctatgagtcaagtcaggtggaccccggaactgatttggagccgggtgtgctcatgagcgcccagacaatcacatctgaaacaacatcgacaaccaccaccactcacattacaaaaactgtcaagggtggaatctctgaaacacgcattgagaaaaggatcgtaatcacgggcgacgccgacattgatcacgatcaggccctggctcaggcgattaaggaggccaaggagcaacatcctgatatgagtgtcacaaaagtcgtggtccataaagaaaccgagatcactccggaggacggtgaggactag

SEQ ID NO: 100000 - DNA, 2271 bp, Artificial Sequence
  derived and/or modified sequence
atgcaatgcaaagtgatattgttggatggctctgagtatacctgtgacgtcgagaagcgcagccgtgggcaggttctctttgataaagtgtgtgaacaccttaaccttttggagaaggattattttggtctgacgtacagagatgccgagaaccagaagaactggctggacccagcaaaagagatcaaaaaacaagtgcgtagcggagcctggcacttcagctttaatgtcaaattctatcctcccgatcctgcacagctctccgaagatatcacccggtactatctgtgcttacagctgcgggatgatatcgtttctggtcggctgccctgctccttcgtcacactggctttgttaggctcctatacagtgcaatcagaactgggggactacgatcccgatgagtgtgggtccgactacatttcagagtttcgcttcgctccgaatcacactaaggagctggaggacaaggtgattgagcttcataaaagccacaggggaatgacacccgctgaggccgagatgcatttcctcgaaaatgcaaagaaactttccatgtacggggttgacctgcaccatgccaaggattcggaaggggtagagattatgctgggagtgtgtgcctccggcctgctcatttacagagatcgtttgcgaattaatcgctttgcttggccaaaggtgcttaaaatttcttacaagagaaataacttctacatcaagataagacctggggaattcgagcagtttgaatccacaatcggctttaagctgcccaaccacagagctgccaagaggctttggaaagtgtgcgtggagcaccacacgtttttccgtctcctcctccctgaggcacccccaaaaaagttccttaccctgggttccaagtttcgctatagtggaagaacacaggctcagacccgacgggctagcgccttgattgatcgccctgctccttactttgaaagaagctcttcaaagcgttatacaatgtccagatctctggatggcgcttctgttaacgagaaccatgaaatatacatgaaagactctatgtccgcagctgaggtgggcacagggcagtacgccacaacaaagggaatttcgcaaactaatctcatcaccacagtgacccccgagaaaaaagcagaagaagagcgggacgaggaggaagacaagcggagaaaaggggaagaggttacacccatcagtgctatccgccatgaggggaaaaccgactcagaacgcactgacacggcagccgacggagagacaaccgcaaccgaagaactggaaaaaacacaagatgacctgatgaagcatcagacaaacatttctgagttgaaacggacatttctagagacttcgacggacacagctgttacgaacgagtgggagaagagactgtctacgtcccctgtgaggttagctgccaggcaggaagatgctcccatgatagagcccctggtccccgaagaaaagatggagaccaaaaccgagtcatccggtattgaaactgaaccgacagtccatcacctgccccttagtacagagaaggtggtgcaggagacagtgctcgtagaggagcgtcgggtggtccacgccagtggagatgccagctattctgctggagactctggggatgcagctgcccagccagcctttacgggaataaaaggcaaggaagggtctgcactgactgaaggagctaaggaggagggtggcgaggaggtggcgaaggctgtgctggagcaagaagagaccgccgctgcttctcgcgagaggcaggaggaacaatccgccgcaattcacatctccgagactctggagcagaagccgcattttgagtcctcaactgtaaagacagaaactattagcttcggatctgttagtcctgggggagtgaagctggaaatttctaccaaggaggtacccgtcgttcatactgaaactaaaaccattacatatgagagcagccaggtggacccgggaacggatctcgagcctggagtcttgatgtcagcccagacaattaccagcgagaccacttctaccaccaccacaactcacatcacgaagaccgtgaaagggggaattagcgaaactcgcatagagaaaaggattgtaattacgggggacgcggatatcgaccatgatcaggcccttgcccaggcaattaaggaggcgaaagagcagcatcctgacatgagcgttacaaaggtcgtcgtgcacaaagaaaccgagatcacccccgaggacggggaggactag

SEQ ID NO: 100001 - DNA, 2271 bp, Artificial Sequence
  derived and/or modified sequence
atgcagtgcaaggtgatcctgctggacggcagcgagtacacctgcgacgtggagaagagaagcagaggccaggtgctgttcgacaaggtgtgcgagcacctgaacctgctggagaaggactacttcggcctgacctacagagacgccgagaaccagaagaactggctggaccccgccaaggagatcaagaagcaggtgagaagcggcgcctggcacttcagcttcaacgtgaagttctacccccccgaccccgcccagctgagcgaggacatcaccagatactacctgtgcctgcagctgagagacgacatcgtgagcggcagactgccctgcagcttcgtgaccctggccctgctgggcagctacaccgtgcagagcgagctgggcgactacgaccccgacgagtgcggcagcgactacatcagcgagttcagattcgcccccaaccacaccaaggagctggaggacaaggtgatcgagctgcacaagagccacagaggcatgacccccgccgaggccgagatgcacttcctggagaacgccaagaagctgagcatgtacggcgtggacctgcaccacgccaaggacagcgagggcgtggagatcatgctgggcgtgtgcgccagcggcctgctgatctacagagacagactgagaatcaacagattcgcctggcccaaggtgctgaagatcagctacaagagaaacaacttctacatcaagatcagacccggcgagttcgagcagttcgagagcaccatcggcttcaagctgcccaaccacagagccgccaagagactgtggaaggtgtgcgtggagcaccacaccttcttcagactgctgctgcccgaggccccccccaagaagttcctgaccctgggcagcaagttcagatacagcggcagaacccaggcccagaccagaagagccagcgccctgatcgacagacccgccccctacttcgagagaagcagcagcaagagatacaccatgagcagaagcctggacggcgccagcgtgaacgagaaccacgagatctacatgaaggacagcatgagcgccgccgaggtgggcaccggccagtacgccaccaccaagggcatcagccagaccaacctgatcaccaccgtgacccccgagaagaaggccgaggaggagagagacgaggaggaggacaagagaagaaagggcgaggaggtgacccccatcagcgccatcagacacgagggcaagaccgacagcgagagaaccgacaccgccgccgacggcgagaccaccgccaccgaggagctggagaagacccaggacgacctgatgaagcaccagaccaacatcagcgagctgaagagaaccttcctggagaccagcaccgacaccgccgtgaccaacgagtgggagaagagactgagcaccagccccgtgagactggccgccagacaggaggacgcccccatgatcgagcccctggtgcccgaggagaagatggagaccaagaccgagagcagcggcatcgagaccgagcccaccgtgcaccacctgcccctgagcaccgagaaggtggtgcaggagaccgtgctggtggaggagagaagagtggtgcacgccagcggcgacgccagctacagcgccggcgacagcggcgacgccgccgcccagcccgccttcaccggcatcaagggcaaggagggcagcgccctgaccgagggcgccaaggaggagggcggcgaggaggtggccaaggccgtgctggagcaggaggagaccgccgccgccagcagagagagacaggaggagcagagcgccgccatccacatcagcgagaccctggagcagaagccccacttcgagagcagcaccgtgaagaccgagaccatcagcttcggcagcgtgagccccggcggcgtgaagctggagatcagcaccaaggaggtgcccgtggtgcacaccgagaccaagaccatcacctacgagagcagccaggtggaccccggcaccgacctggagcccggcgtgctgatgagcgcccagaccatcaccagcgagaccaccagcaccaccaccaccacccacatcaccaagaccgtgaagggcggcatcagcgagaccagaatcgagaagagaatcgtgatcaccggcgacgccgacatcgaccacgaccaggccctggcccaggccatcaaggaggccaaggagcagcaccccgacatgagcgtgaccaaggtggtggtgcacaaggagaccgagatcacccccgaggacggcgaggactag

SEQ ID NO: 100002 - protein, 229 aa, Artificial Sequence
  derived and/or modified sequence
MQIFVKTLTGKTITLEVEPSDTIENVKAKIQDKEGIPPDQQRLIFAGKQLEDGRTLSDYNIQKESTLHLVLRLRGGMQIFVKTLTGKTITLEVEPSDTIENVKAKIQDKEGIPPDQQRLIFAGKQLEDGRTLSDYNIQKESTLHLVLRLRGGMQIFVKTLTGKTITLEVEPSDTIENVKAKIQDKEGIPPDQQRLIFAGKQLEDGRTLSDYNIQKESTLHLVLRLRGGC

SEQ ID NO: 100003 - protein, 153 aa, Artificial Sequence
  derived and/or modified sequence
MQIFVKTLTGKTITLEVEPSDTIENVKAKIQDKEGIPPDQQRLIFAGKQLEDGRTLSDYNIQKESTLHLVLRLRGGMQIFVKTLTGKTITLEVEPSDTIENVKAKIQDKEGIPPDQQRLIFAGKQLEDGRTLSDYNIQKESTLHLVLRLRGGC

SEQ ID NO: 100004 - protein, 149 aa, Artificial Sequence
  derived and/or modified sequence
MQIFVKTLTGKTITLEVEPSDTIENVKAKIQDKEGIPPDQQRLIFAGKQLEDGRTLSDYNIQKESTLHLVLRLRGGMQIFVKTLTGKTITLEVEPSDTIENVKAKIQDKEGIPPDQQRLIFAGKQLEDGRTLSDYNIQKESTLHLVLRL

SEQ ID NO: 100005 - protein, 123 aa, Artificial Sequence
  derived and/or modified sequence
MQIFVKTLTGKTITLEVEPSDTIENVKAKIQDKEGIPPDQQRLIFAGKQLEDGRTLSDYNIQKESTLHLVLRLRGGMQIFVKTLTGKTITLEVEPSDTIENVKAKIQDKEGIPPDQQRLIFAG

SEQ ID NO: 100006 - protein, 134 aa, Artificial Sequence
  derived and/or modified sequence
MQIFVKTLTGKTITLEVEPSDTIENVKAKIQDKEGIPPDQQRLIFAGKQLEDGRTLSDYNIQKESTLHLVLRLRGGMQIFVKTLTGKTITLEVEPSDTIENVKAKIQDKEGIPPDQQRLIFAGKQLEDGRTLSD

SEQ ID NO: 100007 - protein, 169 aa, Artificial Sequence
  derived and/or modified sequence
MQIFVKTLTGKTITLEVEPSDTIENVKAKIQDKEGIPPDQQRLIFAGKQLEDGRTLSDYNIQKESTLHLVLRLRGGMQIFVKTLTGKTITLEVEPSDTIENVKAKIQDKEGIPSDQQRLIFAGKQLEDGRTLSDYNIQKESTLHLVLRLRGGMQIFVKTLTGKTITLEV

SEQ ID NO: 100008 - protein, 155 aa, Artificial Sequence
  derived and/or modified sequence
MQIFVKTLTGKTITLEVEPSDTIENVKAKIQDKEGIPPDQQRLIFAGKQLEDGRTLSDYNIQKESTLHLVLRLRGGMQIFVKTLTGKTITLEVEPSDTIENVKAKIQDKEGIPPDQQRLIFAGKQLEDGRTLSDYNIQKESTLHLVLRLRGGMQI

SEQ ID NO: 100009 - DNA, 690 bp, Artificial Sequence
  derived and/or modified sequence
atgcagatcttcgtgaagaccctgaccggcaagaccatcaccctggaggtggagcccagcgacaccatcgagaacgtgaaggccaagatccaggacaaggagggcatcccccccgaccagcagagactgatcttcgccggcaagcagctggaggacggcagaaccctgagcgactacaacatccagaaggagagcaccctgcacctggtgctgagactgagaggcggcatgcagatcttcgtgaagaccctgaccggcaagaccatcaccctggaggtggagcccagcgacaccatcgagaacgtgaaggccaagatccaggacaaggagggcatcccccccgaccagcagagactgatcttcgccggcaagcagctggaggacggcagaaccctgagcgactacaacatccagaaggagagcaccctgcacctggtgctgagactgagaggcggcatgcagatcttcgtgaagaccctgaccggcaagaccatcaccctggaggtggagcccagcgacaccatcgagaacgtgaaggccaagatccaggacaaggagggcatcccccccgaccagcagagactgatcttcgccggcaagcagctggaggacggcagaaccctgagcgactacaacatccagaaggagagcaccctgcacctggtgctgagactgagaggcggctgctag

SEQ ID NO: 100010 - DNA, 462 bp, Artificial Sequence
  derived and/or modified sequence
atgcagatcttcgtgaagaccctgaccggcaagaccatcaccctggaggtggagcccagcgacaccatcgagaacgtgaaggccaagatccaggacaaggagggcatcccccccgaccagcagagactgatcttcgccggcaagcagctggaggacggcagaaccctgagcgactacaacatccagaaggagagcaccctgcacctggtgctgagactgagaggcggcatgcagatcttcgtgaagaccctgaccggcaagaccatcaccctggaggtggagcccagcgacaccatcgagaacgtgaaggccaagatccaggacaaggagggcatcccccccgaccagcagagactgatcttcgccggcaagcagctggaggacggcagaaccctgagcgactacaacatccagaaggagagcaccctgcacctggtgctgagactgagaggcggctgctag

SEQ ID NO: 100011 - DNA, 450 bp, Artificial Sequence
  derived and/or modified sequence
atgcagatcttcgtgaagaccctgaccggcaagaccatcaccctggaggtggagcccagcgacaccatcgagaacgtgaaggccaagatccaggacaaggagggcatcccccccgaccagcagagactgatcttcgccggcaagcagctggaggacggcagaaccctgagcgactacaacatccagaaggagagcaccctgcacctggtgctgagactgagaggcggcatgcagatcttcgtgaagaccctgaccggcaagaccatcaccctggaggtggagcccagcgacaccatcgagaacgtgaaggccaagatccaggacaaggagggcatcccccccgaccagcagagactgatcttcgccggcaagcagctggaggacggcagaaccctgagcgactacaacatccagaaggagagcaccctgcacctggtgctgagactgtag

SEQ ID NO: 100012 - DNA, 372 bp, Artificial Sequence
  derived and/or modified sequence
atgcagatcttcgtgaagaccctgaccggcaagaccatcaccctggaggtggagcccagcgacaccatcgagaacgtgaaggccaagatccaggacaaggagggcatcccccccgaccagcagagactgatcttcgccggcaagcagctggaggacggcagaaccctgagcgactacaacatccagaaggagagcaccctgcacctggtgctgagactgagaggcggcatgcagatcttcgtgaagaccctgaccggcaagaccatcaccctggaggtggagcccagcgacaccatcgagaacgtgaaggccaagatccaggacaaggagggcatcccccccgaccagcagagactgatcttcgccggctag

SEQ ID NO: 100013 - DNA, 486 bp, Artificial Sequence
  derived and/or modified sequence
atgcagatcttcgtgaagaccctgaccggcaagaccatcaccctggaggtggagcccagcgacaccatcgagaacgtgaaggccaagatccaggacaaggagggcatcccccccgaccagcagagactgatcttcgccggcaagcagctggaggacggcagaaccctgagcgactacaacatccagaaggagagcaccctgcacctggtgctgagactgagaggcggcatgcagatcttcgtgaagaccctgaccggcaagaccatcaccctggaggtggagcccagcgacaccatcgagaacgtgaaggccaagatccaggacaaggagggcatcccccccgaccagcagagactgatcttcgccggcaagcagctggaggacggcagaaccctgagcgactacaacatccagaaggagagcaccctgcacctggtgctgagactgagaggcggcatgcagatcttcgtgaagaccctgacctag

SEQ ID NO: 100014 - DNA, 405 bp, Artificial Sequence
  derived and/or modified sequence
atgcagatcttcgtgaagaccctgaccggcaagaccatcaccctggaggtggagcccagcgacaccatcgagaacgtgaaggccaagatccaggacaaggagggcatcccccccgaccagcagagactgatcttcgccggcaagcagctggaggacggcagaaccctgagcgactacaacatccagaaggagagcaccctgcacctggtgctgagactgagaggcggcatgcagatcttcgtgaagaccctgaccggcaagaccatcaccctggaggtggagcccagcgacaccatcgagaacgtgaaggccaagatccaggacaaggagggcatcccccccgaccagcagagactgatcttcgccggcaagcagctggaggacggcagaaccctgagcgactag

SEQ ID NO: 100015 - DNA, 510 bp, Artificial Sequence
  derived and/or modified sequence
atgcagatcttcgtgaagaccctgaccggcaagaccatcaccctggaggtggagcccagcgacaccatcgagaacgtgaaggccaagatccaggacaaggagggcatcccccccgaccagcagagactgatcttcgccggcaagcagctggaggacggcagaaccctgagcgactacaacatccagaaggagagcaccctgcacctggtgctgagactgagaggcggcatgcagatcttcgtgaagaccctgaccggcaagaccatcaccctggaggtggagcccagcgacaccatcgagaacgtgaaggccaagatccaggacaaggagggcatccccagcgaccagcagagactgatcttcgccggcaagcagctggaggacggcagaaccctgagcgactacaacatccagaaggagagcaccctgcacctggtgctgagactgagaggcggcatgcagatcttcgtgaagaccctgaccggcaagaccatcaccctggaggtgtag

SEQ ID NO: 100016 - DNA, 468 bp, Artificial Sequence
  derived and/or modified sequence
atgcagatcttcgtgaagaccctgaccggcaagaccatcaccctggaggtggagcccagcgacaccatcgagaacgtgaaggccaagatccaggacaaggagggcatcccccccgaccagcagagactgatcttcgccggcaagcagctggaggacggcagaaccctgagcgactacaacatccagaaggagagcaccctgcacctggtgctgagactgagaggcggcatgcagatcttcgtgaagaccctgaccggcaagaccatcaccctggaggtggagcccagcgacaccatcgagaacgtgaaggccaagatccaggacaaggagggcatcccccccgaccagcagagactgatcttcgccggcaagcagctggaggacggcagaaccctgagcgactacaacatccagaaggagagcaccctgcacctggtgctgagactgagaggcggcatgcagatctag

SEQ ID NO: 100017 - DNA, 411 bp, Artificial Sequence
  derived and/or modified sequence
atgcagatcttcgtgaagaccctgaccggcaagaccatcaccctggaggtggagcccagcgacaccatcgagaacgtgaaggccaagatccaggacaaggagggcatcccccccgaccagcagagactgatcttcgccggcaagcagctggaggacggcagaaccctgagcgactacaacatccagaaggagagcaccctgcacctggtgctgagactgagaggcggcatgcagatcttcgtgaagaccctgaccggcaagaccatcaccctggaggtggagcccagcgacaccatcgagaacgtgaaggccaagatccaggacaaggagggcatcccccccgaccagcagagactgatcttcgccggcaagcagctggaggacggcagaaccctgagcgactacaactag

SEQ ID NO: 100018 - DNA, 690 bp, Artificial Sequence
  derived and/or modified sequence
atgcaaattttcgtgaagaccctgaccgggaagaccatcactctggaggtcgagccttcagacacaatcgagaacgtaaaagccaagattcaggacaaagaggggatcccaccagatcaacaacgattaatcttcgccggtaaacaactcgaggatggcaggactctttcagattataatattcagaaagaaagcacactccacctggttttaaggttgcggggcggtatgcagatctttgtgaaaaccctcaccggcaaaacaattaccctcgaggtggagccctcagacacaatcgaaaacgttaaggccaagatacaggataaggaaggaattcctccagatcagcagcgtctaatatttgcaggcaaacagctcgaagacggacgcaccctgtctgattataatatccagaaggagtccaccctccacttggttctgagactgcgcgggggaatgcaaattttcgtgaaaacattaacggggaaaactatcactctcgaggtggaaccgtccgacacaatcgagaacgtgaaagccaaaatacaggacaaagagggaattcctcccgatcagcagaggctgattttcgccggcaagcagctagaggacgggcggaccctgtccgattataatattcagaaggaatccaccctgcatttagttctccgtttacggggggggtgttag

SEQ ID NO: 100019 - DNA, 690 bp, Artificial Sequence
  derived and/or modified sequence
atgcagatttttgtaaagacactgacaggaaaaaccataacgctggaggtcgaacctagtgataccatcgagaacgttaaggcgaaaatccaggataaggaagggattcctcctgatcagcagagactgatttttgctggcaagcagctggaggatggccggacattaagcgattacaatatacaaaaggagagcacacttcaccttgttctgcgattgaggggcggtatgcaaattttcgtgaagactcttactggaaagacaatcacactggaagtggaaccaagcgatactatagagaatgtgaaagctaaaattcaggataaggaaggcatcccccccgaccagcagagactcatttttgcaggaaagcagcttgaggacgggagaacattgtcagattacaacatccaaaaagagtccacgttgcaccttgttttgcggctcagaggtggcatgcagatctttgttaagacgctgactggtaaaacaatcacactggaagttgagccaagcgataccatcgagaacgttaaagctaagattcaggacaaggaagggatccccccagatcaacagagactgattttcgcaggcaaacagctggaagatggtcggactctgagtgactacaatattcagaaggaaagtactctccatttggtgctcaggctgagaggagggtgctag

SEQ ID NO: 100020 - DNA, 690 bp, Artificial Sequence
  derived and/or modified sequence
atgcagatctttgttaaaaccctgacaggtaaaacaataaccctcgaagtcgagccatcggacaccatcgaaaacgttaaggctaagattcaggataaagagggcataccaccagaccaacagcgccttatcttcgctgggaagcaattggaggacggccgcaccctttctgattataacatccagaaagaatccacgcttcaccttgtgctgaggctgcgaggaggcatgcagatctttgtgaagacactcaccggaaagacaattaccttggaggtggaaccttctgacaccattgaaaatgtgaaggcaaaaatccaagacaaagagggcattcctcctgatcagcagcggcttatcttcgccggcaagcagctggaagatggtaggactctgtctgattacaacattcagaaagagtcaactctgcatctggtgttgagactgaggggagggatgcagatttttgtcaaaacactcacaggcaaaactatcacgttagaagttgaaccgtcggacaccattgagaatgtgaaggcaaaaattcaagacaaagagggaattcctccagaccagcagagactcatcttcgcaggtaaacagttagaggatggcagaacgttgtctgactataatattcaaaaagaatcgactctccaccttgtcctccgtctacgcggcggctgttag

SEQ ID NO: 100021 - DNA, 462 bp, Artificial Sequence
  derived and/or modified sequence
atgcagatatttgtgaagacccttaccggtaagaccataacactcgaagtagagccttcagatactatcgaaaacgtcaaggcaaagatccaggacaaagaaggcatcccacccgatcagcaacgcctcatcttcgccggaaagcagctcgaggatgggcggaccctcagtgactacaacattcagaaggaatccacgctccacctcgtgttgcgactgagggggggcatgcagatttttgtaaagactctgactggaaagaccatcaccctcgaagttgagccttccgataccattgagaacgtgaaggccaaaattcaagacaaggaggggattcctcccgatcagcagaggctgatttttgcgggaaaacagctcgaagacggccggactctgtctgattataatatccaaaaggagtcaacacttcacttagtccttaggctgagaggaggatgttag

SEQ ID NO: 100022 - DNA, 450 bp, Artificial Sequence
  derived and/or modified sequence
atgcagatctttgtcaaaactctcacaggaaagacgataacactcgaagttgagcctagcgatacgatcgagaacgtaaaggccaagattcaggataaagaggggattcccccagaccaacaacggttaatcttcgcgggcaagcagctggaggatggccggactctatctgactataatatccaaaaggaaagtaccctccacttggtactgcgattgcgtggaggaatgcagatttttgtaaaaaccttgacaggaaaaacgattacgctcgaggttgagccgtccgataccattgaaaacgtcaaggccaaaatccaggataaggaaggtatcccgccagaccagcagagattgatcttcgccggcaagcagctagaggacgggcggactcttagcgactacaacatccagaaagaaagtaccctgcacctggtcctgagactttag

SEQ ID NO: 100023 - DNA, 372 bp, Artificial Sequence
  derived and/or modified sequence
atgcagatcttcgtaaagactttgaccggcaagacaatcactctcgaagtcgaaccttctgataccattgaaaatgtcaaagctaagattcaggataaagagggaatccctcctgatcagcaaaggttgatcttcgctgggaagcagctcgaagatggacggaccctgtcagactataatattcagaaagaaagcacactccatctcgtgttgagactgcgggggggcatgcagatctttgtgaagacactgaccggtaagaccatcacacttgaagtggagccctctgacacaatcgagaacgtcaaagccaaaattcaggacaaggaaggaatccctccagaccagcagagactgatctttgcaggttag

SEQ ID NO: 100024 - DNA, 486 bp, Artificial Sequence
  derived and/or modified sequence
atgcagattttcgtgaagactctgacaggaaagaccataacactggaggtcgagcccagtgacacgattgagaacgtgaaagctaagatccaggataaggaagggatccctcccgaccagcaacggttaatctttgctggtaaacagctggaggacggaaggacactgtcagattacaacattcagaaggagagtacactgcacctcgtactgaggctccggggaggaatgcagatcttcgttaagacactgaccgggaagacaattaccctcgaagtggaaccgtccgacaccatcgaaaacgtcaaagctaagattcaggacaaggaggggattccgcctgatcagcaacggttgattttcgcaggtaaacagcttgaagatggccgtacgctgtcagattataatattcagaaggaaagtaccttgcaccttgttttgcgcctgcggggcggtatgcaaatctttgtcaaaacactgacctag

SEQ ID NO: 100025 - DNA, 405 bp, Artificial Sequence
  derived and/or modified sequence
atgcagatttttgtgaagacactgactggaaagacaattactcttgaagttgaaccctcagataccatcgagaatgtgaaggctaaaatacaggataaagaagggatcccaccagaccagcagcgcttgatattcgcgggcaaacagctcgaggatgggcgcacactgtccgactataacattcagaaagagagcaccctacacctggttctgagactccgtggggggatgcagattttcgtgaaaaccctcacaggaaagactattaccctagaagtggagccctccgacaccatcgagaacgtcaaagccaagatccaggacaaggagggtattccacccgaccagcagaggttgatctttgccggcaagcagttagaggacgggcgcacactgtctgactag

SEQ ID NO: 100026 - DNA, 510 bp, Artificial Sequence
  derived and/or modified sequence
atgcaaatttttgtaaagaccctgacgggcaagaccatcacacttgaagtcgagccttccgatactatcgagaacgttaaagcgaaaatacaggacaaggaaggaatccctcctgaccagcaacggttaattttcgcgggcaagcagttagaggacggacggactctgtcagattataacattcaaaaagagtcaaccctgcatctggtgctccgacttcggggcgggatgcagatctttgttaagaccctgactggcaagaccattactttggaagttgagccgagcgacacaatcgagaacgtaaaggcaaaaatccaggacaaagaaggtatcccgtccgatcagcagagactgattttcgcagggaagcagctggaagacggccgcactctcagcgattataatatccagaaggagagtaccctccacctggtgctgaggctgcgcggagggatgcagatttttgtgaagaccttgactggcaaaaccatcacactggaggtctag

SEQ ID NO: 100027 - DNA, 468 bp, Artificial Sequence
  derived and/or modified sequence
atgcaaatcttcgtaaagaccctcacaggtaagactattactctggaagtcgagccgtcggacacaattgagaatgtaaaagcaaaaatacaggataaggaagggatccctccggatcagcagagattaatcttcgccgggaaacagctggaggatggaaggactctgtccgactacaacatacaaaaggagtcaactttacatctcgtgcttaggcttaggggaggaatgcagattttcgtcaagaccctgaccggcaagaccattaccctcgaagtcgaaccttctgatactattgaaaacgtgaaagctaaaattcaggacaaggaaggaatcccacccgatcaacagcggttgatatttgccggcaaacagttagaggacggacgaaccctgagtgattacaatatacagaaagagtccactctgcatttggtcctgcggctgagagggggcatgcagatctag

SEQ ID NO: 100028 - DNA, 411 bp, Artificial Sequence
  derived and/or modified sequence
atgcagatctttgtcaagacacttacagggaagactattaccctggaagtggaaccaagcgacaccattgagaatgtgaaggctaaaatacaagataaggaaggcattccgcccgaccagcagaggcttatatttgctggcaagcagctagaagatggcagaacactaagcgactacaacatacagaaggagagcaccttgcaccttgtgctacggctgcgggggggcatgcagatcttcgtcaaaacgctcacaggtaagaccattacgctagaagtcgaacctagcgacactatcgaaaatgtgaaagccaagattcaagacaaggagggcattccacccgaccagcagaggctgattttcgccgggaaacagctggaggacgggcgcacgttgtcggactataactag

SEQ ID NO: 100029 - DNA, 690 bp, Artificial Sequence
  derived and/or modified sequence
atgcagatctttgtgaagaccctgaccgggaagaccatcaccctggaggtggagcccagcgacaccattgaaaatgtgaaggccaagatccaggacaaggagggcatccccccagaccagcagaggctcatctttgctgggaagcagctggaggatggccgcaccctgagtgactacaacatccagaaggagagcaccctgcacctggtgctgcggctgcggggcggcatgcagatctttgtgaagaccctgaccgggaagaccatcaccctggaggtggagcccagcgacaccattgaaaatgtgaaggccaagatccaggacaaggagggcatccccccagaccagcagaggctcatctttgctgggaagcagctggaggatggccgcaccctgagtgactacaacatccagaaggagagcaccctgcacctggtgctgcggctgcggggcggcatgcagatctttgtgaagaccctgaccgggaagaccatcaccctggaggtggagcccagcgacaccattgaaaatgtgaaggccaagatccaggacaaggagggcatccccccagaccagcagaggctcatctttgctgggaagcagctggaggatggccgcaccctgagtgactacaacatccagaaggagagcaccctgcacctggtgctgcggctgcggggcggctgctag

SEQ ID NO: 100030 - DNA, 462 bp, Artificial Sequence
  derived and/or modified sequence
atgcagatctttgtgaagaccctgaccgggaagaccatcaccctggaggtggagcccagcgacaccattgaaaatgtgaaggccaagatccaggacaaggagggcatccccccagaccagcagaggctcatctttgctgggaagcagctggaggatggccgcaccctgagtgactacaacatccagaaggagagcaccctgcacctggtgctgcggctgcggggcggcatgcagatctttgtgaagaccctgaccgggaagaccatcaccctggaggtggagcccagcgacaccattgaaaatgtgaaggccaagatccaggacaaggagggcatccccccagaccagcagaggctcatctttgctgggaagcagctggaggatggccgcaccctgagtgactacaacatccagaaggagagcaccctgcacctggtgctgcggctgcggggcggctgctag

SEQ ID NO: 100031 - DNA, 450 bp, Artificial Sequence
  derived and/or modified sequence
atgcagatctttgtgaagaccctgaccgggaagaccatcaccctggaggtggagcccagcgacaccattgaaaatgtgaaggccaagatccaggacaaggagggcatccccccagaccagcagaggctcatctttgctgggaagcagctggaggatggccgcaccctgagtgactacaacatccagaaggagagcaccctgcacctggtgctgcggctgcggggcggcatgcagatctttgtgaagaccctgaccgggaagaccatcaccctggaggtggagcccagcgacaccattgaaaatgtgaaggccaagatccaggacaaggagggcatccccccagaccagcagaggctcatctttgctgggaagcagctggaggatggccgcaccctgagtgactacaacatccagaaggagagcaccctgcacctggtgctgcggctgtag

SEQ ID NO: 100032 - DNA, 372 bp, Artificial Sequence
  derived and/or modified sequence
atgcagatctttgtgaagaccctgaccgggaagaccatcaccctggaggtggagcccagcgacaccattgaaaatgtgaaggccaagatccaggacaaggagggcatccccccagaccagcagaggctcatctttgctgggaagcagctggaggatggccgcaccctgagtgactacaacatccagaaggagagcaccctgcacctggtgctgcggctgcggggcggcatgcagatctttgtgaagaccctgaccgggaagaccatcaccctggaggtggagcccagcgacaccattgaaaatgtgaaggccaagatccaggacaaggagggcatccccccagaccagcagaggctcatctttgctggatag

SEQ ID NO: 100033 - DNA, 486 bp, Artificial Sequence
  derived and/or modified sequence
atgcagatctttgtgaagaccctgaccgggaagaccatcaccctggaggtggagcccagcgacaccattgaaaatgtgaaggccaagatccaggacaaggagggcatccccccagaccagcagaggctcatctttgctgggaagcagctggaggatggccgcaccctgagtgactacaacatccagaaggagagcaccctgcacctggtgctgcggctgcggggcggcatgcagatctttgtgaagaccctgaccgggaagaccatcaccctggaggtggagcccagcgacaccattgaaaatgtgaaggccaagatccaggacaaggagggcatccccccagaccagcagaggctcatctttgctgggaagcagctggaggatggccgcaccctgagtgactacaacatccagaaggagagcaccctgcacctggtgctgcggctgcggggcggcatgcagatctttgtgaagaccctgacctag

SEQ ID NO: 100034 - DNA, 405 bp, Artificial Sequence
  derived and/or modified sequence
atgcagatctttgtgaagaccctgaccgggaagaccatcaccctggaggtggagcccagcgacaccattgaaaatgtgaaggccaagatccaggacaaggagggcatccccccagaccagcagaggctcatctttgctgggaagcagctggaggatggccgcaccctgagtgactacaacatccagaaggagagcaccctgcacctggtgctgcggctgcggggcggcatgcagatctttgtgaagaccctgaccgggaagaccatcaccctggaggtggagcccagcgacaccattgaaaatgtgaaggccaagatccaggacaaggagggcatccccccagaccagcagaggctcatctttgctgggaagcagctggaggatggccgcaccctgagtgactag

SEQ ID NO: 100035 - DNA, 510 bp, Artificial Sequence
  derived and/or modified sequence
atgcagatctttgtgaagaccctgaccgggaagaccatcaccctggaggtggagcccagcgacaccattgaaaatgtgaaggccaagatccaggacaaggagggcatccccccagaccagcagaggctcatctttgctgggaagcagctggaggatggccgcaccctgagtgactacaacatccagaaggagagcaccctgcacctggtgctgcggctgcggggcggcatgcagatctttgtgaagaccctgaccgggaagaccatcaccctggaggtggagcccagcgacaccattgaaaatgtgaaggccaagatccaggacaaggagggcatccccagcgaccagcagaggctcatctttgctgggaagcagctggaggatggccgcaccctgagtgactacaacatccagaaggagagcaccctgcacctggtgctgcggctgcggggcggcatgcagatctttgtgaagaccctgaccgggaagaccatcaccctggaggtgtag

SEQ ID NO: 100036 - DNA, 468 bp, Artificial Sequence
  derived and/or modified sequence
atgcagatctttgtgaagaccctgaccgggaagaccatcaccctggaggtggagcccagcgacaccattgaaaatgtgaaggccaagatccaggacaaggagggcatccccccagaccagcagaggctcatctttgctgggaagcagctggaggatggccgcaccctgagtgactacaacatccagaaggagagcaccctgcacctggtgctgcggctgcggggcggcatgcagatctttgtgaagaccctgaccgggaagaccatcaccctggaggtggagcccagcgacaccattgaaaatgtgaaggccaagatccaggacaaggagggcatccccccagaccagcagaggctcatctttgctgggaagcagctggaggatggccgcaccctgagtgactacaacatccagaaggagagcaccctgcacctggtgctgcggctgcggggcggcatgcagatctag

SEQ ID NO: 100037 - DNA, 411 bp, Artificial Sequence
  derived and/or modified sequence
atgcagatctttgtgaagaccctgaccgggaagaccatcaccctggaggtggagcccagcgacaccattgaaaatgtgaaggccaagatccaggacaaggagggcatccccccagaccagcagaggctcatctttgctgggaagcagctggaggatggccgcaccctgagtgactacaacatccagaaggagagcaccctgcacctggtgctgcggctgcggggcggcatgcagatctttgtgaagaccctgaccgggaagaccatcaccctggaggtggagcccagcgacaccattgaaaatgtgaaggccaagatccaggacaaggagggcatccccccagaccagcagaggctcatctttgctgggaagcagctggaggatggccgcaccctgagtgactacaactag

SEQ ID NO: 100038 - DNA, 690 bp, Artificial Sequence
  derived and/or modified sequence
atgcagatcttcgtgaagaccctgaccggcaagaccatcaccctggaggtagaaccatcggatacgattgaaaacgtaaaggcaaagattcaggacaaagaagggattcctcctgatcagcaacgcctgatatttgcgggcaagcagctcgaggatggccggactctcagcgactacaacatccagaaggagagcactctgcacctcgtgttaaggctcagagggggaatgcagattttcgtgaaaactttaactggcaaaactatcaccctggaggtggaaccttcagatacaattgaaaacgtgaaagcaaaaatccaggacaaggagggcatacctcccgaccagcagcgacttatttttgcgggcaaacagctcgaggacggcagaactctgagtgattacaatattcaaaaggagtctacccttcacctggtcttgaggctacgagggggaatgcagatctttgtgaagaccctgactgggaagacaatcacactggaggttgagccttccgacaccattgaaaatgtgaaagcaaaaatccaagacaaggagggaattccccctgatcagcagaggctgatttttgccggcaaacaactcgaggatgggaggacactcagcgattacaatattcagaaggagagtactctccatctagtgcttcgactccggggtggatgctag

SEQ ID NO: 100039 - DNA, 690 bp, Artificial Sequence
  derived and/or modified sequence
atgcagatcttcgtgaagaccctgaccggcaagaccatcaccctggaggtagaaccatccgatacaatcgaaaacgtgaaggctaaaatacaagataaggaggggattcctccagaccagcagagattaatcttcgccggcaagcagctggaagacggacgcactctgagtgattataatattcaaaaagagagtaccctgcacctcgtcctgagactgaggggaggaatgcagatcttcgtaaaaaccctgacaggcaagacgattacacttgaggtagaaccttcagacaccattgaaaacgtcaaagccaaaattcaggataaagagggcattcccccagaccagcaaaggctgatctttgctgggaaacagctagaagacggccgaactctttcagactataatatccagaaagagagcaccttacacctcgtactccggctaaggggtggtatgcagatctttgtgaaaaccctgacggggaagacaatcactctggaggtggaacctagcgacaccatcgagaacgttaaggcgaagatacaggacaaagagggaatcccacctgatcagcagcgcctgatctttgccggtaaacagttggaagatggccgtaccctgtccgattacaacattcagaaagaatctacacttcatttggtgctgcgtctccgaggaggatgttag

SEQ ID NO: 100040 - DNA, 690 bp, Artificial Sequence
  derived and/or modified sequence
atgcagatcttcgtgaagaccctgaccggcaagaccatcaccctggaggtggaaccctccgatactatcgaaaacgtaaaagcaaagatccaagacaaggaggggatcccgcccgaccagcagcggttaatctttgcaggcaagcagctggaggatggtcgaactctttccgactataacattcaaaaggaatcaaccctgcatcttgtcctaagattgagaggcggcatgcagatcttcgtgaagacccttaccggcaagaccattaccttggaggttgagccctctgacacgatagagaacgtaaaggcaaagattcaggacaaggagggcattcctccagaccaacaacggctgatcttcgcaggcaaacagctggaagatggcagaacattgagcgactacaacatccagaaggagtctacgttacacctggtgctacgattgaggggcggaatgcagatctttgttaagacattgactggcaagactattacccttgaggtcgagcctagtgatacaatcgagaacgtcaaggccaaaatccaggataaggaaggaatcccgcccgaccaacagaggctcattttcgcaggcaagcagcttgaagatggccgtactttgtccgactataacattcagaaagagtccaccctccatctcgtgttacggttgcgggggggttgttag

SEQ ID NO: 100041 - DNA, 462 bp, Artificial Sequence
  derived and/or modified sequence
atgcagatcttcgtgaagaccctgaccggcaagaccatcaccctggaagtcgaaccatctgacacgattgagaacgtgaaagccaagattcaggacaaggagggtattcccccggatcagcagagattgatatttgcaggaaagcagctggaagacgggaggacactgagcgactacaacattcagaaggagagtacgctgcacctcgtcctacgccttcggggtggcatgcagatatttgtgaagactttgaccggaaagactattactctggaagtggaacccagtgacaccatcgagaatgtaaaagcaaaaattcaagataaagaaggaatcccccccgaccagcagcggcttatcttcgccggcaagcagttggaggatggccgcactcttagcgattataatatccagaaggagtccacactgcacctggtgcttaggctacgagggggctgctag

SEQ ID NO: 100042 - DNA, 450 bp, Artificial Sequence
  derived and/or modified sequence
atgcagatcttcgtgaagaccctgaccggcaagaccatcaccctggaggtggagcccagtgacacaattgagaacgttaaggcgaagatccaagataaggaaggcatcccaccagatcaacagagattgatatttgccggtaagcagctcgaagacgggcgcaccctgtctgactataatatccaaaaggaaagcaccttacacctggtgttaagactccgtggcggcatgcagatttttgtgaagacgttgaccggcaaaacaataactctagaggtggagccatccgatactatagaaaacgttaaggcgaagatccaagacaaagaaggcattcccccggaccaacagcgcctcatttttgccgggaagcagctggaggatgggagaacattgagtgactataacatacagaaggaatctaccctccacctggtgctgagattatag

SEQ ID NO: 100043 - DNA, 372 bp, Artificial Sequence
  derived and/or modified sequence
atgcagatcttcgtgaagaccctgaccggcaagaccatcaccctggaagtagagccttccgacactattgaaaatgtgaaggcaaaaattcaggacaaagaggggatcccgcccgatcagcagaggctgatttttgctggcaaacagctggaggatgggagaaccctatccgattataacatacagaaggaatcaaccctgcatttggtgctcagattgaggggtggaatgcagatctttgtgaagactttaaccggcaaaactattacactggaggtggagcccagcgacaccattgagaacgtcaaggcgaaaatccaggacaaggaaggcataccacccgatcaacagcgattgatatttgccggctag

SEQ ID NO: 100044 - DNA, 486 bp, Artificial Sequence
  derived and/or modified sequence
atgcagatcttcgtgaagaccctgaccggcaagaccatcaccctggaagtggaaccgtccgacaccattgaaaacgtgaaggccaaaatccaagacaaggaagggattccccccgatcagcagaggctcattttcgccggtaagcagctggaagatgggcggacattgtccgattacaacattcaaaaggaatccactctacaccttgtcctccgcctgcgaggcgggatgcaaatcttcgtgaagacgttaaccggaaagacaatcactcttgaggtggagccttcggacacaattgagaatgtgaaagctaaaatccaggacaaggaaggcatcccccctgaccaacaaagactgatatttgctggaaaacaattggaagatgggcggactctgtcagattataatattcagaaggaatcaacactacatcttgtcctccggctgcgcggaggtatgcagattttcgttaagaccctgacctag

SEQ ID NO: 100045 - DNA, 405 bp, Artificial Sequence
  derived and/or modified sequence
atgcagatcttcgtgaagaccctgaccggcaagaccatcaccctggaggtggagccgtcagatactatcgagaatgtgaaggcaaagattcaggataaggagggaatccctcccgaccagcaaagactaattttcgccggcaagcagctggaggacgggagaaccttaagcgattacaatatccaaaaggagtccacactgcacctcgtgcttcggctgcgtgggggtatgcagattttcgtcaagacactcactggcaaaaccatcactctggaggtggaaccatctgataccattgaaaatgtgaaggctaaaatacaagataaagaagggatcccgccagatcagcaacgcttgatttttgccggaaagcaacttgaggatggccggacgctgtcagactag

SEQ ID NO: 100046 - DNA, 510 bp, Artificial Sequence
  derived and/or modified sequence
atgcagatcttcgtgaagaccctgaccggcaagaccatcaccctggaagtcgaaccaagcgacaccattgaaaatgtgaaggctaaaattcaggacaaggagggtatcccacccgatcagcaacggttgatatttgcagggaaacagctcgaagacggacgaactctgagtgactacaacattcagaaagagagtactctgcatctagtgcttaggttgcgcggtggcatgcagattttcgttaagactctcaccggaaaaacaataactctcgaggtggagcctagcgataccattgagaatgtcaaagcaaaaattcaggacaaagagggcattccctccgaccaacagagactgatttttgcgggaaagcagctcgaagatggacgaacactgtctgactacaatatccagaaggaatctacactacatctggtcctaaggctccggggggggatgcagattttcgttaaaactttgaccggaaaaacaatcaccctggaagtctag

SEQ ID NO: 100047 - DNA, 468 bp, Artificial Sequence
  derived and/or modified sequence
atgcagatcttcgtgaagaccctgaccggcaagaccatcaccctggaagtggagccttctgatacaatcgagaacgtgaaagctaaaatacaggacaaggagggtatcccacctgatcagcagcggctgattttcgctggaaagcagcttgaggacggccgaaccctgtcagactacaacattcagaaagagagcaccctacacctggtgcttcggttgcgtggggggatgcagatcttcgtgaaaaccctgactggcaagactatcaccctcgaagttgaaccctccgatactatcgagaatgtgaaagcaaagatccaggataaagaaggcattcctcccgaccagcaaagactgatatttgccgggaagcagctcgaagatggacgaacgctttccgattacaacatccaaaaggaatctaccttgcatttagttcttagactcagaggtggaatgcaaatatag

SEQ ID NO: 100048 - DNA, 411 bp, Artificial Sequence
  derived and/or modified sequence
atgcagatcttcgtgaagaccctgaccggcaagaccatcaccctggaagtggaaccctccgacaccatagaaaatgtgaaagccaagatccaagataaggaaggaattccgccggatcaacaacggctgattttcgccgggaaacagttagaggacggacgaaccttgagtgactacaacatccaaaaggaatccaccctgcatctcgttctgagactaaggggaggaatgcagatatttgtcaaaaccttaacaggtaagaccattacactggaggtggagccttcagataccatcgagaacgtcaaggccaaaatccaggataaggaaggtatcccaccagatcagcagcgtctgattttcgctgggaagcagctggaggacggccggacgctgagtgactacaattag

SEQ ID NO: 100049 - DNA, 690 bp, Artificial Sequence
  derived and/or modified sequence
atgcaaatctttgtgaaaacccttacaggaaagacaataaccctggaggtagaacctagtgacacaatcgaaaatgtgaaagcaaagattcaggacaaggaagggatcccacctgaccagcagcgtttaatcttcgcgggtaagcagcttgaggatggcaggactctctcagattacaatatccagaaggaaagcaccttgcatctggttcttcgcctccggggtgggatgcaaatttttgtgaaaacactcaccggcaagaccattacactggaggtggaaccttccgacactatcgaaaatgtcaaggctaagattcaggataaggaaggaattccgcctgatcagcagcggctgatttttgcgggtaaacagctggaggacggacgtactctgtcagattacaatatccaaaaggagtctacacttcacctcgtcctccgcctcagagggggaatgcaaatctttgtcaagacccttacaggtaagaccataactctggaggtggagccgagcgacactatcgaaaatgtgaaggctaagatccaggacaaggaaggcattccaccagatcaacagcgactgattttcgctggaaagcagctcgaagacggacgcactctgtcagactataatattcaaaaggaaagtacactccatctggttttgcgtctaaggggaggctgctag

SEQ ID NO: 100050 - DNA, 690 bp, Artificial Sequence
  derived and/or modified sequence
atgcagatatttgtcaagactctgacaggcaagactataacgctggaggtcgagccgtcggacaccattgaaaacgtcaaagctaaaatacaagacaaggagggtattcctccagaccagcaacgcctgatttttgccggaaagcagttggaagatggcaggaccttgagcgattataatatccagaaagaaagcacgctgcatctcgtcctcaggctcaggggcggtatgcaaatctttgtgaaaacactaactgggaagacaatcactctagaggttgaaccatcagacactattgagaatgtcaaagcgaagatacaagacaaagaaggcattccccctgaccaacagaggctgatcttcgccggaaagcagctggaggacggcagaactctcagcgactacaacattcagaaagagagcacgctgcacctggtgttgcgtttgcggggagggatgcagatctttgttaaaacactgacaggcaaaactattacccttgaggttgaacccagcgataccatagaaaacgtcaaggcaaagatacaagataaagaaggtatcccacccgatcaacagcgcctcatcttcgcagggaagcagctggaggacggcaggacactgtccgattataacatccaaaaagagtccacactgcacttagttctgagattgcgcggagggtgttag

SEQ ID NO: 100051 - DNA, 690 bp, Artificial Sequence
  derived and/or modified sequence
atgcaaatcttcgtgaagactctgacagggaaaactatcacactggaggtggaaccctctgacacaatagaaaacgttaaggctaagatccaggataaggaaggcatacccccagatcaacagcggctaatttttgccggaaagcagctcgaagacggtcgcaccctgtctgattacaacatacagaaagagagcacgctccacttagtattgcgtctacgtggaggaatgcaaattttcgtcaaaacactcaccggcaagacaatcacccttgaagtcgaaccttcagatacaatcgagaacgtcaaagccaaaatacaagacaaggagggaatcccaccagaccagcagaggctgatattcgccggaaagcaactcgaagacggacgaaccttgagcgattacaacatccagaaggaatccacattacacttggtcttgcgcctgcgaggtgggatgcagatttttgtcaagacactcactgggaagaccatcacccttgaagtggaaccgtcagacactatagagaatgtgaaagctaagattcaggacaaagaaggaattccacctgatcagcagcggttaatctttgctgggaaacagctggaagatggtcgaacactgagtgactacaatatacagaaggagagtactcttcatttagtgctgagattgcgaggcggttgctag

SEQ ID NO: 100052 - DNA, 462 bp, Artificial Sequence
  derived and/or modified sequence
atgcagatttttgtgaagaccttgactgggaagaccatcacgctcgaagtggagccctctgataccattgagaacgtgaaggccaagattcaagataaagaaggcataccccctgatcagcagcgtctaatttttgccggtaagcagctcgaagacgggaggactttaagtgactataatatccagaaggaaagcacacttcacctcgtcctcagactccggggaggcatgcagatatttgtaaaaacccttactggtaaaaccataactttggaggtggagccatctgacacgattgagaacgtgaaagccaagatccaagacaaggagggaatccctccagaccagcagcggctgatcttcgccggtaaacagcttgaggacggccgtactctgtcagattataacatacaaaaagagtcaaccctgcacctggtgctcaggctgcgaggcggatgttag

SEQ ID NO: 100053 - DNA, 450 bp, Artificial Sequence
  derived and/or modified sequence
atgcagatattcgtgaaaaccctgacaggtaaaacgatcacgctggaagtggagccaagcgacaccatcgagaatgtgaaggccaaaatccaagacaaggagggtatacctcccgaccagcaaagactcatctttgcgggtaaacagctcgaagatggcaggactttatccgattataacattcagaaggagtcaactttgcatctagtacttcgccttcgcggtgggatgcagatttttgtgaagaccctaacaggcaagaccataacacttgaggtggagcccagcgatactattgaaaatgtcaaagcaaagatccaggacaaagaaggaatccccccagaccaacagcggctgatcttcgccggaaagcagctggaggacggtcgaaccctgtccgactataatatccagaaggagagtaccctgcatcttgtgctcaggttgtag

SEQ ID NO: 100054 - DNA, 372 bp, Artificial Sequence
  derived and/or modified sequence
atgcagattttcgtgaaaactctaactgggaaaactattacactcgaggttgagccttccgatacaatcgaaaacgtcaaggccaagatacaggacaaggagggcataccccctgaccagcagcgcttgatttttgccggaaagcagcttgaggacggtagaactctatccgattataacatacagaaggagtccacactacacctagtcctccggttgcgcggagggatgcagattttcgtcaagacattgactggcaagacaatcaccctggaagtggaaccctcagacactatagaaaatgtgaaggctaaaatccaggacaaggagggaatcccaccagaccagcaaaggctgatattcgccggatag

SEQ ID NO: 100055 - DNA, 486 bp, Artificial Sequence
  derived and/or modified sequence
atgcagatcttcgtaaagaccctgaccggcaaaactattacattagaagtcgaaccgtccgataccatcgaaaacgtcaaggccaagattcaagacaaagagggcattccacccgatcagcagaggctgatctttgccggtaagcagctcgaagatggcaggactctctcagattacaatatccagaaggaaagtactctccatttagtgctgaggcttcggggaggaatgcagatcttcgtcaaaacactaaccgggaaaactattacactggaggtggagccgtccgacactatcgagaatgtgaaagcgaaaatccaggacaaagaggggataccaccagaccagcagagattgatcttcgctggcaagcagctggaagacggaagaaccctgtctgactacaatatccaaaaagaatccaccttgcaccttgtcctgaggctgcggggtggcatgcagatttttgtgaaaaccctcacctag

SEQ ID NO: 100056 - DNA, 405 bp, Artificial Sequence
  derived and/or modified sequence
atgcagattttcgtcaagacgctaactggcaaaaccatcactttggaggttgagcctagtgataccatcgagaatgttaaagccaagatacaggacaaagaaggcatcccaccagatcagcaacggttaatcttcgccggtaagcagcttgaggacggcaggacactgtcagactacaatattcagaaagaatctactctccacctggtcttgagactgcgagggggtatgcagatcttcgttaagactctgacaggtaagaccattactctggaggttgagccatccgataccatcgaaaacgtcaaggctaagatccaggacaaggaagggatcccacctgaccagcagcggttaatattcgctgggaagcagctcgaggatggacgaacgctgtctgactag

SEQ ID NO: 100057 - DNA, 510 bp, Artificial Sequence
  derived and/or modified sequence
atgcagatcttcgtgaagactctcactggaaagaccataacccttgaagtggaaccctctgacacaattgagaatgtgaaagccaagatacaggataaagaagggatcccaccagatcagcagaggctgattttcgctggcaagcagttggaggacggtcgtaccctgtctgattacaatatccagaaggagagtactctgcatctcgtactgcgcctgagaggaggcatgcagatatttgtcaagacactgacaggcaaaacgatcaccctggaggtggaaccatctgacactatcgagaacgtgaaggccaagatccaggacaaggaaggtattccgagcgaccagcagcggttgatctttgctgggaaacaactcgaggacggtcgtaccctgtcggactataacattcagaaagaatcaacactgcacttggtcctgcggttaaggggtggaatgcagatcttcgtcaaaacattgaccggaaagacaatcaccctggaggtctag

SEQ ID NO: 100058 - DNA, 468 bp, Artificial Sequence
  derived and/or modified sequence
atgcagatcttcgttaagacactgacgggtaaaaccataactctggaggttgagccttctgacacaatcgaaaatgtgaaggcaaagatccaggacaaagaggggattccccctgaccaacagcgtctgatctttgccggtaagcagctggaagacggtcggacattgtccgactataatattcagaaggagtccactctccacctcgtgctgaggctgcgagggggaatgcagatcttcgtgaagacgctgaccggcaaaactatcactttggaggtcgaaccttccgacaccatcgaaaacgttaaagcaaagatccaggataaggaagggatcccacccgaccagcaacgacttatttttgccggaaagcagttggaagatggtcgtaccctgagcgattacaacatccagaaggaaagtaccctgcatctggtgctaaggttgcggggtggtatgcagatttag

SEQ ID NO: 100059 - DNA, 411 bp, Artificial Sequence
  derived and/or modified sequence
atgcaaatctttgtcaaaacactcacaggaaaaaccattacacttgaggtggagccctcggatacaatcgagaacgttaaggccaaaatccaggataaggagggtatcccacctgaccagcagcggctaattttcgctggaaaacaactggaggatgggaggacactctctgactacaacatccaaaaagaatccacgctgcacttggtgctgcggctgagaggcggtatgcagattttcgtgaaaacactaacggggaaaacaattactctggaggttgaaccaagtgatacaatcgagaatgtaaaggccaagatccaagataaagagggaatccctcctgaccagcagagactcattttcgccggtaagcagctggaagacggacgcaccttaagcgactataactag

SEQ ID NO: 100060 - DNA, 1225 bp, Artificial Sequence
  derived and/or modified sequence
gtttccagagctttcgaggaaggtttcttcaactcaaattcatccgcctgataattttcttatattttcctaaagaaggaagagaagcgcatagaggagaagggaaataattttttaggagcctttcttacggctatgaggaatttggggctcagttgaaaagcctaaactgcctctcgggaggttgggcgcggcgaactactttcagcggcgcacggagacggcgtctacgtgaggggtgataagtgacgcaacactcgttgcataaatttgcgctccgccagcccggagcatttaggggcggttggctttgttgggtgagcttgtttgtgtccctgtgggtggacgtggttggtgattggcaggatcctggtatccgctaacaggtcaaaatgcagatcttcgtgaaaacccttaccggcaagaccatcacccttgaggtggagcccagtgacaccatcgaaaatgtgaaggccaagatccaggataaggaaggcattccccccgaccagcagaggctcatctttgcaggcaagcagctggaagatggccgtactctttctgactacaacatccagaaggagtcgaccctgcacctggtcctgcgtctgagaggtggtatgcagatcttcgtgaagaccctgaccggcaagaccatcaccctggaagtggagcccagtgacaccatcgaaaatgtgaaggccaagatccaggataaagaaggcatccctcccgaccagcagaggctcatctttgcaggcaagcagctggaagatggccgcactctttctgactacaacatccagaaggagtcgaccctgcacctggtcctgcgtctgagaggtggtatgcagatcttcgtgaagaccctgaccggcaagaccatcactctggaggtggagcccagtgacaccatcgaaaatgtgaaggccaagatccaagataaagaaggcatcccccccgaccagcagaggctcatctttgcaggcaagcagctggaagatggccgcactctttctgactacaacatccagaaagagtcgaccctgcacctggtcctgcgcctgaggggtggctgttaattcttcagtcatggcattcgcagtgcccagtgatggcattactctgcactatagccatttgccccaacttaagtttagaaattacaagtttcagtaatagctgaacctgttcaaaatgttaataaaggtttcgttgcatggta

SEQ ID NO: 100061 - DNA, 1014 bp, Artificial Sequence
  derived and/or modified sequence
gggccttgttgacctgaggggggcgagggcggttggcgcgcgcgcgcgttgacggaaactaacggacgcctaaccgatcggcgattctgtcgagtttacttcgcggggaaggcggaaaagaggtagtttgtgtggtttctggaagcctttactttggaatcccagtgtgagaaaggtcaaaatgcagatcttcgtgaaaacccttaccggcaagaccatcacccttgaggtggagcccagtgacaccatcgaaaatgtgaaggccaagatccaggataaggaaggcattccccccgaccagcagaggctcatctttgcaggcaagcagctggaagatggccgtactctttctgactacaacatccagaaggagtcgaccctgcacctggtcctgcgtctgagaggtggtatgcagatcttcgtgaagaccctgaccggcaagaccatcaccctggaagtggagcccagtgacaccatcgaaaatgtgaaggccaagatccaggataaagaaggcatccctcccgaccagcagaggctcatctttgcaggcaagcagctggaagatggccgcactctttctgactacaacatccagaaggagtcgaccctgcacctggtcctgcgtctgagaggtggtatgcagatcttcgtgaagaccctgaccggcaagaccatcactctggaggtggagcccagtgacaccatcgaaaatgtgaaggccaagatccaagataaagaaggcatcccccccgaccagcagaggctcatctttgcaggcaagcagctggaagatggccgcactctttctgactacaacatccagaaagagtcgaccctgcacctggtcctgcgcctgaggggtggctgttaattcttcagtcatggcattcgcagtgcccagtgatggcattactctgcactatagccatttgccccaacttaagtttagaaattacaagtttcagtaatagctgaacctgttcaaaatgttaataaaggtttcgttgcatggta

SEQ ID NO: 100062 - DNA, 1012 bp, Artificial Sequence
  derived and/or modified sequence
gtgggggaggggagggcgaggtgacgcggcgctgggcctttccgggacagtgggccttgttgacctgaggggggcgagggcggttggcgcgcgcgcgcgttgacggaaactaacggacgcctaaccgatcggcgattctgtcgagtttacttcgcggggaaggcggaaaagaggtcaaaatgcagatcttcgtgaaaacccttaccggcaagaccatcacccttgaggtggagcccagtgacaccatcgaaaatgtgaaggccaagatccaggataaggaaggcattccccccgaccagcagaggctcatctttgcaggcaagcagctggaagatggccgtactctttctgactacaacatccagaaggagtcgaccctgcacctggtcctgcgtctgagaggtggtatgcagatcttcgtgaagaccctgaccggcaagaccatcaccctggaagtggagcccagtgacaccatcgaaaatgtgaaggccaagatccaggataaagaaggcatccctcccgaccagcagaggctcatctttgcaggcaagcagctggaagatggccgcactctttctgactacaacatccagaaggagtcgaccctgcacctggtcctgcgtctgagaggtggtatgcagatcttcgtgaagaccctgaccggcaagaccatcactctggaggtggagcccagtgacaccatcgaaaatgtgaaggccaagatccaagataaagaaggcatcccccccgaccagcagaggctcatctttgcaggcaagcagctggaagatggccgcactctttctgactacaacatccagaaagagtcgaccctgcacctggtcctgcgcctgaggggtggctgttaattcttcagtcatggcattcgcagtgcccagtgatggcattactctgcactatagccatttgccccaacttaagtttagaaattacaagtttcagtaatagctgaacctgttcaaaatgttaataaaggtttcgttgcatggta

SEQ ID NO: 100063 - DNA, 704 bp, Artificial Sequence
  derived and/or modified sequence
atttaggggcggttggctttgttgggtgagcttgtttgtgtccctgtgggtggacgtggttggtgattggcaggatcctggtatccgctaacaggtcaaaatgcagatcttcgtgaaaacccttaccggcaagaccatcacccttgaggtggagcccagtgacaccatcgaaaatgtgaaggccaagatccaggataaggaaggcattccccccgaccagcagaggctcatctttgcaggcaagcagctggaagatggccgtactctttctgactacaacatccagaaggagtcgaccctgcacctggtcctgcgtctgagaggtggtatgcagatcttcgtgaagaccctgaccggcaagaccatcactctggaggtggagcccagtgacaccatcgaaaatgtgaaggccaagatccaagataaagaaggcatcccccccgaccagcagaggctcatctttgcaggcaagcagctggaagatggccgcactctttctgactacaacatccagaaagagtcgaccctgcacctggtcctgcgcctgaggggtggctgttaattcttcagtcatggcattcgcagtgcccagtgatggcattactctgcactatagccatttgccccaacttaagtttagaaattacaagtttcagtaatagctgaacctgttcaaaatgttaataaaggtttcgttgcatggt

SEQ ID NO: 100064 - DNA, 563 bp, Artificial Sequence
  derived and/or modified sequence
ggcttttctccgtcgcaggacgcagggttcgggcctagggtaggctctcctgaatcgacaggcgccggacctctggtgaggggagggataagtgaggcgtcagtttctctgacaatgcagatcttcgtgaagactctgactggtaagaccatcaccctcgaggttgagcccagtgacaccatcgagaatgtcaaggcaaagatccaagataaggaaggcatccctcctgaccagcagaggctgatctttgctggaaaacagctggaagatgggcgcaccctgtctgactacaacatccagaaagagtccaccctgcacctggtgctccgtctcagaggtgggatgcaaatcttcgtgaagacactcactggcaagaccatcacccttgaggtcgagcccagtgacaccatcgagaacgtcaaagcaaagatccaggacaaggaaggcattcctcctgaccagcagaggttgatctttgccggaaagcagctggaagatgggcgcaccctgtctgactacaacatccagaaagagtctaccctgcacctggtgctccgtctcag

SEQ ID NO: 100065 - DNA, 582 bp, Artificial Sequence
  derived and/or modified sequence
tattcgggtgagatgggctggggcaccatctggggaccctgacgtgaagtttgtcactgactggagaactcggtttgtcgtctgttgcgggggcggcagttatggcggtgccgttgggcagtgcacccgtacctttgggagcgcgcgccctcgtcgtgtcgtgacgtcacccgttctgttggcttataatgcagggtggggccacctgccgacaatgcagatcttcgtgaagactctgactggtaagaccatcaccctcgaggttgagcccagtgacaccatcgagaatgtcaaggcaaagatccaagataaggaaggcatccctcctgaccagcagaggctgatctttgctggaaaacagctggaagatgggcgcaccctgtctgactacaacatccagaaagagtccaccctgcacctggtgctccgtctcagaggtgggatgcaaatcttcgtgaagacactcactggcaagaccatcacccttgaggtcgagcccagtgacaccatcgagaacgtcaaagcaaagatccaggacaaggaaggcattcctcctgaccagcagaggttgatctttgccgg

SEQ ID NO: 100066 - DNA, 622 bp, Artificial Sequence
  derived and/or modified sequence
acgtcacccgttctgttggcttataatgcagggtggggccacctgccggtaggtgtgcggtaggcttttctccgtcgcaggacgcagggttcgggcctagggtaggctctcctgaatcgacaggcgccggacctctgacaatgcagatcttcgtgaagactctgactggtaagaccatcaccctcgaggttgagcccagtgacaccatcgagaatgtcaaggcaaagatccaagataaggaaggcatccctcctgaccagcagaggctgatctttgctggaaaacagctggaagatgggcgcaccctgtctgactacaacatccagaaagagtccaccctgcacctggtgctccgtctcagaggtgggatgcaaatcttcgtgaagacactcactggcaagaccatcacccttgaggtcgagcccagtgacaccatcgagaacgtcaaagcaaagatccaggacaaggaaggcattcctcctgaccagcagaggttgatctttgccggaaagcagctggaagatgggcgcaccctgtctgactacaacatccagaaagagtctaccctgcacctggtgctccgtctcagaggtgggatgcagatcttcgtgaagaccctgac

SEQ ID NO: 100067 - DNA, 627 bp, Artificial Sequence
  derived and/or modified sequence
acttggtgagtagcgggctgctgggctggccggggctttcgtggccgccgggccgctcggtgggacggaggcgtgtggagagaccgccaagggctgtagtctgggtccgcgagcaaggttgccctgaactgggggttggggggagcgcagcaaaatggcggctgttcccgagtcttgaatggaagacgcttgtgaggcgggctgtgaggtcgttgaaacaagacaatgcagatcttcgtgaagactctgactggtaagaccatcaccctcgaggttgagcccagtgacaccatcgagaatgtcaaggcaaagatccaagataaggaaggcatccctcctgaccagcagaggctgatctttgctggaaaacagctggaagatgggcgcaccctgtctgactacaacatccagaaagagtccaccctgcacctggtgctccgtctcagaggtgggatgcaaatcttcgtgaagacactcactggcaagaccatcacccttgaggtcgagcccagtgacaccatcgagaacgtcaaagcaaagatccaggacaaggaaggcattcctcctgaccagcagaggttgatctttgccggaaagcagctggaagatgggcgcaccctgtctgac

SEQ ID NO: 100068 - DNA, 582 bp, Artificial Sequence
  derived and/or modified sequence
ttctccgtcgcaggacgcagggttcgggcctagggtaggctctcctgaatcgacaggcgccggacctctgacaatgcagatcttcgtgaagactctgactggtaagaccatcaccctcgaggttgagcccagtgacaccatcgagaatgtcaaggcaaagatccaagataaggaaggcatccctcctgaccagcagaggctgatctttgctggaaaacagctggaagatgggcgcaccctgtctgactacaacatccagaaagagtccaccctgcacctggtgctccgtctcagaggtgggatgcaaatcttcgtgaagacactcactggcaagaccatcacccttgaggtggagcccagtgacaccatcgagaatgtcaaggcaaagatccaagataaggaaggcattccttctgatcagcagaggttgatctttgccggaaaacagctggaagatggtcgtaccctgtctgactacaacatccagaaagagtccaccttgcacctggtactccgtctcagaggtgggatgcaaatcttcgtgaagacactcactggcaagaccatcacccttgaggtcga

SEQ ID NO: 100069 - DNA, 548 bp, Artificial Sequence
  derived and/or modified sequence
ataatgcagggtggggccacctgccggtaggtgtgcggtaggcttttctccgtcgcaggacgcagggttcgggcctaggacaatgcagatcttcgtgaagactctgactggtaagaccatcaccctcgaggttgagcccagtgacaccatcgagaatgtcaaggcaaagatccaagataaggaaggcatccctcctgaccagcagaggctgatctttgctggaaaacagctggaagatgggcgcaccctgtctgactacaacatccagaaagagtccaccctgcacctggtgctccgtctcagaggtgggatgcaaatcttcgtgaagacactcactggcaagaccatcacccttgaggtcgagcccagtgacaccatcgagaacgtcaaagcaaagatccaggacaaggaaggcattcctcctgaccagcagaggttgatctttgccggaaagcagctggaagatgggcgcaccctgtctgactacaacatccagaaagagtctaccctgcacctggtgctccgtctcagaggtgggatgcagatct

SEQ ID NO: 100070 - DNA, 559 bp, Artificial Sequence
  derived and/or modified sequence
agcaaaatggcggctgttcccgagtcttgaatggaagacgcttgtgaggcgggctgtgaggtcgttgaaacaaggtggggggcatggtgggcggcaagaacccaaggtcttgaggccttcgctaatgcgggaaagctcttattcggacaatgcagatcttcgtgaagactctgactggtaagaccatcaccctcgaggttgagcccagtgacaccatcgagaatgtcaaggcaaagatccaagataaggaaggcatccctcctgaccagcagaggctgatctttgctggaaaacagctggaagatgggcgcaccctgtctgactacaacatccagaaagagtccaccctgcacctggtgctccgtctcagaggtgggatgcaaatcttcgtgaagacactcactggcaagaccatcacccttgaggtcgagcccagtgacaccatcgagaacgtcaaagcaaagatccaggacaaggaaggcattcctcctgaccagcagaggttgatctttgccggaaagcagctggaagatgggcgcaccctgtctgactacaacat

SEQ ID NO: 100071 - protein, 545 aa, Artificial Sequence
  derived and/or modified sequence
MPEGGGTSRRLLPMQSRFVVCIMSGARSKLALFLCGCYVVALGAHTGEESVADHHEAEYYVAAVYEHPSILSLNPLALISRQEALELMNQNLDIYEQQVMTAAQKDVQIIVFPEDGIHGFNFTRTSIYPFLDFMPSPQVVRWNPCLEPHRFNDTEVLQRLSCMAIRGDMFLVANLGTKEPCHSSDPRCPKDGRYQFNTNVVFSNNGTLVDRYRKHNLYFEAAFDVPLKVDLITFDTPFAGRFGIFTCFDILFFDPAIRVLRDYKVKHVVYPTAWMNQLPLLAAIEIQKAFAVAFGINVLAANVHHPVLGMTGSGIHTPLESFWYHDMENPKSHLIIAQVAKNPVGLIGAENATGETDPSHSKFLKILSGDPYCEKDAQEVHCDEATKWNVNAPPTFHSEMMYDNFTLVPVWGKEGYLHVCSNGLCCYLLYERPTLSKELYALGVFDGLHTVHGTYYIQVCALVRCGGLGFDTCGQEITEATGIFEFHLWGNFSTSYIFPLFLTSGMTLEVPDQLGWENDHYFLRKSRLSSGLVTAALYGRLYERD

SEQ ID NO: 100072 - DNA, 1572 bp, Artificial Sequence
  derived and/or modified sequence
atgtctggcgctcggtctaagcttgccctgttcctgtgtggatgctacgtcgtggcacttggagcacacaccggcgaggaatctgtggcggaccaccatgaagccgagtactacgtcgccgctgtgtacgagcaccctagcatcctgtccttgaaccctttggctcttatcagcaggcaagaggcactcgaactgatgaaccaaaatctggacatctatgagcagcaggtgatgactgcagcacagaaggatgtgcaaatcattgtgttccccgaggacggaatccatggattcaacttcactcggacatcaatctatccctttctggacttcatgccctcgcctcaagtggtcagatggaatccatgtctcgagcctcacagattcaacgacacagaagtgctacagaggctgagctgcatggccattaggggcgacatgtttctcgtagcgaatttaggcaccaaagagccttgtcactcgtcagatccaaggtgcccaaaagatggcagatatcaatttaatactaatgttgttttctcaaataatgggaccttagtcgatagataccggaaacataatctctactttgaggctgcctttgacgtgcccctcaaggtggacttgattaccttcgacactcctttcgctggccgattcggaatctttacctgcttcgacatattgtttttcgatccagctattagagtcctgcgcgactacaaagtaaagcatgttgtctatccgacagcttggatgaaccagctccccctgctggccgcgattgagatccagaaggccttcgccgtagccttcggcatcaacgttttagcggccaatgtgcatcatccagtgctcggaatgactgggagtggaatccacactcctctggaatcattctggtatcacgatatggaaaatcccaagagccacctaataatcgcacaggtcgccaagaacccagtagggctgatcggcgctgaaaatgccacgggagagacagacccttcccatagcaagttcctgaagatcttatctggcgacccttattgcgaaaaagacgctcaggaggtgcactgcgacgaggcaactaagtggaacgttaatgctccccctacttttcactccgaaatgatgtatgataatttcactctggtgccagtgtggggcaaggaggggtatctgcacgtctgtagtaatggcctctgctgttatcttctctacgaacggcctaccctcagcaaggagctctacgcattgggtgtgttcgacggtctacacactgtccatgggacctactatattcaggtatgtgcactggttcgatgtggcggcctggggtttgacacctgcggccaggagatcacagaggccaccgggatcttcgagttccacttgtggggcaacttcagcacctcttatattttcccgctctttttgacatccgggatgaccctggaggtgcctgatcagctcgggtgggagaatgatcactacttcctgcggaagagcaggctgtcctccggactggtcacagctgccctttacgggcggctctatgaacgcgattag

SEQ ID NO: 100073 - DNA, 1638 bp, Artificial Sequence
  derived and/or modified sequence
atgcccgagggcggcggaacttcccgcaggttgctgcctatgcagtctcgattcgtcgtgtgcatcatgtcaggggcaaggtctaaattagccctttttttgtgcggctgttacgttgtagcactcggcgcccacactggcgaggaatccgtggccgaccaccatgaagcggagtattatgtggccgcggtgtatgagcaccctagtatactgtctctgaaccccctggccctgattagccgtcaagaagccctcgagctgatgaatcagaatctggatatctacgagcaacaggtgatgactgctgcccaaaaagatgttcagataattgtgtttcccgaagacgggatacacggatttaatttcacaaggacctctatctaccccttcttggactttatgccctctcctcaagtcgtgcgatggaacccgtgcctggaaccccatcgctttaacgacacagaggtactccagcggctgagctgcatggccattcgtggtgatatgttcctcgttgccaacctcggaactaaggagccttgccactcatctgatccacgctgcccaaaggacggcagatatcagttcaacacaaacgtggtttttagcaataacgggaccctagttgaccgatataggaaacataacctgtactttgaggccgctttcgatgtaccactgaaggtggatctcattactttcgataccccttttgccggccgattcggcattttcacctgtttcgacattcttttttttgaccccgcaattagggtgctccgcgattacaaggtcaagcatgtggtctatccgaccgcatggatgaatcaattacccctactcgccgctatcgaaattcagaaagcctttgccgtcgccttcgggattaacgtgctggctgcaaatgtgcaccaccccgtgctggggatgaccggatcaggcatccacactcccctagagtccttttggtatcatgatatggagaaccccaagagccacctcataatcgcccaggtcgccaaaaatccagtggggctgatcggcgctgagaatgccaccggcgagactgacccttcccatagtaagttcctgaagattctcagcggcgacccatattgtgagaaagatgcccaggaggtgcattgtgatgaggctacaaagtggaacgtaaacgctccacccacgttccacagtgagatgatgtatgataatttcacgctggtcccagtatggggaaaagaaggctacctccatgtctgctccaacgggctgtgttgctacctgttatacgagagacccacactgtccaaggagttgtacgctctgggtgtcttcgatgggctgcataccgtacatggaacatattatatacaagtgtgcgcccttgttaggtgtgggggcctgggcttcgacacctgcgggcaggaaattactgaggccacaggcatctttgagtttcatttgtggggaaacttttcgacctcttacattttccctctcttcctgaccagcggcatgaccctggaggtgcccgaccaacttggctgggaaaacgatcactatttcctgcgcaagtcacggctttcctcaggcctcgtgactgctgccttgtatggtcgcctgtacgaaagagactag

SEQ ID NO: 100074 - DNA, 1572 bp, Artificial Sequence
  derived and/or modified sequence
atgtctggggcccggagcaagctggccctcttcctgtgtggctgctacgtggtggccctgggcgcccacactggagaggagagcgtggccgaccaccatgaagctgagtactacgtggccgctgtgtatgagcaccccagcatcctgagcctgaaccccctggccctgatcagccggcaggaggccctggagctgatgaaccagaacctggacatctatgagcagcaggtgatgacagctgcccagaaggatgtgcagatcatcgtgtttcctgaagatggcatccacggcttcaacttcaccaggaccagcatctaccccttcctggacttcatgcccagcccccaggtggtgcgctggaacccctgcctggagccccaccgcttcaatgacacagaggtgctgcagaggctgagctgcatggccatccggggggacatgttcctggtggccaacctgggcaccaaggagccctgccacagcagtgacccccgctgccccaaggatggccgctaccagttcaacaccaacgtggtgttcagcaacaacggcaccctggtggaccgctacaggaagcacaacctgtactttgaagctgcctttgatgtgcccctgaaggtggacctgatcacctttgacaccccatttgctggccgcttcggcatcttcacctgctttgacatcctcttctttgatcctgccatccgggtgctgcgggactacaaggtgaagcacgtggtgtaccccacagcctggatgaaccagctgcccctgctggccgccatcgagatccagaaggcctttgctgtggccttcggcatcaacgtgctggccgccaacgtgcaccaccctgtgctgggcatgactggaagtggcatccacacccccctggagagcttctggtaccatgacatggagaaccccaagagccacctgatcatcgcccaggtggccaagaaccctgtgggcctgattggagcagaaaatgccactggagaaacagaccccagccacagcaagttcctgaagatcctgagcggggacccctactgtgagaaggatgcccaggaggtgcactgtgatgaggccaccaagtggaatgtgaatgccccacccaccttccacagcgagatgatgtatgacaacttcaccctggtgcctgtgtggggcaaggagggctacctgcacgtgtgcagcaatggcctgtgctgctacctgctgtatgaaagacccaccctgagcaaggagctgtatgccctgggcgtgtttgatggcctgcacacagtgcacggcacctactacatccaggtgtgtgccctggtgcgctgtggcggcctgggctttgacacctgtggccaggagatcacagaggccaccggcatctttgagttccacctgtggggcaacttcagcaccagctacatcttccccctcttcctgaccagcggcatgaccctggaggtgcctgaccagctgggctgggagaatgaccactacttcctgaggaagagccggctgagcagcggcctggtgacagctgccctgtatggccgcctgtatgaaagagactag

SEQ ID NO: 100075 - DNA, 1638 bp, Artificial Sequence
  derived and/or modified sequence
atgcctgagggcggcggcaccagccggcggctgctgcccatgcagagcagatttgtggtgtgcatcatgtctggggcccggagcaagctggccctcttcctgtgtggctgctacgtggtggccctgggcgcccacactggagaggagagcgtggccgaccaccatgaagctgagtactacgtggccgctgtgtatgagcaccccagcatcctgagcctgaaccccctggccctgatcagccggcaggaggccctggagctgatgaaccagaacctggacatctatgagcagcaggtgatgacagctgcccagaaggatgtgcagatcatcgtgtttcctgaagatggcatccacggcttcaacttcaccaggaccagcatctaccccttcctggacttcatgcccagcccccaggtggtgcgctggaacccctgcctggagccccaccgcttcaatgacacagaggtgctgcagaggctgagctgcatggccatccggggggacatgttcctggtggccaacctgggcaccaaggagccctgccacagcagtgacccccgctgccccaaggatggccgctaccagttcaacaccaacgtggtgttcagcaacaacggcaccctggtggaccgctacaggaagcacaacctgtactttgaagctgcctttgatgtgcccctgaaggtggacctgatcacctttgacaccccatttgctggccgcttcggcatcttcacctgctttgacatcctcttctttgatcctgccatccgggtgctgcgggactacaaggtgaagcacgtggtgtaccccacagcctggatgaaccagctgcccctgctggccgccatcgagatccagaaggcctttgctgtggccttcggcatcaacgtgctggccgccaacgtgcaccaccctgtgctgggcatgactggaagtggcatccacacccccctggagagcttctggtaccatgacatggagaaccccaagagccacctgatcatcgcccaggtggccaagaaccctgtgggcctgattggagcagaaaatgccactggagaaacagaccccagccacagcaagttcctgaagatcctgagcggggacccctactgtgagaaggatgcccaggaggtgcactgtgatgaggccaccaagtggaatgtgaatgccccacccaccttccacagcgagatgatgtatgacaacttcaccctggtgcctgtgtggggcaaggagggctacctgcacgtgtgcagcaatggcctgtgctgctacctgctgtatgaaagacccaccctgagcaaggagctgtatgccctgggcgtgtttgatggcctgcacacagtgcacggcacctactacatccaggtgtgtgccctggtgcgctgtggcggcctgggctttgacacctgtggccaggagatcacagaggccaccggcatctttgagttccacctgtggggcaacttcagcaccagctacatcttccccctcttcctgaccagcggcatgaccctggaggtgcctgaccagctgggctgggagaatgaccactacttcctgaggaagagccggctgagcagcggcctggtgacagctgccctgtatggccgcctgtatgaaagagactag

SEQ ID NO: 100076 - DNA, 1572 bp, Artificial Sequence
  derived and/or modified sequence
atgagcggcgcccggagcaagctggccctgttcctgtgcggctgctatgtggttgctctaggggctcacaccggggaggagtccgtcgccgaccaccacgaggccgaatattacgttgcagctgtgtatgagcacccctccatcctgagcctgaacccattggcgcttatctcacggcaagaagccttggagctcatgaatcagaatctggacatatatgagcagcaggtcatgacggctgcccagaaagacgtgcagatcattgtgttcccagaagacggaattcacggctttaacttcactcgaacttcgatctacccttttctggattttatgccatctccacaagttgtgagatggaacccttgtctagagcctcacaggtttaacgacacagaagtgctgcagaggctttcctgtatggcgatacgtggcgatatgttcctcgtggcgaatttagggacaaaggaaccatgtcactcgagcgatccccgatgccctaaggacggcagatatcaatttaatacaaatgtggtcttcagcaataatggaaccctcgtagatagatatcggaagcataacctgtacttcgaggcagcattcgacgtaccactgaaggtggatttaatcacgtttgataccccatttgcaggacgctttggtatcttcacttgttttgatattctgttttttgaccccgccatcagggtgttgcgggactataaagtgaagcatgtcgtgtaccccaccgcctggatgaaccagcttcccctgctggccgccattgagatccagaaggccttcgctgtcgcgttcggtattaatgttctcgcggctaacgtccaccatcctgtgctcggtatgaccggaagtggaattcatacgcctctagagtccttctggtatcacgacatggagaatcctaagtcgcacctgatcattgcgcaggtggcgaagaatccggtgggtctcataggggctgagaacgctactggggaaactgaccctagtcactctaagtttctgaaaatcctgagcggagatccatactgtgaaaaggatgcccaagaggtacattgcgacgaagccacaaaatggaatgtgaacgcccctcccacattccattctgaaatgatgtacgacaatttcaccctagtaccagtgtggggaaaagagggctacctccacgtttgtagtaatggactgtgttgttacctgctttatgaacgaccgacgttgtctaaggagctttacgctctaggtgtctttgatggactgcacacagttcacggcacctattatatacaagtctgtgcactggtaaggtgcggcggcttaggcttcgacacgtgcgggcaggaaattacagaagccactggtatcttcgaattccatctgtggggaaatttttcaactagctatattttcccacttttcctgacgtctgggatgacccttgaagtgcctgatcaactgggctgggagaacgatcactatttccttcgcaagtccagactgagcagtgggcttgtgacagctgctctgtacggacggctttatgagagggattag

SEQ ID NO: 100077 - DNA, 1638 bp, Artificial Sequence
  derived and/or modified sequence
atgcccgagggcggcggcaccagccggcggctgctgcccatgcagagcagattcgtcgtatgcattatgtcaggcgctcgcagtaagctggccctctttttgtgcggatgctacgtcgttgctctgggcgcacacactggcgaggaatctgtggcggaccatcatgaggctgaatactacgttgccgcggtgtatgaacacccatcaattctgagtttgaatcccctggctctgataagtcgccaggaggcgcttgaacttatgaatcagaatctggatatctatgagcagcaagtgatgactgcagcacaaaaggatgtgcagatcatcgttttccccgaggatggcatccacgggttcaactttacccgaacaagtatctacccatttcttgacttcatgcccagcccccaagtggtcagatggaatccatgtctggagccacatagatttaacgacaccgaagtgctccaacgactgtcgtgtatggccatacgcggcgacatgttcctggtggcgaatctgggcacgaaggagccttgccacagtagcgacccccgttgccctaaagacggtaggtatcaattcaacaccaacgtagtattcagtaacaacggaactttggtggaccgatatcgtaaacacaacctctacttcgaagccgcattcgacgtgccacttaaggttgacctgatcactttcgataccccctttgcaggacgattcggtatctttacttgttttgacatcctgtttttcgacccagccattcgtgtcctgagggattataaggttaagcatgtggtgtaccccacagcttggatgaatcagctgccactccttgctgccatcgaaatccagaaggctttcgcggtcgcctttggaatcaacgtactggcggccaatgttcatcaccccgtcttaggtatgactggcagcgggattcacacgccacttgaaagcttctggtaccacgacatggaaaatcctaagtcccatttgattatagcccaagtggcaaaaaatcctgtcggcctaattggggccgaaaatgcgaccggagagacagatccttcccattccaagtttctgaaaattctgtccggagatccttactgcgaaaaagatgcacaggaagtgcactgcgatgaagccacgaaatggaatgtgaatgccccccccacctttcattccgaaatgatgtatgataattttactttagtgcccgtctgggggaaggaggggtatctgcatgtgtgcagcaacgggctatgctgctatttgttatatgagaggcctaccctgtccaaggaactctatgccctgggtgtgttcgatggtctgcacacagtacatggaacctattacatccaagtttgcgctttagtgaggtgcggtggcctcggcttcgatacttgcggtcaggaaatcaccgaagctaccggaatctttgaatttcatttatggggcaacttcagcaccagctatatctttcccctctttctgaccagcggcatgactcttgaggtgcctgatcagctgggctgggaaaatgatcattatttcctgcgtaagagccggctgtcctcaggcctggtcacggcagccctgtacggccggctttacgagagagattag

SEQ ID NO: 100078 - DNA, 1572 bp, Artificial Sequence
  derived and/or modified sequence
atgtctggggcacggtccaagctggctctgttcctctgcggttgctacgtagtcgcactgggggcacacactggcgaggagagcgtggcagaccatcatgaagcagaatactacgtcgcagctgtatacgaacacccctccattctttcattgaatcccctggcactgattagcagacaggaagcactcgaactgatgaatcagaacttggacatctacgagcagcaagttatgacggccgctcagaaagatgtacaaatcatcgtgttccccgaagatggtattcatgggttcaattttacacgaacctcgatctaccccttccttgacttcatgcccagcccacaggtggtccggtggaacccatgcctggagcctcatcggtttaacgataccgaggtgctgcagcgccttagctgtatggccattagaggtgacatgttcttagtagccaatctcgggaccaaagaaccttgccactccagcgatcctaggtgccctaaagacggccgttatcagtttaacacaaacgtggtgttctcaaataacggaacactagtcgaccgctaccggaagcataacttatacttcgaggcagcttttgacgtgcccctgaaggtcgatttgatcacttttgacaccccctttgctggaagattcggcatcttcacatgctttgatatcctgtttttcgatcctgccataagagtgctccgtgactataaagtgaaacatgtggtctaccctaccgcatggatgaaccagctccctctcctagccgctatcgaaatacagaaggcctttgccgttgcctttggtattaatgtgctggcagccaatgtccaccatcccgtgctcggaatgactgggtccggtattcacacccctttggagtcattctggtaccatgatatggaaaatcccaaatctcacctcatcatcgcccaggttgccaagaatcctgttggactcatcggcgcagaaaacgccactggagagacggatccgtcccactccaaattcctgaagatcctgtccggggatccttactgtgaaaaagacgcccaggaggtgcattgcgacgaggcaaccaagtggaatgtcaatgcacccccaacctttcactcagagatgatgtacgataatttcacactcgtccctgtctggggcaaagaaggctacttgcacgtgtgtagtaatggtctttgttgttacctcctttacgagcggccaacactgtccaaggagctttacgccctgggagtcttcgacggtctgcataccgtccatggaacatattatattcaggtctgtgctctggtgcgatgcggtgggcttggattcgacacatgcgggcaggagatcaccgaggcaacgggcattttcgagttccatctgtggggtaatttcagcactagctacatctttccactgtttctgacctccgggatgacattggaggtaccggatcagctgggttgggagaatgatcattactttcttcgcaaatcgaggcttagttccggcctggtaacggcagcgctgtatggtagactttacgaacgagattag

SEQ ID NO: 100079 - DNA, 1638 bp, Artificial Sequence
  derived and/or modified sequence
atgccagaaggcggtgggacttcgcggaggcttctgccaatgcaatcgagattcgtcgtatgcatcatgagcggggcacgtagtaagctggctctcttcctgtgtggatgttacgtggtggcccttggtgcccacactggggaggagtccgtagcggaccaccatgaggccgaatattacgtggctgcagtctatgaacaccctagcattctctcgcttaaccctctggcactgattagcaggcaggaagcgctggagctcatgaaccagaacctggatatttatgagcagcaggtgatgaccgcagcccagaaggacgtgcagatcattgtgtttccagaagacgggatccacgggttcaattttacacgaacatccatctatccattcttggacttcatgcccagccctcaggttgttaggtggaacccttgcctggaacctcatcggtttaacgatactgaagtactccaacggctcagctgtatggcgattagaggtgacatgtttctggtggcgaatctgggaaccaaagaaccatgccactcgtccgatccacgttgccctaaggacgggagatatcagttcaacacgaacgttgtgttctcaaataatggcaccttagtggatagatataggaagcacaacctctatttcgaagctgcttttgacgtaccgctgaaggtggacctgatcaccttcgacactcctttcgcaggacgttttgggatcttcacatgcttcgacatcctttttttcgacccagcaatccgtgtactgagggattataaggtgaaacatgtcgtctacccaaccgcctggatgaaccagttacctctgctcgccgcaatcgagatccagaaagcctttgccgtggctttcggaattaacgttttggccgctaatgttcatcaccctgtgctagggatgacaggaagcgggatccacacacccctggaatctttttggtaccacgacatggagaatcctaagtcccatttgatcatcgcccaggtggctaagaaccccgtgggcttgattggcgcagagaacgcgaccggcgaaacggaccccagtcattctaagtttttgaagatcttgagcggcgatccatattgcgagaaggacgcccaagaagtgcactgcgacgaagctacaaagtggaatgtaaatgcccctcctacattccattctgaaatgatgtacgataatttcacgttggtcccagtgtgggggaaggaagggtatctccacgtgtgtagcaatggactttgctgttatttgctgtatgagcgtcccaccctaagcaaggagctatatgcgctcggcgtgttcgatgggttgcacacagtccacggaacctattacattcaggtttgtgcccttgtcagatgcgggggactgggtttcgatacatgcggccaggagattacggaggctacagggattttcgaatttcatctgtggggcaacttcagcacctcttacattttccccctctttctcacgtccggcatgaccctggaagtgccagaccagttgggatgggagaatgaccactattttcttcggaaaagccgcttatcctccggcctggtaaccgcggcactatatgggagactctacgagagggactag

SEQ ID NO: 100080 - DNA, 1820 bp, Artificial Sequence
  derived and/or modified sequence
cacttcccgggagaggtgagaatgtaaacacgcgcgttctccaatcagaactgcgctctcttctcggctcctccattcgcgcgccagaatgccagagggaggcgggactagcaggagattgctgcctatgcaaagcagatttgtggtctgcattatgtctggagccagaagtaagcttgctcttttcctctgcggctgttacgtggttgccctgggagcccacaccggggaggagagcgtggctgaccatcacgaggctgaatattatgtggctgccgtgtatgagcatccatccatcctgagtctgaaccctctggctctcatcagccgccaagaggccttggagctcatgaaccagaaccttgacatctatgaacagcaagtgatgactgcagcccaaaaggatgtacagattatagtgtttccagaagatggcattcatggattcaactttacaagaacatccatttatccatttttggacttcatgccgtctccccaggtggtcaggtggaacccatgcctggagcctcaccgcttcaatgacacagaggtgctccagcgcctgagttgtatggccatcaggggagatatgttcttggtggccaatcttgggacaaaggagccttgtcatagcagtgacccaaggtgcccaaaagatgggagataccagttcaacacaaatgtcgtgttcagcaataatggaacccttgttgaccgctaccgtaaacacaacctctactttgaggcagcattcgatgttcctcttaaagtggatctcatcacctttgataccccctttgctggcaggtttggcatcttcacatgctttgatatattgttctttgaccctgccatcagagtcctcagagactacaaggtgaagcatgttgtgtacccaactgcctggatgaaccagctcccactcttggcagcaattgagattcagaaagcttttgctgttgcctttggcatcaacgttctggcagctaatgtccaccacccagttctggggatgacaggaagtggcatacacacccctctggagtccttttggtaccatgacatggaaaatcccaaaagtcaccttataattgcccaggtggccaaaaatccagtgggtctcattggtgcagagaatgcaacaggtgaaacggacccatcccatagtaagtttttaaaaattttgtcaggcgatccgtactgtgagaaggatgctcaggaagtccactgtgatgaggccaccaagtggaacgtgaatgctcctcccacatttcactctgagatgatgtatgacaatttcaccctggtccctgtctggggaaaggaaggctatctccacgtctgttccaatggcctctgctgttatttactttacgagaggcccaccttatccaaagagctgtatgccctgggggtctttgatgggcttcacacagtacatggcacttactacatccaagtgtgtgccctggtcaggtgtgggggtcttggcttcgacacctgtggacaggaaatcacagaggccacggggatatttgagtttcacctgtggggcaacttcagtacttcctatatctttcctttgtttctgacctcagggatgaccctagaagtccctgaccagcttggctgggagaatgaccactatttcctgaggaaaagtaggctgtcctctgggctggtgacggcggctctctatgggcgcttgtatgagagggactaggaaaagtgtgtggtctgtggggcggactctggccatcatgttgacagccttgcacttccacaggctacaagccctgggaccatctttctgcctt

SEQ ID NO: 100081 - DNA, 1572 bp, Artificial Sequence
  derived and/or modified sequence
atgagcggcgccagaagcaagctggccctgttcctgtgcggctgctacgtggtggccctgggcgcccacaccggcgaggagagcgtggccgaccaccacgaggccgagtactacgtggccgccgtgtacgagcaccccagcatcctgagcctgaaccccctggccctgatcagcagacaggaggccctggagctgatgaaccagaacctggacatctacgagcagcaggtgatgaccgccgcccagaaggacgtgcagatcatcgtgttccccgaggacggcatccacggcttcaacttcaccagaaccagcatctaccccttcctggacttcatgcccagcccccaggtggtgagatggaacccctgcctggagccccacagattcaacgacaccgaggtgctgcagagactgagctgcatggccatcagaggcgacatgttcctggtggccaacctgggcaccaaggagccctgccacagcagcgaccccagatgccccaaggacggcagataccagttcaacaccaacgtggtgttcagcaacaacggcaccctggtggacagatacagaaagcacaacctgtacttcgaggccgccttcgacgtgcccctgaaggtggacctgatcaccttcgacacccccttcgccggcagattcggcatcttcacctgcttcgacatcctgttcttcgaccccgccatcagagtgctgagagactacaaggtgaagcacgtggtgtaccccaccgcctggatgaaccagctgcccctgctggccgccatcgagatccagaaggccttcgccgtggccttcggcatcaacgtgctggccgccaacgtgcaccaccccgtgctgggcatgaccggcagcggcatccacacccccctggagagcttctggtaccacgacatggagaaccccaagagccacctgatcatcgcccaggtggccaagaaccccgtgggcctgatcggcgccgagaacgccaccggcgagaccgaccccagccacagcaagttcctgaagatcctgagcggcgacccctactgcgagaaggacgcccaggaggtgcactgcgacgaggccaccaagtggaacgtgaacgccccccccaccttccacagcgagatgatgtacgacaacttcaccctggtgcccgtgtggggcaaggagggctacctgcacgtgtgcagcaacggcctgtgctgctacctgctgtacgagagacccaccctgagcaaggagctgtacgccctgggcgtgttcgacggcctgcacaccgtgcacggcacctactacatccaggtgtgcgccctggtgagatgcggcggcctgggcttcgacacctgcggccaggagatcaccgaggccaccggcatcttcgagttccacctgtggggcaacttcagcaccagctacatcttccccctgttcctgaccagcggcatgaccctggaggtgcccgaccagctgggctgggagaacgaccactacttcctgagaaagagcagactgagcagcggcctggtgaccgccgccctgtacggcagactgtacgagagagactag

SEQ ID NO: 100082 - DNA, 1638 bp, Artificial Sequence
  derived and/or modified sequence
atgcccgagggcggcggcaccagcagaagactgctgcccatgcagagcagattcgtggtgtgcatcatgagcggcgccagaagcaagctggccctgttcctgtgcggctgctacgtggtggccctgggcgcccacaccggcgaggagagcgtggccgaccaccacgaggccgagtactacgtggccgccgtgtacgagcaccccagcatcctgagcctgaaccccctggccctgatcagcagacaggaggccctggagctgatgaaccagaacctggacatctacgagcagcaggtgatgaccgccgcccagaaggacgtgcagatcatcgtgttccccgaggacggcatccacggcttcaacttcaccagaaccagcatctaccccttcctggacttcatgcccagcccccaggtggtgagatggaacccctgcctggagccccacagattcaacgacaccgaggtgctgcagagactgagctgcatggccatcagaggcgacatgttcctggtggccaacctgggcaccaaggagccctgccacagcagcgaccccagatgccccaaggacggcagataccagttcaacaccaacgtggtgttcagcaacaacggcaccctggtggacagatacagaaagcacaacctgtacttcgaggccgccttcgacgtgcccctgaaggtggacctgatcaccttcgacacccccttcgccggcagattcggcatcttcacctgcttcgacatcctgttcttcgaccccgccatcagagtgctgagagactacaaggtgaagcacgtggtgtaccccaccgcctggatgaaccagctgcccctgctggccgccatcgagatccagaaggccttcgccgtggccttcggcatcaacgtgctggccgccaacgtgcaccaccccgtgctgggcatgaccggcagcggcatccacacccccctggagagcttctggtaccacgacatggagaaccccaagagccacctgatcatcgcccaggtggccaagaaccccgtgggcctgatcggcgccgagaacgccaccggcgagaccgaccccagccacagcaagttcctgaagatcctgagcggcgacccctactgcgagaaggacgcccaggaggtgcactgcgacgaggccaccaagtggaacgtgaacgccccccccaccttccacagcgagatgatgtacgacaacttcaccctggtgcccgtgtggggcaaggagggctacctgcacgtgtgcagcaacggcctgtgctgctacctgctgtacgagagacccaccctgagcaaggagctgtacgccctgggcgtgttcgacggcctgcacaccgtgcacggcacctactacatccaggtgtgcgccctggtgagatgcggcggcctgggcttcgacacctgcggccaggagatcaccgaggccaccggcatcttcgagttccacctgtggggcaacttcagcaccagctacatcttccccctgttcctgaccagcggcatgaccctggaggtgcccgaccagctgggctgggagaacgaccactacttcctgagaaagagcagactgagcagcggcctggtgaccgccgccctgtacggcagactgtacgagagagactag

SEQ ID NO: 100083 - protein, 523 aa, Artificial Sequence
  derived and/or modified sequence
MSGARSKLALFLCGCYVVALGAHTGEESVADHHEAEYYVAAVYEHPSILSLNPLALISRQEALELMNQNLDIYEQQVMTAAQKDVQIIVFPEDGIHGFNFTRTSIYPFLDFMPSPQVVRWNPCLEPHRFNDTEVLQRLSCMAIRGDMFLVANLGTKEPCHSSDPRCPKDGRYQFNTNVVFSNNGTLVDRYRKHNLYFEAAFDVPLKVDLITFDTPFAGRFGIFTCFDILFFDPAIRVLRDYKVKHVVYPTAWMNQLPLLAAIEIQKAFAVAFGINVLAANVHHPVLGMTGSGIHTPLESFWYHDMENPKSHLIIAQVAKNPVGLIGAENATGETDPSHSKFLKILSGDPYCEKDAQEVHCDEATKWNVNAPPTFHSEMMYDNFTLVPVWGKEGYLHVCSNGLCCYLLYERPTLSKELYALGVFDGLHTVHGTYYIQVCALVRCGGLGFDTCGQEITEATGIFEFHLWGNFSTSYIFPLFLTSGMTLEVPDQLGWENDHYFLRKSRLSSGLVTAALYGRLYERD

SEQ ID NO: 100084 - protein, 545 aa, Artificial Sequence
  derived and/or modified sequence
MARKETQLIIKMNHLARFVVCIMSGARSKLALFLCGCYVVALGAHTGEESVADHHEAEYYVAAVYEHPSILSLNPLALISRQEALELMNQNLDIYEQQVMTAAQKDVQIIVFPEDGIHGFNFTRTSIYPFLDFMPSPQVVRWNPCLEPHRFNDTEVLQRLSCMAIRGDMFLVANLGTKEPCHSSDPRCPKDGRYQFNTNVVFSNNGTLVDRYRKHNLYFEAAFDVPLKVDLITFDTPFAGRFGIFTCFDILFFDPAIRVLRDYKVKHVVYPTAWMNQLPLLAAIEIQKAFAVAFGINVLAANVHHPVLGMTGSGIHTPLESFWYHDMENPKSHLIIAQVAKNPVGLIGAENATGETDPSHSKFLKILSGDPYCEKDAQEVHCDEATKWNVNAPPTFHSEMMYDNFTLVPVWGKEGYLHVCSNGLCCYLLYERPTLSKELYALGVFDGLHTVHGTYYIQVCALVRCGGLGFDTCGQEITEATGIFEFHLWGNFSTSYIFPLFLTSGMTLEVPDQLGWENDHYFLRKSRLSSGLVTAALYGRLYERD

SEQ ID NO: 100085 - DNA, 1638 bp, Artificial Sequence
  derived and/or modified sequence
atggcaagaaaggaaactcagttgattatcaagatgaatcatctggcccggtttgtggtctgcatcatgtcaggtgcacgtagcaaactagcccttttcttgtgtggctgttatgtggtggcactaggagcgcacactggggaggagtcagttgcagaccaccatgaggcggagtactacgtagccgccgtgtacgaacatccgtccattctctcactaaatcctttggccctgatctccagacaggaagcgctggagctgatgaatcagaacctcgatatttacgagcagcaggtaatgactgcagctcagaaggacgtgcaaattatcgtgttccccgaagatggaatccacggatttaattttacaagaaccagcatctatccctttcttgattttatgccctctcctcaggtcgtaagatggaacccatgccttgagccccacagatttaacgacactgaggtgttgcagaggctgtcttgtatggccattcgcggggatatgttcctggttgcaaacctgggcaccaaagagccttgccactctagcgatccccgttgtccgaaagacggccgttatcagtttaatactaacgtggtctttagcaataacgggacgcttgttgaccgatacagaaagcacaatctgtacttcgaagcagcctttgatgtgccactgaaagtggatctgatcacttttgataccccgttcgccggacgatttggaatcttcacctgcttcgatatcttgttttttgacccagcgattcgtgtgttacgggattataaagtgaaacacgtggtttaccccacagcttggatgaaccaactgcccctgttggctgccatcgagattcagaaagctttcgccgttgctttcgggatcaacgttctcgcagccaacgttcaccaccccgtgttgggcatgaccggtagtggaattcacactcctttagagagcttctggtaccacgatatggagaaccctaaatcacacctgattatcgcacaggttgccaaaaatcccgtgggactcatcggagccgaaaacgccacaggcgaaactgatcccagtcacagcaaattcttgaagatcttgtccggtgatccatactgtgaaaaagatgcccaggaggtgcattgcgacgaagccaccaagtggaacgtaaatgcaccaccaactttccactctgaaatgatgtacgataacttcaccctcgtaccagtctggggtaaggaaggttacttgcacgtgtgctccaatggcttgtgctgttacctgctgtatgaacggccaacgctttcaaaagagttatacgctctaggcgtgttcgacggcctgcacacagtgcacggcacctactacatacaagtctgtgccctggtacggtgcggggggctgggctttgatacgtgtggccaggaaatcaccgaagccacgggcattttcgaattccacctttggggtaatttctcaacttcctatatttttcctctatttctgacgagcggcatgacattggaggttcctgaccagttggggtgggagaatgaccattatttcctgaggaaatcccgactcagcagtgggctggttacagctgccctttacggtaggctgtacgaaagagactag

SEQ ID NO: 100086 - DNA, 1638 bp, Artificial Sequence
  derived and/or modified sequence
atggccaggaaggagacccagctgatcatcaagatgaaccacctggccaggtttgtggtgtgcatcatgtctggggcccggagcaagctggccctcttcctgtgtggctgctacgtggtggccctgggcgcccacactggagaggagagcgtggccgaccaccatgaagctgagtactacgtggccgctgtgtatgagcaccccagcatcctgagcctgaaccccctggccctgatcagccggcaggaggccctggagctgatgaaccagaacctggacatctatgagcagcaggtgatgacagctgcccagaaggatgtgcagatcatcgtgtttcctgaagatggcatccacggcttcaacttcaccaggaccagcatctaccccttcctggacttcatgcccagcccccaggtggtgcgctggaacccctgcctggagccccaccgcttcaatgacacagaggtgctgcagaggctgagctgcatggccatccggggggacatgttcctggtggccaacctgggcaccaaggagccctgccacagcagtgacccccgctgccccaaggatggccgctaccagttcaacaccaacgtggtgttcagcaacaacggcaccctggtggaccgctacaggaagcacaacctgtactttgaagctgcctttgatgtgcccctgaaggtggacctgatcacctttgacaccccatttgctggccgcttcggcatcttcacctgctttgacatcctcttctttgatcctgccatccgggtgctgcgggactacaaggtgaagcacgtggtgtaccccacagcctggatgaaccagctgcccctgctggccgccatcgagatccagaaggcctttgctgtggccttcggcatcaacgtgctggccgccaacgtgcaccaccctgtgctgggcatgactggaagtggcatccacacccccctggagagcttctggtaccatgacatggagaaccccaagagccacctgatcatcgcccaggtggccaagaaccctgtgggcctgattggagcagaaaatgccactggagaaacagaccccagccacagcaagttcctgaagatcctgagcggggacccctactgtgagaaggatgcccaggaggtgcactgtgatgaggccaccaagtggaatgtgaatgccccacccaccttccacagcgagatgatgtatgacaacttcaccctggtgcctgtgtggggcaaggagggctacctgcacgtgtgcagcaatggcctgtgctgctacctgctgtatgaaagacccaccctgagcaaggagctgtatgccctgggcgtgtttgatggcctgcacacagtgcacggcacctactacatccaggtgtgtgccctggtgcgctgtggcggcctgggctttgacacctgtggccaggagatcacagaggccaccggcatctttgagttccacctgtggggcaacttcagcaccagctacatcttccccctcttcctgaccagcggcatgaccctggaggtgcctgaccagctgggctgggagaatgaccactacttcctgaggaagagccggctgagcagcggcctggtgacagctgccctgtatggccgcctgtatgaaagagactag

SEQ ID NO: 100087 - DNA, 1638 bp, Artificial Sequence
  derived and/or modified sequence
atggcccggaaggagacccagctgatcatcaagatgaaccacctggccagattcgtggtctgcattatgtcaggggctcgctctaagctggcactattcctgtgtgggtgttatgtggtggctctcggggctcacacgggagaagagagtgttgcggaccaccatgaggcggaatattacgtggcagccgtctatgaacaccccagtattctgagtcttaatcccctggcactgatctcccgccaggaggcactcgaactgatgaatcagaatttagacatctatgagcagcaggtgatgaccgctgcccagaaagatgtgcagattatcgtgtttcccgaggacggaatccatggattcaatttcacaaggactagcatctaccccttccttgatttcatgccctctccgcaagtggtgaggtggaatccctgcttagaaccacatagatttaacgatacggaggtcctgcagagattatcttgtatggccatccgcggggatatgttcttggtggcaaatctgggcaccaaggagccatgtcacagcagtgatcccaggtgtcccaaagacgggcggtaccagttcaacactaatgtggttttttcaaacaatggaacactcgttgacaggtaccggaagcacaacctgtactttgaggcagctttcgacgttccactgaaggttgatttgatcacctttgacactccctttgctggccgatttggcatttttacatgctttgatatcctcttttttgatccagccatccgggtgttaagggattataaagtcaagcacgtcgtgtacccaactgcatggatgaaccagctgccgcttttggctgccatcgaaatccagaaggctttcgcagtggcatttgggataaatgttctggcagccaatgtgcatcatcccgtgctgggaatgaccggaagcgggattcataccccactggagtctttctggtatcatgatatggaaaatcccaagtctcatctgatcatcgctcaggtggcaaaaaatccagtgggcctcatcggcgctgaaaacgccaccggcgagacagacccctctcatagtaagtttctaaagatcctctctggcgatccttactgtgagaaagacgcccaggaggtgcactgtgacgaggccaccaagtggaacgtgaacgccccacctacatttcatagtgaaatgatgtatgacaactttaccttagtacccgtctggggaaaagagggatatctccacgtatgctccaacggattgtgttgttatctgctgtatgagcggccaactctgtcaaaagaactgtacgcattgggggtctttgacggtcttcacacagtgcacggcacatattacattcaggtatgcgctctcgtccggtgtggcgggctgggcttcgatacttgcggacaagagatcaccgaggccaccgggatcttcgagttccatctctggggcaatttctcaacatcctacatctttcccctttttctcaccagtggaatgacgttagaagtgcctgatcagctggggtgggagaatgatcattatttcctgcgtaaatcacgcttaagcagtggcctcgtgactgccgccttgtacggacgactgtatgagcgggactag

SEQ ID NO: 100088 - DNA, 1638 bp, Artificial Sequence
  derived and/or modified sequence
atggcaagaaaggagacgcaactcatcatcaaaatgaaccacttagcaagatttgttgtgtgcataatgagtggagctcgatcaaaactagccctctttctgtgcggatgttacgtggtggctctaggcgctcataccggggaggaatccgtcgcggaccatcacgaggctgaatactacgttgccgctgtgtacgaacatccttcaatcttgtcattaaatccgctggcccttatcagccgccaagaggccctggaactgatgaatcagaacctggatatatacgaacagcaggtgatgacagcagcccaaaaggatgtgcagatcatcgtcttccccgaggacggaatccacggcttcaactttacgagaacctctatttacccgtttctggatttcatgccatctcctcaagtggtcagatggaatccatgcctggagcctcaccgctttaatgacaccgaggtgcttcagcgtctgtcctgcatggccattcggggagacatgttcctcgttgctaacctggggaccaaggagccgtgtcactccagtgatcccagatgccccaaggatggcagataccagttcaacacgaacgtagtgttctccaacaatggaactctggtcgacaggtatcgcaaacataacctatatttcgaggctgccttcgacgtacccttgaaagtagatctcatcactttcgacacgccatttgccggacggttcggcatttttacttgctttgatatactctttttcgatcctgcgataagggtgctgcgggattacaaagtcaagcatgtagtctaccctaccgcctggatgaatcagctcccgctgctggcagctatagagatccagaaggctttcgccgtggccttcggcattaatgtccttgccgcaaacgtgcaccacccggtgctgggaatgacaggttccggaattcacaccccactggagagcttctggtatcatgacatggagaatcctaagtcgcatcttatcattgctcaagtggcgaaaaaccccgtgggcctgattggtgcagaaaatgccactggtgagactgacccctctcatagcaaatttctcaagatcttgtcaggagacccttactgtgagaaagatgcgcaggaggtgcattgtgacgaagccaccaaatggaatgtgaatgcacccccaacattccattctgagatgatgtacgacaattttaccctggtgccagtgtggggcaaagaaggctacctgcacgtgtgctctaatgggctttgctgctacctgctatatgaaagacccacattgtctaaagaattgtacgctcttggcgttttcgacggcctgcacacggtacatggtacttattacatccaagtgtgcgccctcgtgcgatgcggcggtctcggatttgatacttgcggccaggaaatcacggaagcgacaggtattttcgagtttcatctgtggggtaacttcagcacgagctatatttttcccctcttcttaacctccgggatgacgctagaggttccggaccaactgggatgggaaaatgaccactactttctgcgaaagagcaggttgtctagcggtctggttactgctgctttatatggacggttgtatgaaagagattag

SEQ ID NO: 100089 - DNA, 2097 bp, Artificial Sequence
  derived and/or modified sequence
attgtctccgagtcggccagctggagcgttttcggggctgtaaagggagaatggcgcatgcgcatattcagggcggaaggcgcgctaagagcagacagatttccccacgcagacgctgtgtgtcacagggggaatgggcagcgtcactttttacatccagtcatattgtatgaaattgcaacaaattcaaaaagatgccatcgtgggagtgtgaagacactattgtaatagcatggctaggaaggaaacacagctaattattaagatgaatcatttagcaagatttgtggtctgcattatgtctggagccagaagtaagcttgctcttttcctctgcggctgttacgtggttgccctgggagcccacaccggggaggagagcgtggctgaccatcacgaggctgaatattatgtggctgccgtgtatgagcatccatccatcctgagtctgaaccctctggctctcatcagccgccaagaggccttggagctcatgaaccagaaccttgacatctatgaacagcaagtgatgactgcagcccaaaaggatgtacagattatagtgtttccagaagatggcattcatggattcaactttacaagaacatccatttatccatttttggacttcatgccgtctccccaggtggtcaggtggaacccatgcctggagcctcaccgcttcaatgacacagaggtgctccagcgcctgagttgtatggccatcaggggagatatgttcttggtggccaatcttgggacaaaggagccttgtcatagcagtgacccaaggtgcccaaaagatgggagataccagttcaacacaaatgtcgtgttcagcaataatggaacccttgttgaccgctaccgtaaacacaacctctactttgaggcagcattcgatgttcctcttaaagtggatctcatcacctttgataccccctttgctggcaggtttggcatcttcacatgctttgatatattgttctttgaccctgccatcagagtcctcagagactacaaggtgaagcatgttgtgtacccaactgcctggatgaaccagctcccactcttggcagcaattgagattcagaaagcttttgctgttgcctttggcatcaacgttctggcagctaatgtccaccacccagttctggggatgacaggaagtggcatacacacccctctggagtccttttggtaccatgacatggaaaatcccaaaagtcaccttataattgcccaggtggccaaaaatccagtgggtctcattggtgcagagaatgcaacaggtgaaacggacccatcccatagtaagtttttaaaaattttgtcaggcgatccgtactgtgagaaggatgctcaggaagtccactgtgatgaggccaccaagtggaacgtgaatgctcctcccacatttcactctgagatgatgtatgacaatttcaccctggtccctgtctggggaaaggaaggctatctccacgtctgttccaatggcctctgctgttatttactttacgagaggcccaccttatccaaagagctgtatgccctgggggtctttgatgggcttcacacagtacatggcacttactacatccaagtgtgtgccctggtcaggtgtgggggtcttggcttcgacacctgtggacaggaaatcacagaggccacggggatatttgagtttcacctgtggggcaacttcagtacttcctatatctttcctttgtttctgacctcagggatgaccctagaagtccctgaccagcttggctgggagaatgaccactatttcctgaggaaaagtaggctgtcctctgggctggtgacggcggctctctatgggcgcttgtatgagagggactaggaaaagtgtgtggtctgtggggcggactctggccatcatgttgacagccttgcacttccacaggctacaagccctgggaccatctttctgccttaagggcaggagcccacttctgtggcaccagattccaccctgggaactgtggaaaaagtaggagaggcagattccctcagtgtcttcctcttaaacctcaatcatcgagacattagggggtattttctgttcac

SEQ ID NO: 100090 - DNA, 1638 bp, Artificial Sequence
  derived and/or modified sequence
atggccagaaaggagacccagctgatcatcaagatgaaccacctggccagattcgtggtgtgcatcatgagcggcgccagaagcaagctggccctgttcctgtgcggctgctacgtggtggccctgggcgcccacaccggcgaggagagcgtggccgaccaccacgaggccgagtactacgtggccgccgtgtacgagcaccccagcatcctgagcctgaaccccctggccctgatcagcagacaggaggccctggagctgatgaaccagaacctggacatctacgagcagcaggtgatgaccgccgcccagaaggacgtgcagatcatcgtgttccccgaggacggcatccacggcttcaacttcaccagaaccagcatctaccccttcctggacttcatgcccagcccccaggtggtgagatggaacccctgcctggagccccacagattcaacgacaccgaggtgctgcagagactgagctgcatggccatcagaggcgacatgttcctggtggccaacctgggcaccaaggagccctgccacagcagcgaccccagatgccccaaggacggcagataccagttcaacaccaacgtggtgttcagcaacaacggcaccctggtggacagatacagaaagcacaacctgtacttcgaggccgccttcgacgtgcccctgaaggtggacctgatcaccttcgacacccccttcgccggcagattcggcatcttcacctgcttcgacatcctgttcttcgaccccgccatcagagtgctgagagactacaaggtgaagcacgtggtgtaccccaccgcctggatgaaccagctgcccctgctggccgccatcgagatccagaaggccttcgccgtggccttcggcatcaacgtgctggccgccaacgtgcaccaccccgtgctgggcatgaccggcagcggcatccacacccccctggagagcttctggtaccacgacatggagaaccccaagagccacctgatcatcgcccaggtggccaagaaccccgtgggcctgatcggcgccgagaacgccaccggcgagaccgaccccagccacagcaagttcctgaagatcctgagcggcgacccctactgcgagaaggacgcccaggaggtgcactgcgacgaggccaccaagtggaacgtgaacgccccccccaccttccacagcgagatgatgtacgacaacttcaccctggtgcccgtgtggggcaaggagggctacctgcacgtgtgcagcaacggcctgtgctgctacctgctgtacgagagacccaccctgagcaaggagctgtacgccctgggcgtgttcgacggcctgcacaccgtgcacggcacctactacatccaggtgtgcgccctggtgagatgcggcggcctgggcttcgacacctgcggccaggagatcaccgaggccaccggcatcttcgagttccacctgtggggcaacttcagcaccagctacatcttccccctgttcctgaccagcggcatgaccctggaggtgcccgaccagctgggctgggagaacgaccactacttcctgagaaagagcagactgagcagcggcctggtgaccgccgccctgtacggcagactgtacgagagagactag

SEQ ID NO: 100091 - DNA, 1464 bp, Artificial Sequence
  derived and/or modified sequence
ccggatcggtcggaaatggcagaggtggaggagacactgaagcgactgcagagccagaagggagtgcagggaatcatcgtcgtgaacacagaaggaggctgggagcccttgggacactgtggagacaggagcaggccccctgctcagggctgcccctgatcagttgggtggcctgaggcaactcctttccccgcttcagccctcaactgcctcgagtcctgtgatggtccagggaatctcttttgggcacttcttgctctaagacctgaaagacttttgtcactaagagagaaactgtcttctgggactggacattttgactccaaggagacaaccccaggggccaacagccccagctgtgacccccaggcttccacatgaactcacaaaggagaggccctcattcttgccttaaaactgcccctaaagccaagccttttcactgggaagccctagctgcttaccttttggatactagtgagtgctgcttttttgtatactcatggggctgattgcaccatagctgagaacgtggaatgcagaatgagcccacctggctttgaatctgggccctacttaacttatcagctatgtggttttgggcataagccactttctctgttaagttttctcatttgtaaaatgtgggtcataattctgccttcctctaggggaagcttttagaatagtgcctggcatgaaatgcctatgaatgtctcagttagtgtgtgtgtgtctttaacttgcgtcccattctcagggcccccacatcagtgtctcgtttacatctcacacagtgaccctgcgaggcaagggtttgcccagtttgcagatgagaaacccaaagctgagagaggtgtggggaaccgcccaaggtcacccagctgtgaatgaacgtggtcagaacacagaatctgagttggtcacacttcccactgatccatggggcctttaagccctctggaagcttccattaaagatgattatttgaggataattgtattgggatgcctatgatcttatctagggttttcctacccatccccaacattcagctcagctgcctctttcttgaggacaccctcactgatcaccccagcccagccagagtggttgctcctgctcctgcccctgaacctatgacatacccaagtcccaatactttcgagccatctgccactgccttttgacatctctgccttggctagattcaaatggtgtttcataataaaagtctgagtttaagcagctttaccgaaaacgcaagggaagtttcattccatttatacttctccagaccccctgccatcctctgctgctacccacacaggcagaataaaaggcttaaatgtgtaagtcccatgaaggcaaagattggtctcttgtgttcactgctgtctgtagtacttaggatggtgttggcccagagttggtgtttgattaaagtatctgttgaatttttta

SEQ ID NO: 100092 - protein, 723 aa, Artificial Sequence
  derived and/or modified sequence
MGLADASGPRDTQALLSATQAMDLRRRDYHMERPLLNQEHLEELGRWGSAPRTHQWRTWLQCSRARAYALLLQHLPVLVWLPRYPVRDWLLGDLLSGLSVAIMQLPQGLAYALLAGLPPVFGLYSSFYPVFIYFLFGTSRHISVATPGPLPLLTAPGRPTGGAGPDPLRLRGHLPVRTSCPRLYHSCSCAGLRLTAQVCVWPPSEQPLWATVPHLLLEVCWKLPQSKVGTVVTAAVAGVVLVVVKLLNDKLQQQLPMPIPGELLTLIGATGISYGMGLKHRFEVDVVGNIPAGLVPPVAPNTQLFSKLVGSAFTIAVVGFAIAISLGKIFALRHGYRVDSNQELVALGLSNLIGGIFQCFPVSCSMSRSLVQESTGGNSQVAGAISSLFILLIIVKLGELFHDLPKAVLAAIIIVNLKGMLRQLSDMRSLWKANRADLLIWLVTFTATILLNLDLGLVVAVIFSLLLVVVRTQMPHYSVLGQVPDTDIYRDVAEYSEAKEVRGVKVFRSSATVYFANAEFYSDALKQRCGVDVDFLISQKKKLLKKQEQLKLKQLQKEEKLRKQAASPKGASVSINVNTSLEDMRSNNVEDCKMMQVSSGDKMEDATANGQEDSKAPDGSTLKALGLPQPDFHSLILDLGALSFVDTVCLKSLKNIFHDFREIEVEVYMAACHSPVVSQLEAGHFFDASITKKHLFASVHDAVTFALQHPRPVPDSPVSVTRL

SEQ ID NO: 100093 - DNA, 2172 bp, Artificial Sequence
  derived and/or modified sequence
atggggcttgctgacgccagcgggccgagagatacccaggctttactgtcagccacacaggcaatggaccttagacggcgggattaccatatggaaagaccactgctgaaccaggaacatctggaggaattaggtcgatggggatccgccccgcggacccatcaatggagaacctggcttcaatgttcccgtgccagagcctacgcacttcttttacagcatcttccggtgctcgtgtggctccctcgctacccagtgagggactggcttctgggggatctgctaagtggtctgtccgttgccattatgcagttgcctcagggtttagcgtacgccctcctggccggcttgccgcccgtgttcggactgtacagctcattttaccccgtgttcatatacttcctgttcggcacttcacgtcacattagcgtcgccacgccaggtccactgcctctgctcaccgcaccaggccggccaacgggaggggcgggccccgatcctctgcggctcaggggccacttgccagtgcggaccagttgtccaagactttatcactcttgcagctgcgctgggctaagactgacggcacaggtttgtgtgtggcccccaagcgagcagccactgtgggccacggtgcctcacctgctccttgaggtctgttggaagcttccccagtccaaggtcgggactgttgtgaccgccgctgtggcgggcgtggtgctcgtggtggtcaaactactaaatgataaattgcagcagcaattacctatgccaatccccggcgagctccttactttaattggcgctaccggcatcagctacggaatgggcctcaagcaccggtttgaagtggacgtagtgggcaatatccctgcaggtcttgtgccgccagtcgcccctaatacacagttgttttctaaacttgttggaagtgctttcacgatcgcagtcgtgggtttcgctattgcaatatccctcggcaagatcttcgccctccgacacggctaccgagtcgactctaaccaagagctcgtggccctggggctcagcaacctgattggaggaatctttcagtgtttccctgtcagctgtagtatgtctcgctcattagtccaggagtccactggcggcaattcgcaagtggctggagccattagctccttgtttatcctgttgataatagtaaagctgggcgaattgttccatgacctccccaaggccgtgctcgccgcgatcattatagtgaacctgaaaggcatgctacgacaactgtctgacatgcgctctctgtggaaagctaaccgggcagacctcctcatatggctggtgacctttaccgcgaccatcctacttaatttggacctggggctagtggttgcggttattttttccctcctgctggtggtggtccgaacccagatgccccactattccgttctcggccaagttcctgatacagatatctacagggatgtagccgaatactctgaagctaaagaagtgagaggggtaaaggtgttccgtagctcagccactgtttactttgcaaatgccgagttctattcagatgccttgaagcagcgatgcggagtggacgtagactttctaatcagccaaaagaaaaagctattaaaaaaacaggagcagttgaaactgaagcagctccagaaggaagagaagcttcgtaagcaggccgcaagccccaaaggagccagcgtgtccataaacgtgaacacgtcccttgaggatatgaggtctaacaatgtcgaggattgcaagatgatgcaggtcagctcaggggacaagatggaggacgcgaccgccaatgggcaggaggactctaaagcaccagatggctctactctgaaggccctggggctgccccagccagattttcacagcctgatccttgatctcggtgccctgtccttcgtggacaccgtttgcctgaaaagcttgaagaacatttttcatgacttcagggagattgaggtggaggtgtatatggccgcctgtcacagccccgtggtgtcacaattagaggccgggcatttttttgacgcgagtatcacaaaaaagcatctctttgcaagcgttcacgacgctgtcacatttgccctgcagcatcccagacctgtgcctgattcaccagtgtctgtaactaggttatag

SEQ ID NO: 100094 - DNA, 2172 bp, Artificial Sequence
  derived and/or modified sequence
atgggcctggctgatgccagcggcccccgggacacccaggccctgctgagcgccacccaggccatggacctgcggcggcgggactaccacatggagcggcccctgctgaaccaggagcacctggaggagctgggccgctggggcagcgcccccaggacccaccagtggaggacctggctgcagtgcagccgggcccgggcctatgccctgctgctgcagcacctgcctgtgctggtgtggctgccccgctaccctgtgcgggactggctgctgggggacctgctgagcggcctgtctgtggccatcatgcagctgccccagggcctggcctatgccctgctggccggcctgccccctgtgtttggcctgtacagcagcttctaccctgtgttcatctacttcctgtttggcaccagccgccacatctctgtggccaccccaggccccctgcccctgctgacagcccctggccggcccaccggcggggccggccctgaccccctgcggctgcggggccacctgcctgtgaggaccagctgcccccggctgtaccacagctgcagctgtgccggcctgcggctgacagcccaggtgtgtgtgtggccacccagcgagcagcccctgtgggccaccgtgccccacctgctgctggaggtgtgctggaagctgccccagagcaaggtgggcaccgtggtgacagctgctgtggccggcgtggtgctggtggtggtgaagctgctgaatgacaagctgcagcagcagctgcccatgcccatccctggagagctgctgaccctgattggagccaccggcatctcctatggcatgggcctgaagcacagatttgaggtggatgtggtgggcaacatcccagctggcctggtgccccctgtggcccccaacacccagctgttcagcaagctggtgggcagcgccttcaccatcgctgtggtgggctttgccatcgccatcagcctgggcaagatctttgccctgcggcacggctacagagtggacagcaaccaggagctggtggccctgggcctgagcaacctgattggaggcatcttccagtgcttccctgtgtcctgcagcatgagccgcagcctggtgcaggagagcactggaggcaacagccaggtggccggggccatcagcagcctcttcatcctgctgatcatcgtgaagctgggggagctgttccatgacctgcccaaggctgtgctggccgccatcatcatcgtgaacctgaagggcatgctgcggcagctgagtgacatgaggagcctgtggaaggccaacagagctgacctgctgatctggctggtgaccttcaccgccaccatcctgctgaacctggacctgggcctggtggtggccgtcatcttcagcctgctgctggtggtggtgaggacccagatgccccactacagcgtgctgggccaggtgcctgacacagacatctacagagatgtggccgagtacagcgaggccaaggaggtgcggggcgtgaaggtgttccgcagcagcgccaccgtgtactttgccaatgctgagttctacagtgatgccctgaagcagagatgtggggtggatgtggacttcctgatcagccagaagaagaagctgctgaagaagcaggagcagctgaagctgaagcagctgcagaaggaggagaagctgaggaagcaggccgccagccccaagggggcctctgtgtccatcaacgtgaacaccagcctggaggacatgaggagcaacaacgtggaggactgcaagatgatgcaggtgtcctctggggacaagatggaggatgccacagccaacggccaggaggacagcaaggccccagatggcagcaccctgaaggccctgggcctgccccagcctgacttccacagcctcatcctggacctgggcgccctgagctttgtggacacagtgtgcctgaagagcctgaagaacatcttccatgacttccgggagattgaggtggaggtgtacatggccgcctgccacagccctgtggtgtcccagctggaggccggccacttctttgatgccagcatcaccaagaagcacctgtttgcctctgtgcatgatgctgtgacctttgccctgcagcaccccaggcctgtgcctgacagccctgtgtctgtgacccggctgtag

SEQ ID NO: 100095 - DNA, 2172 bp, Artificial Sequence
  derived and/or modified sequence
atgggcctggccgacgccagcggcccccgggacacccaggccctgcttagcgctacccaagctatggaccttcggcgcagagactaccacatggaaaggccactgttaaatcaggaacacctggaggagctcggccgctgggggagcgcccctaggacacatcaatggagaacttggctgcagtgtagccgggctcgggcttatgctttgctattacagcacctccctgtgctagtctggctacctaggtacccagtccgggattggctcttgggcgatttgctatccgggctgtcggtcgctatcatgcaactgcctcagggcttagcctacgcactgctggccggcctacccccagtgtttggcctgtactctagcttctacccggtctttatctatttcctcttcggcacctccagacacatctccgtggcgacccccgggcctttaccactactgacggcccccggcaggccgacaggcggggcaggtcccgatccattgcgcctccggggccacctgcccgttcggacctcatgccccaggttataccactcctgtagttgcgctggtctgcggctgacagcccaggtgtgcgtgtggcctccctcagagcagccgctttgggccactgtgccacacctcctccttgaggtttgttggaaacttccacagagtaaggtgggaaccgtggtaacagccgccgtcgcaggggtcgtgctggtggtggtgaagctccttaatgacaaactgcagcaacagttaccaatgccaattcctggggagctccttacactcatcggggcaaccggaatcagttacggaatgggattgaaacaccggttcgaggtggacgttgtggggaacatcccggcagggctggtacccccggtagctcctaatacccagctcttttcaaaactcgtggggtccgccttcactattgcagtagtcggtttcgctatcgccatatcattggggaaaatttttgctctaaggcacggataccgcgtcgattccaatcaagagctggtcgccctcggtctctccaacctgattggcgggatttttcaatgctttcccgtgagctgttctatgtccaggtccctggtgcaagaatctactggcggaaacagtcaggttgccggggcaatatctagtcttttcatccttctcataattgtgaaactgggcgaattgtttcacgacttgccgaaggcagtgttggccgccatcattattgtaaatctcaagggtatgctgagacagctttctgacatgcgcagcctgtggaaggctaacagagctgacctgcttatttggctggtcacattcacggcgacaatcctattaaatctggacttaggactggtcgttgccgtaatcttctccctgctattggtcgtggtacgcactcagatgccccattatagcgtcctggggcaggtccctgacaccgacatataccgtgatgtcgcagaatactccgaggccaaagaggtgagaggagttaaagtcttccgtagctcagccaccgtgtatttcgcgaatgcagaattctatagtgacgccctcaaacagaggtgcggggtggacgtcgatttcctcatctcacaaaagaaaaaactacttaagaagcaagaacagctgaagctcaaacagctccagaaggaagagaagttgcgcaaacaagccgcctctccaaaaggcgccagcgtgtccattaacgtgaatacctcccttgaagacatgaggtccaataacgtcgaagactgcaagatgatgcaagtgtctagtggggacaaaatggaagatgccacagcgaacggccaggaggacagtaaggccccggatggctccacgctaaaagccctcgggctaccccagcccgacttccatagtctgattttggatctgggggctctctctttcgtcgatacagtatgccttaagtccctcaagaatatcttccacgacttcagagagatagaagtggaggtttatatggccgcctgtcacagtcctgtcgtgagccaactggaagccggccacttcttcgatgcgagcattaccaagaaacacctgtttgcttctgtgcatgatgctgtgacatttgcactgcagcatccacgcccggtgccagactctcccgtgagtgtgacacgtctgtag

SEQ ID NO: 100096 - DNA, 2172 bp, Artificial Sequence
  derived and/or modified sequence
atgggacttgcggatgcctccggaccgagggacacacaggcgctgctgtctgcaacccaggctatggatctgcggagaagagattaccacatggaacggccactcctgaaccaagaacacctagaggagctcggtcggtggggctcagcacccagaacccatcagtggcggacctggttgcaatgtagcagagctcgtgcttacgcgcttctccttcaacacctcccagtcctggtttggctgcctaggtaccctgttagggattggcttctcggagatttactgtccggcctgtcagtggcgatcatgcagcttccccagggccttgcatacgccctgctagcaggactccctcctgtgttcgggttgtactctagcttctacccagtgtttatctacttcctctttggcacttctaggcacataagtgtggcaacacccggtcccctaccactcttgacagctccaggccgtccgaccggcggtgccggacccgatcctctaaggctgagggggcacctgccagtaaggacatcctgtcctaggctgtatcactcctgctcctgtgccggactccggctgaccgcccaggtgtgtgtttggccacctagcgaacagccactgtgggctacagtccctcaccttcttctggaagtatgctggaaacttcctcagtcaaaagtggggaccgtcgtgacagccgcagtggctggggtagtgctcgtggtcgtgaaactgctgaatgacaagttgcaacagcagcttcccatgcctattcctggagagcttctgaccctgatcggggctaccggtatcagctacgggatgggacttaagcaccgcttcgaagtggatgttgtgggaaatatcccagccggactcgtgccaccagttgcccctaacacccagctcttctcaaaactcgttgggtcagccttcactatcgccgtcgttggtttcgcaattgccattagcctcggcaagatctttgcccttagacatgggtacagagtggattcaaaccaagagttggtcgctctgggtctgtcaaatctgatcggaggaattttccagtgcttccctgttagctgtagcatgtcacgaagtctggtccaggaaagcaccggaggcaatagccaggttgcgggtgccatttccagcctcttcatcctgttgatcattgtcaaactgggagaattgttccatgacctgcctaaagcggtcctcgccgcaattattattgtgaatcttaagggcatgctgaggcagcttagtgacatgcggagtttatggaaggccaacagagctgatcttctgatatggctcgtgacctttaccgctaccatactcctgaatcttgatctaggactggtagttgccgtaatttttagtctcctgttggtggtggtgcgcactcagatgcctcactatagtgtgttgggccaggttcccgacactgacatataccgcgacgtggctgagtactccgaagccaaagaggtaagaggcgtgaaggtcttcagatcctctgctaccgtgtacttcgccaacgctgagttctacagtgatgcactgaagcagcgctgcggggtcgacgttgattttctaatatcacagaaaaaaaagttactaaagaagcaggagcaactcaaactcaagcagcttcagaaagaggagaagctgagaaaacaggctgcatcccccaagggcgcaagtgtcagcatcaatgtcaatacatccttagaggatatgagaagtaataacgtcgaggattgcaagatgatgcaggtctcctccggggataaaatggaggacgcaacagcaaatggccaagaagattccaaagcgcctgatggatctacgctcaaggccctgggactgccgcagcccgactttcattcgttaattctggatctaggcgctctgagctttgtagacactgtgtgtctcaagtcactgaagaatatctttcatgacttcagagaaatcgaagtggaggtgtacatggccgcttgccacagccccgtggtgtcgcagttggaggcaggtcacttcttcgacgcttccatcactaagaagcatttatttgcgtccgtacacgatgccgtgacattcgcactgcagcacccccgaccagttccggattctccagtctccgtgacaaggttgtag

SEQ ID NO: 100097 - DNA, 2460 bp, Artificial Sequence
  derived and/or modified sequence
ctctagctcgagcagcaggagcagcccgcaccggacaacttgcgagccatggggctggcggatgcgtcgggaccgagggacacacaggcactgctgtctgcaacacaagcaatggacctgcggaggcgagactaccacatggaacggccgctgctgaaccaggagcatttggaggagctggggcgctggggctcagcacctaggacccaccagtggcggacctggttgcagtgctcccgtgctcgggcctatgcccttctgctccaacacctcccggttttggtctggttaccccggtatcctgtgcgtgactggctcctgggtgacctgttatccggcctgagtgtggccatcatgcagcttccgcagggcttggcctacgccctcctggctggattgccccccgtgtttggcctctatagctccttctaccctgtcttcatctacttcctgtttggcacttcccggcacatctccgtggcaaccccaggacccctgcctctcctgactgcccctggccgccccacaggtggggctgggcctgatccacttcggcttcgtggtcacctacctgtcagaacctcttgtccgaggctataccacagctgcagctgtgcaggtcttcgtctcacagctcaagtatgtgtttggcctccatctgagcagccactctgggccactgtccctcatctattgctggaggtctgctggaagctgccccagagcaaggttggcaccgtggtcactgcagctgtggctggggtggtgctcgtggtggtgaagctgttgaatgacaagctgcagcagcagctgcccatgccgatacccggggagctgctcacgctcatcggggccacaggcatctcctatggcatgggtctaaagcacagatttgaggtagatgtcgtgggcaacatccctgcagggctggtgcccccagtggcccccaacacccagctgttctcaaagctcgtgggcagcgccttcaccatcgctgtggttgggtttgccattgccatctcactggggaagatcttcgccctgaggcacggctaccgggtggacagcaaccaggagctggtggccctgggcctcagtaaccttatcggaggcatcttccagtgcttccccgtgagttgctctatgtctcggagcctggtacaggagagcaccgggggcaactcgcaggttgctggagccatctcttcccttttcatcctcctcatcattgtcaaacttggggaactcttccatgacctgcccaaggcggtcctggcagccatcatcattgtgaacctgaagggcatgctgaggcagctcagcgacatgcgctccctctggaaggccaatcgggcggatctgcttatctggctggtgaccttcacggccaccatcttgctgaacctggaccttggcttggtggttgcggtcatcttctccctgctgctcgtggtggtccggacacagatgccccactactctgtcctggggcaggtgccagacacggatatttacagagatgtggcagagtactcagaggccaaggaagtccggggggtgaaggtcttccgctcctcggccaccgtgtactttgccaatgctgagttctacagtgatgcgctgaagcagaggtgtggtgtggatgtcgacttcctcatctcccagaagaagaaactgctcaagaagcaggagcagctgaagctgaagcaactgcagaaagaggagaagcttcggaaacaggctgcctcccccaagggcgcctcagtttccattaatgtcaacaccagccttgaagacatgaggagcaacaacgttgaggactgcaagatgatgcaggtgagctcaggagataagatggaagatgcaacagccaatggtcaagaagactccaaggccccagatgggtccacactgaaggccctgggcctgcctcagccagacttccacagcctcatcctggacctgggtgccctctcctttgtggacactgtgtgcctcaagagcctgaagaatattttccatgacttccgggagattgaggtggaggtgtacatggcggcctgccacagccctgtggtcagccagcttgaggctgggcacttcttcgatgcatccatcaccaagaagcatctctttgcctctgtccatgatgctgtcacctttgccctccaacacccgaggcctgtccccgacagccctgtttcggtcaccagactctgaacatgctacatcctgcccaagactgcacctctggaggtgcagggcacccttgagaagcccctcacccctaggccgcctccaggtgctacccaggagtcccctccatgtacacacacacaactcagggaaggaggtcctgggactccaagttcagcgctccaggtctgggacagggcctgcatgcagtcaggctggcagtggcgcggtacagggagggaactggtgcatattttagcctca

SEQ ID NO: 100098 - DNA, 2172 bp, Artificial Sequence
  derived and/or modified sequence
atgggcctggccgacgccagcggccccagagacacccaggccctgctgagcgccacccaggccatggacctgagaagaagagactaccacatggagagacccctgctgaaccaggagcacctggaggagctgggcagatggggcagcgcccccagaacccaccagtggagaacctggctgcagtgcagcagagccagagcctacgccctgctgctgcagcacctgcccgtgctggtgtggctgcccagataccccgtgagagactggctgctgggcgacctgctgagcggcctgagcgtggccatcatgcagctgccccagggcctggcctacgccctgctggccggcctgccccccgtgttcggcctgtacagcagcttctaccccgtgttcatctacttcctgttcggcaccagcagacacatcagcgtggccacccccggccccctgcccctgctgaccgcccccggcagacccaccggcggcgccggccccgaccccctgagactgagaggccacctgcccgtgagaaccagctgccccagactgtaccacagctgcagctgcgccggcctgagactgaccgcccaggtgtgcgtgtggccccccagcgagcagcccctgtgggccaccgtgccccacctgctgctggaggtgtgctggaagctgccccagagcaaggtgggcaccgtggtgaccgccgccgtggccggcgtggtgctggtggtggtgaagctgctgaacgacaagctgcagcagcagctgcccatgcccatccccggcgagctgctgaccctgatcggcgccaccggcatcagctacggcatgggcctgaagcacagattcgaggtggacgtggtgggcaacatccccgccggcctggtgccccccgtggcccccaacacccagctgttcagcaagctggtgggcagcgccttcaccatcgccgtggtgggcttcgccatcgccatcagcctgggcaagatcttcgccctgagacacggctacagagtggacagcaaccaggagctggtggccctgggcctgagcaacctgatcggcggcatcttccagtgcttccccgtgagctgcagcatgagcagaagcctggtgcaggagagcaccggcggcaacagccaggtggccggcgccatcagcagcctgttcatcctgctgatcatcgtgaagctgggcgagctgttccacgacctgcccaaggccgtgctggccgccatcatcatcgtgaacctgaagggcatgctgagacagctgagcgacatgagaagcctgtggaaggccaacagagccgacctgctgatctggctggtgaccttcaccgccaccatcctgctgaacctggacctgggcctggtggtggccgtgatcttcagcctgctgctggtggtggtgagaacccagatgccccactacagcgtgctgggccaggtgcccgacaccgacatctacagagacgtggccgagtacagcgaggccaaggaggtgagaggcgtgaaggtgttcagaagcagcgccaccgtgtacttcgccaacgccgagttctacagcgacgccctgaagcagagatgcggcgtggacgtggacttcctgatcagccagaagaagaagctgctgaagaagcaggagcagctgaagctgaagcagctgcagaaggaggagaagctgagaaagcaggccgccagccccaagggcgccagcgtgagcatcaacgtgaacaccagcctggaggacatgagaagcaacaacgtggaggactgcaagatgatgcaggtgagcagcggcgacaagatggaggacgccaccgccaacggccaggaggacagcaaggcccccgacggcagcaccctgaaggccctgggcctgccccagcccgacttccacagcctgatcctggacctgggcgccctgagcttcgtggacaccgtgtgcctgaagagcctgaagaacatcttccacgacttcagagagatcgaggtggaggtgtacatggccgcctgccacagccccgtggtgagccagctggaggccggccacttcttcgacgccagcatcaccaagaagcacctgttcgccagcgtgcacgacgccgtgaccttcgccctgcagcaccccagacccgtgcccgacagccccgtgagcgtgaccagactgtag

SEQ ID NO: 100099 - protein, 651 aa, Artificial Sequence
  derived and/or modified sequence
MGLADASGPRDTQALLSATQAMDLRRRDYHMERPLLNQEHLEELGRWGSAPRTHQWRTWLQCSRARAYALLLQHLPVLVWLPRYPVRDWLLGDLLSGLSVAIMQLPQGLAYALLAGLPPVFGLYSSFYPVFIYFLFGTSRHISVVLEVCWKLPQSKVGTVVTAAVAGVVLVVVKLLNDKLQQQLPMPIPGELLTLIGATGISYGMGLKHRFEVDVVGNIPAGLVPPVAPNTQLFSKLVGSAFTIAVVGFAIAISLGKIFALRHGYRVDSNQELVALGLSNLIGGIFQCFPVSCSMSRSLVQESTGGNSQVAGAISSLFILLIIVKLGELFHDLPKAVLAAIIIVNLKGMLRQLSDMRSLWKANRADLLIWLVTFTATILLNLDLGLVVAVIFSLLLVVVRTQMPHYSVLGQVPDTDIYRDVAEYSEAKEVRGVKVFRSSATVYFANAEFYSDALKQRCGVDVDFLISQKKKLLKKQEQLKLKQLQKEEKLRKQAASPKGASVSINVNTSLEDMRSNNVEDCKMMVSSGDKMEDATANGQEDSKAPDGSTLKALGLPQPDFHSLILDLGALSFVDTVCLKSLKNIFHDFREIEVEVYMAACHSPVVSQLEAGHFFDASITKKHLFASVHDAVTFALQHPRPVPDSPVSVTRL

SEQ ID NO: 100100 - DNA, 1956 bp, Artificial Sequence
  derived and/or modified sequence
atggggttagctgatgcctcaggtccgagggacactcaggcactattgtctgctactcaggccatggatctgagacggagagactaccacatggaaaggcctctccttaatcaagaacacctggaagaattgggaaggtggggaagcgccccaaggacccatcagtggaggacatggcttcagtgtagcagggcccgggcctatgcgctgcttctgcagcacctgccagtgctcgtttggctccctagatatccagtccgcgattggctcctgggagatctgctctctggtttgtcggttgctattatgcagctgcctcagggccttgcctacgccctattggccgggctgccccccgtctttggcctctattcctccttttaccccgtcttcatttattttttgttcgggacgtctcgccacattagtgtcgtgttggaagtgtgttggaaactcccacagagcaaagtgggaaccgtggtcaccgccgcagtggcaggcgtcgtactcgttgtcgttaagttgttgaacgataagttgcagcagcagctgcctatgccgattccaggcgaactcctgacactgatcggcgctacaggcatatcttatggcatgggtctgaaacatagattcgaagtggatgttgtcggaaatataccggctggcctggtgccaccagttgcaccgaacacccagctcttctctaagttggttggtagtgctttcaccatcgccgtggtgggcttcgccatcgcgatcagcttgggaaaaatttttgctctacgccacggatacagagtagattccaatcaagagctcgtcgcactgggcctgtcaaatttgatcggtgggatcttccagtgcttcccggtaagctgttccatgagtaggtcccttgtccaggaatccactggaggcaattcccaagtagccggcgccattagctcactgtttattttactgatcattgtgaagttgggcgaactgttccacgacctgccgaaggccgttttggccgctataatcatcgtgaacctgaaagggatgttacgacagctctctgatatgcgctctctttggaaagccaatcgtgcggatctgcttatatggctggtgacctttacagctacaattctgctgaatctggacctagggctggtcgtcgccgtcattttttctcttctgctggtagtcgtgcgtacacagatgccacattattctgtgcttggccaggttcctgacactgacatttacagagacgtagccgagtactcagaagccaaagaggtccggggagtgaaagtcttcagaagtagcgcaacggtgtattttgcaaatgccgaattttattctgacgctctgaagcagcggtgcggtgtggacgtcgattttctgataagtcagaaaaagaaactgttgaaaaagcaggagcagctgaaactaaagcagctccagaaggaggagaagctgcgtaaacaggccgcttcccccaaaggcgccagtgtttcaatcaacgtgaacacctctttggaagacatgaggtctaacaatgtggaggattgcaagatgatggtgagttcaggagataaaatggaagatgcgaccgccaacgggcaggaagattctaaggcaccagatgggtcgaccctgaaggctttgggcctgcctcaaccagactttcatagcttgattcttgacttgggagccctgtcattcgtcgacacggtgtgtctgaagtcccttaagaacattttccacgacttccgtgagatcgaagtggaggtgtacatggccgcatgccactcccccgtcgtaagccagctcgaggccggtcacttcttcgatgcctctataactaagaaacacttgttcgcgagcgtgcacgacgctgttacctttgccctccaacacccgagaccagtgccagattcgccggtgtctgtcacgagactttag

SEQ ID NO: 100101 - DNA, 1956 bp, Artificial Sequence
  derived and/or modified sequence
atgggcctggctgatgccagcggcccccgggacacccaggccctgctgagcgccacccaggccatggacctgcggcggcgggactaccacatggagcggcccctgctgaaccaggagcacctggaggagctgggccgctggggcagcgcccccaggacccaccagtggaggacctggctgcagtgcagccgggcccgggcctatgccctgctgctgcagcacctgcctgtgctggtgtggctgccccgctaccctgtgcgggactggctgctgggggacctgctgagcggcctgtctgtggccatcatgcagctgccccagggcctggcctatgccctgctggccggcctgccccctgtgtttggcctgtacagcagcttctaccctgtgttcatctacttcctgtttggcaccagccgccacatctctgtggtgctggaggtgtgctggaagctgccccagagcaaggtgggcaccgtggtgacagctgctgtggccggcgtggtgctggtggtggtgaagctgctgaatgacaagctgcagcagcagctgcccatgcccatccctggagagctgctgaccctcatcggggccaccggcatctcctatggcatgggcctgaagcacagatttgaggtggatgtggtgggcaacatcccagctggcctggtgccccctgtggcccccaacacccagctgttcagcaagctggtgggcagcgccttcaccatcgctgtggtgggctttgccatcgccatcagcctgggcaagatctttgccctgcggcacggctacagagtggacagcaaccaggagctggtggccctgggcctgagcaacctgattggaggcatcttccagtgcttccctgtgtcctgcagcatgagccgcagcctggtgcaggagagcactggaggcaacagccaggtggccggggccatcagcagcctcttcatcctgctgatcatcgtgaagctgggggagctgttccatgacctgcccaaggctgtgctggccgccatcatcatcgtgaacctgaagggcatgctgcggcagctgagtgacatgaggagcctgtggaaggccaacagagctgacctgctgatctggctggtgaccttcaccgccaccatcctgctgaacctggacctgggcctggtggtggccgtcatcttcagcctgctgctggtggtggtgaggacccagatgccccactacagcgtgctgggccaggtgcctgacacagacatctacagagatgtggccgagtacagcgaggccaaggaggtgcggggcgtgaaggtgttccgcagcagcgccaccgtgtactttgccaatgctgagttctacagtgatgccctgaagcagagatgtggggtggatgtggacttcctgatcagccagaagaagaagctgctgaagaagcaggagcagctgaagctgaagcagctgcagaaggaggagaagctgaggaagcaggccgccagccccaagggggcctctgtgtccatcaacgtgaacaccagcctggaggacatgaggagcaacaacgtggaggactgcaagatgatggtgtcctctggggacaagatggaggatgccacagccaacggccaggaggacagcaaggccccagatggcagcaccctgaaggccctgggcctgccccagcctgacttccacagcctcatcctggacctgggcgccctgagctttgtggacacagtgtgcctgaagagcctgaagaacatcttccatgacttccgggagattgaggtggaggtgtacatggccgcctgccacagccctgtggtgtcccagctggaggccggccacttctttgatgccagcatcaccaagaagcacctgtttgcctctgtgcatgatgctgtgacctttgccctgcagcaccccaggcctgtgcctgacagccctgtgtctgtgacccggctgtag

SEQ ID NO: 100102 - DNA, 1956 bp, Artificial Sequence
  derived and/or modified sequence
atgggcctggccgacgccagcggcccccgggacacccaggccctgctctcggccactcaagcaatggatctgaggcggcgcgattaccacatggaacgacccctgctgaatcaagagcaccttgaggagctaggccggtgggggtccgcacccagaacacatcaatggaggacatggctacaatgttcaagagctcgggcttacgcactgctactgcaacacctccccgtgctcgtatggctgccaaggtatcccgtgagagactggctacttggggacctcctgtctggcctgtcggtggccattatgcagctcccccaaggtctggcctacgctctgctggccggcctgcccccagtcttcgggttatatagctccttttatcctgtctttatctactttctgtttgggacaagccgccatatctctgtggttctggaggtgtgctggaagctgcctcagtccaaagtcggaactgtggtcactgccgcggtggcgggtgttgtcttagtggtggttaaattgctcaacgacaagctccagcagcagctccctatgcctatccctggggaactcctgaccttaattggggctacagggatctcatacgggatggggttaaagcataggtttgaagtagacgtggtgggaaatatacctgcaggcctcgtccctcccgttgcgccgaacactcagctttttagtaagttagtcggaagcgccttcactatcgcagttgtgggctttgccatcgcgatcagccttgggaagatctttgcactcagacatggctatagggtggattctaaccaggagttagtggccctcggcctctcaaacctcattggtggtatttttcagtgcttccccgtttcctgctccatgtcccggagcctggttcaagagagcacaggcggcaactcacaggtggccggagctatatcatcactgttcatcttattgattatcgtcaagttaggagaactgtttcatgacctgcctaaggcggtgctcgcggccatcataatcgtgaatttaaagggaatgttgcggcagttgtctgatatgaggtctctttggaaagcaaacagagccgacctccttatttggctagttaccttcacagccacaatcctactgaaccttgacctgggattggttgtggcggtgattttttcactgcttcttgtggtcgtccgcacccagatgccacactactccgtgctgggccaggtgcccgataccgatatctatcgcgatgtcgcggaatatagcgaggctaaagaggtcaggggagtaaaagtgttccgatcatcagctaccgtgtatttcgccaatgccgagttctactctgatgccctgaaacagagatgtggcgtggacgtggatttcctgataagccagaagaagaaattactcaagaagcaggagcagctgaagcttaaacagcttcaaaaggaggagaagctgaggaaacaagccgcctcccccaagggggctagcgtttccatcaatgtaaataccagtctggaggatatgaggtctaataacgttgaagactgcaaaatgatggtcagctccggagataaaatggaagacgctaccgccaacggtcaagaggatagtaaagctcccgatgggagtactctgaaagccctggggcttccccaacctgactttcactccctgatcctggatctgggcgccctgagttttgttgatactgtgtgcctaaaatcattgaagaacatctttcacgattttcgcgagatcgaggtggaagtgtacatggccgcatgccatagccctgttgtgagccaactggaggctggccattttttcgacgcctccataactaaaaaacatctatttgcatccgtgcacgacgctgtgacattcgcactgcagcatcccagaccagtgcccgattctcccgtatccgtgacccgcctctag

SEQ ID NO: 100103 - DNA, 1956 bp, Artificial Sequence
  derived and/or modified sequence
atggggttggccgacgcgtccggtcctagggatacccaagcccttctctctgccactcaagccatggatctgcgacgaagagattaccacatggaacgcccactattaaatcaggaacacctggaggagctgggacggtggggcagcgcgccaagaacccaccaatggcggacctggctccagtgcagcagggctcgcgcttatgcactgctgctgcagcacttgccagtgcttgtttggcttccaagatatcccgtgagagactggttgctgggcgatctcttgagtggcctctcagtggctataatgcagcttccacaaggcctggcctacgctctcctggccggtcttcccccagttttcggattgtactctagcttttaccccgtcttcatctacttccttttcggcacaagtcggcacatttcggtcgtacttgaagtgtgttggaagctgcctcaatccaaggttgggactgtcgtgactgctgccgtggcaggagtcgtccttgtggtggtgaaactgctgaacgacaagctccaacagcaactgcccatgcccattcctggcgaattgctgacactgataggtgctactggaattagctacggtatggggttgaagcatcggtttgaggtcgacgtagtgggaaatatccctgccggattagtccctcccgtcgctcctaatacccaactgttcagtaagctggtcgggtccgcttttaccatagcagtagtaggcttcgctatagctattagcttaggcaaaatatttgccctgcgacatggttatagagtagacagcaatcaggaattggtcgcacttggattgtctaacctcattggtgggatcttccaatgctttccagtgagctgctctatgtccagatccctggttcaggaatccacaggaggcaatagccaggtagcaggggcaatctcatccttatttatattgcttataatcgtcaagcttggggagctgttccacgacttacccaaagcggtacttgccgcaattataatcgtgaatcttaaggggatgttgcgacaactgagtgatatgagaagtttgtggaaagccaatagggccgacctcctgatttggttagtgacattcaccgccaccattctgctgaacctggatctaggcctggtagttgccgtcattttcagtctgctcctggttgtcgtgcgcacccaaatgccccactactctgtcctgggacaggtcccggatacagacatctatcgggacgtagcggaatactcagaggcgaaggaggtgcgaggggtgaaggtcttcaggagctctgcaacagtctacttcgctaatgctgagttttactccgacgccctgaagcagcggtgtggcgtggacgtcgacttcctgatcagtcagaaaaagaagctgctcaaaaagcaggagcagctcaagttaaagcagcttcaaaaggaggagaagcttaggaagcaagccgctagtcctaagggggcttctgtgtctattaacgtgaacaccagcctcgaagatatgaggtctaataacgtggaggactgtaagatgatggtctcgtcaggggacaagatggaagatgccactgcaaatggccaggaagactcaaaagctcccgatggatcaacccttaaagccctgggcctgcctcagcccgacttccatagcctcattcttgacctaggtgctctcagctttgtagacaccgtgtgcctgaaatccctgaaaaatatattccacgacttcagagaaattgaagtcgaagtatacatggccgcttgccactctccagtcgttagccagctcgaggctgggcatttctttgatgctagcatcacaaagaaacacctcttcgcgagtgtgcatgacgctgtgacctttgctcttcagcatccaagaccggtccccgatagcccagtgtctgtgacacgattatag

SEQ ID NO: 100104 - DNA, 2317 bp, Artificial Sequence
  derived and/or modified sequence
gagcgcagctggcctcacccggtcccggcgccgccttccggagcgtagcggcctctagctcgagcagcaggagcagcccgcaccggacaacttgcgagccatggggctggcggatgcgtcgggaccgagggacacacaggcactgctgtctgcaacacaagcaatggacctgcggaggcgagactaccacatggaacggccgctgctgaaccaggagcatttggaggagctggggcgctggggctcagcacctaggacccaccagtggcggacctggttgcagtgctcccgtgctcgggcctatgcccttctgctccaacacctcccggttttggtctggttaccccggtatcctgtgcgtgactggctcctgggtgacctgttatccggcctgagtgtggccatcatgcagcttccgcagggcttggcctacgccctcctggctggattgccccccgtgtttggcctctatagctccttctaccctgtcttcatctacttcctgtttggcacttcccggcacatctccgtggtgctggaggtctgctggaagctgccccagagcaaggttggcaccgtggtcactgcagctgtggctggggtggtgctcgtggtggtgaagctgttgaatgacaagctgcagcagcagctgcccatgccgatacccggggagctgctcacgctcatcggggccacaggcatctcctatggcatgggtctaaagcacagatttgaggtagatgtcgtgggcaacatccctgcagggctggtgcccccagtggcccccaacacccagctgttctcaaagctcgtgggcagcgccttcaccatcgctgtggttgggtttgccattgccatctcactggggaagatcttcgccctgaggcacggctaccgggtggacagcaaccaggagctggtggccctgggcctcagtaaccttatcggaggcatcttccagtgcttccccgtgagttgctctatgtctcggagcctggtacaggagagcaccgggggcaactcgcaggttgctggagccatctcttcccttttcatcctcctcatcattgtcaaacttggggaactcttccatgacctgcccaaggcggtcctggcagccatcatcattgtgaacctgaagggcatgctgaggcagctcagcgacatgcgctccctctggaaggccaatcgggcggatctgcttatctggctggtgaccttcacggccaccatcttgctgaacctggaccttggcttggtggttgcggtcatcttctccctgctgctcgtggtggtccggacacagatgccccactactctgtcctggggcaggtgccagacacggatatttacagagatgtggcagagtactcagaggccaaggaagtccggggggtgaaggtcttccgctcctcggccaccgtgtactttgccaatgctgagttctacagtgatgcgctgaagcagaggtgtggtgtggatgtcgacttcctcatctcccagaagaagaaactgctcaagaagcaggagcagctgaagctgaagcaactgcagaaagaggagaagcttcggaaacaggctgcctcccccaagggcgcctcagtttccattaatgtcaacaccagccttgaagacatgaggagcaacaacgttgaggactgcaagatgatggtgagctcaggagataagatggaagatgcaacagccaatggtcaagaagactccaaggccccagatgggtccacactgaaggccctgggcctgcctcagccagacttccacagcctcatcctggacctgggtgccctctcctttgtggacactgtgtgcctcaagagcctgaagaatattttccatgacttccgggagattgaggtggaggtgtacatggcggcctgccacagccctgtggtcagccagcttgaggctgggcacttcttcgatgcatccatcaccaagaagcatctctttgcctctgtccatgatgctgtcacctttgccctccaacacccgaggcctgtccccgacagccctgtttcggtcaccagactctgaacatgctacatcctgcccaagactgcacctctggaggtgcagggcacccttgagaagcccctcacccctaggccgcctccaggtgctacccaggagtcccctccatgtacacacacacaactcagggaaggaggtcctgggactccaagttcagcgctccaggtctgggacagggcctgcatgcagtcaggctggcagtggcgcggtacagggagggaactggtgcatattttagcctcaggaataaagatttgtctgctc

SEQ ID NO: 100105 - DNA, 1956 bp, Artificial Sequence
  derived and/or modified sequence
atgggcctggccgacgccagcggccccagagacacccaggccctgctgagcgccacccaggccatggacctgagaagaagagactaccacatggagagacccctgctgaaccaggagcacctggaggagctgggcagatggggcagcgcccccagaacccaccagtggagaacctggctgcagtgcagcagagccagagcctacgccctgctgctgcagcacctgcccgtgctggtgtggctgcccagataccccgtgagagactggctgctgggcgacctgctgagcggcctgagcgtggccatcatgcagctgccccagggcctggcctacgccctgctggccggcctgccccccgtgttcggcctgtacagcagcttctaccccgtgttcatctacttcctgttcggcaccagcagacacatcagcgtggtgctggaggtgtgctggaagctgccccagagcaaggtgggcaccgtggtgaccgccgccgtggccggcgtggtgctggtggtggtgaagctgctgaacgacaagctgcagcagcagctgcccatgcccatccccggcgagctgctgaccctgatcggcgccaccggcatcagctacggcatgggcctgaagcacagattcgaggtggacgtggtgggcaacatccccgccggcctggtgccccccgtggcccccaacacccagctgttcagcaagctggtgggcagcgccttcaccatcgccgtggtgggcttcgccatcgccatcagcctgggcaagatcttcgccctgagacacggctacagagtggacagcaaccaggagctggtggccctgggcctgagcaacctgatcggcggcatcttccagtgcttccccgtgagctgcagcatgagcagaagcctggtgcaggagagcaccggcggcaacagccaggtggccggcgccatcagcagcctgttcatcctgctgatcatcgtgaagctgggcgagctgttccacgacctgcccaaggccgtgctggccgccatcatcatcgtgaacctgaagggcatgctgagacagctgagcgacatgagaagcctgtggaaggccaacagagccgacctgctgatctggctggtgaccttcaccgccaccatcctgctgaacctggacctgggcctggtggtggccgtgatcttcagcctgctgctggtggtggtgagaacccagatgccccactacagcgtgctgggccaggtgcccgacaccgacatctacagagacgtggccgagtacagcgaggccaaggaggtgagaggcgtgaaggtgttcagaagcagcgccaccgtgtacttcgccaacgccgagttctacagcgacgccctgaagcagagatgcggcgtggacgtggacttcctgatcagccagaagaagaagctgctgaagaagcaggagcagctgaagctgaagcagctgcagaaggaggagaagctgagaaagcaggccgccagccccaagggcgccagcgtgagcatcaacgtgaacaccagcctggaggacatgagaagcaacaacgtggaggactgcaagatgatggtgagcagcggcgacaagatggaggacgccaccgccaacggccaggaggacagcaaggcccccgacggcagcaccctgaaggccctgggcctgccccagcccgacttccacagcctgatcctggacctgggcgccctgagcttcgtggacaccgtgtgcctgaagagcctgaagaacatcttccacgacttcagagagatcgaggtggaggtgtacatggccgcctgccacagccccgtggtgagccagctggaggccggccacttcttcgacgccagcatcaccaagaagcacctgttcgccagcgtgcacgacgccgtgaccttcgccctgcagcaccccagacccgtgcccgacagccccgtgagcgtgaccagactgtag

SEQ ID NO: 100106 - protein, 570 aa, Artificial Sequence
  derived and/or modified sequence
MLVPLAKLSCLGVNMERFAEEADVVIVGAGPAGLSAAVRLKQLAVAHEKDIRVCLVEKAAQIGAHTLSGACLDPGAFKELFPDWKEKGAPLNTPVTEDRFGILTEKYRIPVPILPGLPMNNHGNYIVRLGHLVSWMGEQAEALGVEVYPGYAAAEVLFHDDGSVKGIATNDVGIQKDGAPKATFERGLELHAKVTIFAEGCHGHLAKQLYKKFDLRANCEPQTYGIGLKELWVIDEKNWKPGRVDHTVGWPLDRHTYGGSFLYHLNEGEPLVALGLVVGLDYQNPYLSPFREFQRWKHHPSIRPTLEGGKRIAYGARALNEGGFQSIPKLTFPGGLLIGCSPGFMNVPKIKGTHTAMKSGILAAESIFNQLTSENLQSKTIGLHVTEYEDNLKNSWVWKELYSVRNIRPSCHGVLGVYGGMIYTGIFYWILRGMEPWTLKHKGSDFERLKPAKDCTPIEYPKPDGQISFDLLSSVALSGTNHEHDQPAHLTLRDDSIPVNRNLSIYDGPEQRFCPAGVYEFVPVEQGDGFRLQINAQNCVHCKTCDIKDPSQNINWVVPEGGGGPAYNGM

SEQ ID NO: 100107 - DNA, 1713 bp, Artificial Sequence
  derived and/or modified sequence
atgctggtgcccctggccaagctgagttgtttgggagttaatatggaacgcttcgctgaggaagctgatgtagtgattgtcggcgccgggcccgccggtctgtccgctgcggtgcgcttgaaacagctggccgtcgcacacgaaaaggatatccgggtgtgtttagtcgagaaggccgcccagatcggcgctcatactctgtctggggcttgcctggaccctggagccttcaaagaactcttccccgactggaaagagaagggcgctccactgaacacacccgtcaccgaggatcgcttcgggatactcacagagaaataccgtatcccggtccctattctaccgggcttgcccatgaataatcacggcaattacattgtaagactgggccacttggtgtcctggatgggggaacaggcagaggcgcttggggttgaagtatacccagggtacgcagctgctgaggtcctgttccatgatgatgggtctgtgaagggaattgccactaatgatgttggtatccagaaggacggcgctccaaaagccacttttgaacgtggactggaactgcacgcgaaggtgacaatttttgctgagggctgccacggtcatctcgccaaacagctatacaaaaagttcgatctacgggctaattgtgaacctcagacatatgggatcggactgaaggagttgtgggtgatcgatgagaagaactggaaacccggccgggtcgatcacaccgtgggatggcctctcgaccgccacacctacggtggttcttttttgtatcatctgaacgagggtgaacccttggttgcactcggcctagtggtcggtttggactatcagaatccctatctgagcccttttcgagagttccagcgatggaaacaccacccatcaatccggcctactctggaggggggaaaacggatagcctacggtgctagggccctcaacgaaggaggctttcagagtatcccaaagctaacgtttccaggcggccttttaattgggtgctctcccggcttcatgaatgtgccaaagattaagggtactcatactgcgatgaaaagcggcattctggccgcagagtctatttttaaccaactgacttccgagaacctgcagagtaagacgataggcttacatgttacagagtacgaggataatctgaaaaactcttgggtatggaaagaactgtattccgttcggaacattaggccctcctgtcacggtgtgctgggcgtgtatggcgggatgatctataccggcatcttttattggatcctgaggggaatggagccatggacactgaaacacaaagggagtgacttcgagaggttgaagcctgcaaaagactgcacaccaatagagtatccgaagccggatggccaaatctcttttgacctactgtcatcggtcgctctttcaggtaccaaccacgagcatgatcagcctgctcatctcacattgcgtgatgattcaatccctgtgaaccgaaacctctccatctatgacggcccagagcagaggttctgtccagctggcgtgtatgagttcgtccctgtcgagcagggggatggctttaggttgcagatcaacgcacagaattgcgtgcactgtaaaacatgtgatattaaggatccctcacaaaacattaactgggttgttcctgaggggggtggtggcccggcatataacggcatgtag

SEQ ID NO: 100108 - DNA, 1713 bp, Artificial Sequence
  derived and/or modified sequence
atgctggtgcccctggccaagctgagctgcctgggcgtgaacatggagagatttgctgaggaggctgatgtggtgattgtgggcgccggccctgctggcctgtctgctgctgtgcggctgaagcagctggccgtggcccacgagaaggacatccgggtgtgcctggtggagaaggccgcccagatcggggcccacaccctgagcggggcctgcctggaccccggggccttcaaggagctgttcccagactggaaggagaagggggcccccctgaacacccctgtgacagaagatcgcttcggcatcctgacagagaagtaccgcatccctgtgcccatcctgcccggcctgcccatgaacaaccacggcaactacatcgtgcggctgggccacctggtgtcctggatgggagagcaggccgaggccctgggcgtggaggtgtacccaggctacgccgctgctgaggtgctcttccatgatgatggctctgtgaagggcatcgccaccaatgatgtgggcatccagaaggatggagcccccaaggccacctttgagcggggcctggagctgcacgccaaggtgaccatctttgctgagggctgccacggccacctggccaagcagctgtacaagaagtttgacctgcgggccaactgtgagccccagacctacggcatcggcctgaaggagctgtgggtgattgatgagaagaactggaagccaggccgggtggaccacacagtgggctggcccctggacagacacacctatggaggcagcttcctgtaccacctgaatgaaggagagcccctggtggccctgggcctggtggtgggcctggactaccagaacccctacctgagccccttccgggagttccagcgctggaagcaccaccccagcatccggcccaccctggagggcggcaagagaattgcctacggggcccgggccctgaatgaaggaggcttccagagcatccccaagctgaccttccctgggggcctgctgattggctgcagccctggcttcatgaatgtgcccaagatcaagggcacccacacagccatgaagagcggcatcctggccgctgagagcatcttcaaccagctgaccagcgagaacctgcagagcaagaccatcggcctgcacgtgacagaatatgaggacaacctgaagaacagctgggtgtggaaggagctgtacagcgtgaggaacatccggcccagctgccacggcgtgctgggcgtgtatggaggcatgatctacacaggcatcttctactggatcctgcggggcatggagccctggaccctgaagcacaagggcagtgactttgagcggctgaagccagccaaggactgcacccccatcgagtaccccaagccagatggccagatcagctttgacctgctgagctctgtggccctgagcggcaccaaccacgagcatgaccagcctgcccacctgaccctgagagatgacagcatccctgtgaacagaaacctgagcatctatgatggccctgagcagcgcttctgcccagctggggtgtatgaatttgtgcctgtggagcagggagatggcttccggctgcagatcaatgcccagaactgtgtgcactgcaagacctgtgacatcaaggaccccagccagaacatcaactgggtggtgcctgagggcggcggcggccctgcctacaacggcatgtag

SEQ ID NO: 100109 - DNA, 1713 bp, Artificial Sequence
  derived and/or modified sequence
atgctggtgcccctggccaagctgagctgcctgggcgtgaacatggaacggtttgcggaagaggccgatgtggttatcgtcggtgccgggcccgccggtctttctgcggcagtgcgcttgaaacagctggcagtggcgcatgagaaggacatccgggtctgcctggtggaaaaggctgcccaaattggtgcgcacaccctgtcgggtgcctgtttagatcctggcgcgtttaaagagctctttcctgactggaaagaaaagggtgctccactaaatactcctgtgaccgaggatcggtttgggatcctcacagaaaagtatcgcataccggtgcctattctgccaggattacctatgaacaaccacggcaattacattgtaaggcttggccacctggtaagttggatgggagaacaggcagaggccctcggggtcgaggtctaccccggatacgccgctgcagaggtcctcttccacgatgatggctctgtgaagggcattgccacaaatgatgtgggcatccaaaaggacggcgcgcctaaagctaccttcgaacggggacttgaactacatgccaaagtaacgatctttgcagaaggctgccatggacatcttgcgaagcaattgtacaagaaatttgacctgagggcaaattgtgagcctcagacctatggaattggcctgaaggagctatgggttattgatgaaaagaactggaagcctggccgcgtggaccatacagtgggctggcctttggacaggcacacatatggcggcagtttcctgtaccatctgaacgaaggcgagcccctggttgctttaggcttggtggtaggattagattatcagaacccgtacctgtctcctttccgcgagttccagagatggaaacatcacccctcgatacgccccacactcgagggtggcaagcgcatagcttatggagccagagccctgaacgagggaggtttccagtcgatacctaagcttacattccccggggggctgttgatcggatgctcacctggcttcatgaacgtacctaaaatcaagggcacgcacaccgccatgaaatccggaatcttggctgcggaatccatatttaaccagctcacctcagaaaacttacagagcaagaccatcggactgcatgtcaccgaatacgaggataatcttaagaatagttgggtttggaaggaactgtactccgtgaggaatatcagaccaagctgccatggagtcttaggcgtttacggcggaatgatttacacagggattttctactggattctaagaggtatggagccatggaccctcaaacacaaagggagcgatttcgagcgtctcaaacccgcaaaagactgtacacctatcgagtatccaaagcctgacggacagatcagctttgaccttcttagttctgtagctcttagtgggactaaccatgaacatgaccagccggcacacctcacactgagagacgacagcatcccagtgaatcgcaatctgtccatttatgacggaccagagcaacgcttttgccctgccggggtttacgaattcgtacccgtcgagcagggagacggattcaggctgcagattaatgcccagaactgtgttcactgcaaaacttgtgacattaaggatccttcacagaacattaattgggttgttcccgaaggcggcgggggtcccgcatataacggcatgtag

SEQ ID NO: 100110 - DNA, 1713 bp, Artificial Sequence
  derived and/or modified sequence
atgttggtgccgctggcaaagctgtcgtgtttgggcgttaacatggagcgattcgcggaggaagccgatgtggtcattgtcggcgctggtcccgcaggcttgtctgctgcggttagattaaaacaattggcagtcgcccacgaaaaagacataagggtctgtttagtggaaaaggctgctcagatcggggctcacactctttccggcgcatgcctggatcccggagctttcaaagagctgtttcctgactggaaggagaaaggcgctccgctgaacacccccgtcacagaggaccgctttggcatcctgaccgaaaaatatcgaattccagtgccaattcttcctggcctgcccatgaacaatcacgggaactatattgtcaggctcggccatctcgtgagttggatgggagagcaggccgaggctttaggggtggaagtttatccaggttacgcggctgccgaggtgctatttcacgatgacggtagcgtgaagggaatcgcgacgaacgatgttggtatccagaaggacggggctccaaaagcaaccttcgaaagaggactggaactgcacgccaaagtgaccatttttgccgaggggtgtcacggacacctggccaaacagctgtacaagaagtttgacttacgggcaaactgcgaacctcaaacctacggtattggactgaaagagctctgggtcatcgacgagaaaaactggaaaccaggtcgggtggatcatacagtagggtggcctctggatcggcacacttatggaggttccttcctctaccacctgaacgaaggtgagccacttgttgctctgggccttgtggtcggtcttgattaccagaatccttacttgtcccctttcagggagtttcagcggtggaagcaccatccttccatccgcccaaccctcgagggcggaaagcggatagcttatggagccagagctcttaatgaggggggatttcagtccatccccaagctgacttttcccggaggactcctcatcggttgtagcccgggattcatgaacgtgccaaagatcaagggcacacatacggcaatgaaatcagggattctagcagctgagagcatatttaaccagctcacttccgagaacctccagagtaaaaccattggactgcacgtcaccgagtacgaagataacttgaaaaacagctgggtctggaaggagttatatagcgtacggaatattagaccttcctgccacggtgtgctgggggtctacggcggtatgatctacaccggtattttctattggattctgagaggtatggagccgtggacactgaagcacaaggggtcggatttcgagagattaaagcccgcaaaggactgcaccccaatcgaatatcccaaaccagacggtcagatatcgttcgatctgctatcatctgtcgcccttagcgggaccaatcatgaacacgatcagccagcccaccttacactgagagacgactctattcccgtaaacagaaacctgagtatttacgatggtcctgagcagcgcttctgcccggctggcgtatacgagttcgtccctgtggaacaaggggacgggttccggcttcagatcaatgctcagaactgcgtgcattgtaagacgtgcgatatcaaagaccctagccagaacatcaactgggtcgtaccagagggaggagggggaccagcatataatggcatgtag

SEQ ID NO: 100111 - DNA, 1713 bp, Artificial Sequence
  derived and/or modified sequence
atgctggtgcccctggccaagctgagctgcctgggcgtgaacatggagagattcgccgaggaggccgacgtggtgatcgtgggcgccggccccgccggcctgagcgccgccgtgagactgaagcagctggccgtggcccacgagaaggacatcagagtgtgcctggtggagaaggccgcccagatcggcgcccacaccctgagcggcgcctgcctggaccccggcgccttcaaggagctgttccccgactggaaggagaagggcgcccccctgaacacccccgtgaccgaggacagattcggcatcctgaccgagaagtacagaatccccgtgcccatcctgcccggcctgcccatgaacaaccacggcaactacatcgtgagactgggccacctggtgagctggatgggcgagcaggccgaggccctgggcgtggaggtgtaccccggctacgccgccgccgaggtgctgttccacgacgacggcagcgtgaagggcatcgccaccaacgacgtgggcatccagaaggacggcgcccccaaggccaccttcgagagaggcctggagctgcacgccaaggtgaccatcttcgccgagggctgccacggccacctggccaagcagctgtacaagaagttcgacctgagagccaactgcgagccccagacctacggcatcggcctgaaggagctgtgggtgatcgacgagaagaactggaagcccggcagagtggaccacaccgtgggctggcccctggacagacacacctacggcggcagcttcctgtaccacctgaacgagggcgagcccctggtggccctgggcctggtggtgggcctggactaccagaacccctacctgagccccttcagagagttccagagatggaagcaccaccccagcatcagacccaccctggagggcggcaagagaatcgcctacggcgccagagccctgaacgagggcggcttccagagcatccccaagctgaccttccccggcggcctgctgatcggctgcagccccggcttcatgaacgtgcccaagatcaagggcacccacaccgccatgaagagcggcatcctggccgccgagagcatcttcaaccagctgaccagcgagaacctgcagagcaagaccatcggcctgcacgtgaccgagtacgaggacaacctgaagaacagctgggtgtggaaggagctgtacagcgtgagaaacatcagacccagctgccacggcgtgctgggcgtgtacggcggcatgatctacaccggcatcttctactggatcctgagaggcatggagccctggaccctgaagcacaagggcagcgacttcgagagactgaagcccgccaaggactgcacccccatcgagtaccccaagcccgacggccagatcagcttcgacctgctgagcagcgtggccctgagcggcaccaaccacgagcacgaccagcccgcccacctgaccctgagagacgacagcatccccgtgaacagaaacctgagcatctacgacggccccgagcagagattctgccccgccggcgtgtacgagttcgtgcccgtggagcagggcgacggcttcagactgcagatcaacgcccagaactgcgtgcactgcaagacctgcgacatcaaggaccccagccagaacatcaactgggtggtgcccgagggcggcggcggccccgcctacaacggcatgtag

SEQ ID NO: 100112 - DNA, 1903 bp, Artificial Sequence
  derived and/or modified sequence
agagttcttgctttccggcaggtgatggcgccccccgcggcctagaggtccagcgcccgccgcgagcagcggacagtcctcctgttgtgtccgaccgagagtcctggtgactttgaacatgctggtgccgctagccaagctgtcctgcctgggagtgaacatggaaaggtttgcagaagaagcagatgttgtaatagttggtgcaggccctgcagggctctctgcagctgttcgtctaaaacagttggctgtggcacatgaaaaggacatccgtgtgtgtctagtggagaaagctgcccagataggagctcatactctctcaggggcttgccttgatccaggtgcttttaaagaactcttcccagactggaaagagaagggggctccacttaacactcctgtaacagaagacagatttggaattttaacagagaaatacagaattcctgtgccaattcttccagggcttccaatgaataatcatggcaattacattgtacgcttgggacatttagtgagctggatgggcgaacaagcagaagcccttggtgttgaagtataccctggttatgcagctgctgaggtcctttttcatgatgatggtagtgtaaaaggaattgccactaacgatgtagggatacaaaaggatggtgcaccaaaggcaacatttgagagaggactggaactacatgctaaagtcacaatttttgcagaaggttgccatggacatctagccaagcaactatataagaagtttgatttgagagcaaattgtgaacctcaaacctacgggattggactgaaggagttatgggttattgatgaaaagaactggaaacctgggagagtagatcacactgttggttggcccttggacagacatacctatggaggatctttcctctatcatttgaatgaaggtgaacccctagtagctcttggtcttgtggttggtctagactatcagaatccatacctgagtccatttagagagttccaaaggtggaaacaccatcctagcattcggccaaccttggaaggtggaaaaaggattgcatacggagccagagctctcaatgaaggtggctttcagtctataccaaaactcacctttcctggtggtttactaattggttgtagtcctggttttatgaatgttcccaagatcaaaggtactcacacagcaatgaaaagtggaattttagcagcagaatctatttttaatcaactaactagtgaaaatctccaatcaaagacaataggactccatgtaactgaatatgaggacaatttgaagaactcatgggtatggaaagagctatattctgttagaaatataagaccgtcctgccacggagtactgggtgtatatggagggatgatttacactggaatcttttactggatattgagaggaatggagccgtggactctgaaacataaaggttctgactttgaacggctcaagccagccaaggattgcacacctattgagtatccaaaacccgatggacagatcagttttgacctcttgtcatctgtggctctgagtggtactaatcatgaacatgaccagccggcacacttaaccttaagggatgacagtatacctgtaaatagaaatctgtcgatatatgatgggcccgagcagcgattctgtcctgcaggagtttatgaatttgtacctgtggaacaaggtgatggatttcggttacagataaatgctcagaactgtgtacattgtaaaacatgtgatattaaagatccaagtcagaatattaactgggtggtacctgaaggtggaggaggacctgcttacaatggaatgtaaactgcagctagccagtttctttcaagtatggcaagctaacgttaaaatgtttagagattaacagatttcaga

SEQ ID NO: 100113 - protein, 1422 aa, Artificial Sequence
  derived and/or modified sequence
MATLACRVQFLDDTDPFNSTNFPEPSRPPLFTFREDLALGTQLAGVHRLLQAPHKLDDCTLQLSHNGAYLDLEATLAEQRDELEGFQDDAGRGKKHSIILRTQLSVRVHACIEKLYNSSGRDLRRALFSLKQIFQDDKDLVHEFVVAEGLTCLIKVGAEADQNYQNYILRALGQIMLYVDGMNGVINRNETIQWLYTLIGSKFRLVVKTALKLLLVFVEYSESNAPLLIQAVTAVDTKRGVKPWSNIMEILEEKDGVDTELLVYAMTLVNKTLSGLPDQDTFYDVVDCLEELGIAAVSQRHLNKKGTDLDLVEQLNIYEVALRHEDGDETTEPPPSGCRDRRRASVCSSGGGEHRGLDRRRSRRHSVQSIKSTLSAPTSPCSQSAPSFKPNQVRDLREKYSNFGNNSYHSSRPSSGSSVPTTPTSSVSPPQEARLERSSPSGLLTSSFRQHQESLAAERERRRQEREERLQRIEREERNKFRYKYLEQLAAEEHEKELRSRSVSRGRADLSLDLTSPAAPACLAPLSHSPSSSDSQEALTVSASSPGTPHHPQASAGDPEPESEAEPEAEAGAGQVADEAGQDIASAHEGAETEVEQALEQEPEERASLSEKERQNEGVNERDNCSASSVSSSSSTLEREEKEDKLSRDRTTGLWPAGVQDAGVNGQCGDILTNKRFMLDMLYAHNRKSPDDEEKGDGEAGRTQQEAEAVASLATRISTLQANSQTQDESVRRVDVGCLDNRGSVKAFAEKFNSGDLGRGSISPDAEPNDKVPETAPVQPKTESDYIWDQLMANPRELRIQDMDFTDLGEEDDIDVLDVDLGHREAPGPPPPPPPTFLGLPPPPPPPLLDSIPPPPVPGNLLVPPPPVFNAPQGLGWSQVPRGQPTFTKKKKTIRLFWNEVRPFDWPCKNNRRCREFLWSKLEPIKVDTSRLEHLFESKSKELSVSKKTAADGKRQEIIVLDSKRSNAINIGLTVLPPPRTIKIAILNFDEYALNKEGIEKILTMIPTDEEKQKIQEAQLANPEIPLGSAEQFLLTLSSISELSARLHLWAFKMDYETTEKEVAEPLLDLKEGIDQLENNKTLGFILSTLLAIGNFLNGTNAKAFELSYLEKVPEVKDTVHKQSLLHHVCTMVVENFPDSSDLYSEIGAITRSAKVDFDQLQDNLCQMERRCKASWDHLKAIAKHEMKPVLKQRMSEFLKDCAERIIILKIVHRRIINRFHSFLLFMGHPPYAIREVNINKFCRIISEFALEYRTTRERVLQQKQKRANHRERNKTRGKMITDSGKFSGSSPAPPSQPQGLSYAEDAAEHENMKAVLKTSSPSVEDATPALGVRTRSRASRGSTSSWTMGTDDSPNVTDDAADEIMDRIVKSATQVPSQRVVPRERKRSRANRKSLRRTLKSGLTPEEARALGLVGTSELQL

SEQ ID NO: 100114 - DNA, 4891 bp, Artificial Sequence
  derived and/or modified sequence
gctgcggctgcggcctcccctgcgcgcagctacccgggcgtcccggcccgcggccccgctaaccccggggcccgcgcccccgcggcagggatgcatcatggccacgctggcttgccgggtgcagttcttggacgacacggaccctttcaacagcaccaacttccccgagcccagccggccgccgctgttcacgttccgcgaggacctcgcgctcggcacccagctggcgggggtccataggctgctgcaggcgccgcacaagctggatgactgtactctgcagctctctcacaatggcgcctacctggatttggaggccaccctggcagagcagcgggatgagttggaaggcttccaggatgacgccgggcggggcaagaagcacagcatcatcctaaggacgcagctgtctgtgagggtccatgcctgcatcgaaaaactatacaactccagcggacgagatttgagaagggccctcttctccctgaagcagatatttcaggatgacaaggatttggtgcatgaatttgtagtggctgaaggtctgacatgtttgatcaaggtgggagctgaggctgatcagaactatcagaactacatcttaagggctttgggccagattatgttgtatgtggatggaatgaatggagtaataaaccgcaatgaaaccattcagtggctgtacactctcattgggtcaaagttccgcctggtggtgaagacagccctgaagctgctgctcgtctttgtagagtactcggagtccaacgcacctctcctaattcaggctgtcactgctgttgacacgaaaagaggggtcaaaccttggtcaaatatcatggaaatcctggaggaaaaagatggagttgatacggagctactggtttatgcaatgactttggtgaacaagacgttatcaggactaccagaccaagacaccttctacgacgtcgtggactgcctggaggagctgggcattgctgctgtgtcccagaggcacttgaacaagaaagggactgacctggacttagtggagcaactcaacatttatgaggtggcgctcaggcacgaggatggcgatgagaccacggagccaccccccagtgggtgccgggaccggaggagggccagcgtgtgttccagtggcggaggcgagcaccggggcctggaccgcagaaggagccgcaggcactcggtgcagagcatcaagagcaccctgtcggcccccaccagtccctgctcccagtcagctcccagcttcaagcccaaccaagtgcgagatctgcgtgaaaaatacagcaattttggcaataactcttatcactcctcaagaccctcatctggatccagtgtgcccaccacccccacatcatccgtctcacccccacaggaggccaggttggaaaggtcatcaccgagtggtcttctcacatcatccttcaggcagcaccaagagtcactggcagcagagagagagaggcggcggcaggagagagaagaaaggttgcagagaatagagcgggaagaaagaaacaaattcagatacaaatacttggaacagttggcagctgaggagcacgagaaggagctgagaagccggagtgtgagccggggcagagccgacctctccttggacctgacctcgccagcagccccagcctgcctggctcctctgagccatagcccctcatcttcagactctcaagaggctctcacggtgtctgcctcctccccaggaacccctcaccatccccaagcaagtgccggggatcctgaacccgaatcagaggcagaaccggaagcagaggcaggggcggggcaggttgctgatgaagctggccaggacatagcctctgcccacgagggtgcagagactgaagtggagcaggcactagagcaagagccggaagaaagagcctccctcagtgaaaaagagaggcagaacgagggggtgaacgagagggacaactgctctgcctccagcgtctcgtcctccagcagcacgttggagagggaggagaaggaggacaagctctccagggacaggacaactggtttgtggcccgcaggtgtccaggatgcaggtgtaaatggacagtgtggcgacatcctcaccaacaaacggttcatgcttgacatgctgtatgcccataacaggaagtctccggatgatgaggagaagggggatggggaggctgggaggacccagcaggaggcagaggcggtagccagccttgctaccaggatatccaccctgcaggccaactctcagacccaggatgagagtgtcaggagggtggatgtcggctgtttggacaatcggggcagtgtgaaagcatttgctgagaaattcaacagtggggacctggggagaggttccatctcccctgatgctgagcccaatgacaaggtcccagaaacagcgccggtgcagccgaagacagagtctgattacatctgggaccagctcatggccaatccaagagagctcagaatccaagacatggatttcactgacctgggggaggaggatgacattgatgtcctagatgtggacctgggtcacagggaggcccctgggccacctcccccacccccacccacctttctgggtttgccgcccccaccccctccgcccctgttggacagcattcctccccctcctgtccctggtaatttattggttcctcctcctccagtgttcaacgctcctcagggcttagggtggtcccaggtacccaggggtcagcccacattcactaagaaaaagaagaccatccgtttgttctggaatgaagttcggccttttgactggccatgtaaaaacaaccgacgctgcagagaattcctgtggtcaaaactggaacccattaaggtggacacttccagactggagcacctgtttgagtctaaatccaaggaactgtctgtctcaaagaaaactgctgcagatggaaaaaggcaagagatcattgttctggattccaagaggagtaacgccatcaatattggtctgacggtgctgccccctccaaggacgattaagatcgccattttgaattttgatgagtatgccttaaacaaagaaggaatcgagaaaattctaacgatgattcccaccgatgaggagaagcagaaaatccaggaagctcagctggccaaccctgaaatccccctgggcagtgcagagcagttcctcctcaccctgtcctccatcagcgagctctctgcacgacttcacctctgggcattcaaaatggattatgaaactacagaaaaggaagtagcagaaccactcctggacctgaaggaaggaatagaccagttggagaacaataaaaccttgggctttatcctgtctactctcttagccattgggaactttctaaatggaactaatgccaaagcgtttgagttaagctacctcgagaaggttccagaagtcaaagacacagtgcacaagcagtcgcttctccaccatgtgtgcaccatggtggtagaaaacttcccagacagctccgatctgtactcggagatcggggccatcaccaggtcagccaaggttgactttgatcaacttcaggataatttatgtcagatggagagaagatgcaaagcttcatgggatcacctcaaggcaattgcaaaacatgaaatgaaaccagttttaaaacaacggatgtcagagttcctgaaagactgtgcagagcgaattataattttaaagattgtccatagaaggataatcaacagattccactcctttttactctttatgggccatccaccttatgcaattcgggaagtgaacataaacaaattctgcaggattattagtgaatttgcactagagtatcgcacaaccagggaaagggttttgcagcagaaacagaaacgggccaaccacagagagagaaataagaccagagggaagatgatcaccgattctggcaagttctccggcagttctccggcgcccccaagccagccgcagggtctgagctatgcggaggacgcggctgagcacgagaacatgaaggctgtgctgaaaacctcgtccccctccgtggaggacgccacccccgcgctgggcgtccgcacacgcagccgagcaagccgaggatccactagttcctggactatgggaactgatgactcgcccaatgtcacagatgatgcagctgatgagatcatggaccgcatcgtcaagtcagccacccaagtgcccagtcagcgagtggtgccgagggagaggaaacgatcccgggccaaccggaaatctttgcgaagaaccctgaagagcggcctgaccccagaagaagccagagccctgggcttggttggcacctcggagttgcagctgtgacactcataggttactcccaggagtgtgctgagcagaaggcaagctcttgctggatgaaacccctccaggtggggttggggagacttgatattcacatccaacagtttgaaaagggagagctcaattcccagcgtcaccccatggcttgtgttgcctgctacgcattgacttggatctccaggagtcccctgcacataccttctccatcgtgtcagctgtgtttctcttgattccgtgacacccggtttattagttcaaaagtgtgacaccttttctgggcaaggaacagcccctttaaggagcaaatcacttctgtcacagttattatggtaatatgaggcaatctgattagcttcacagactgagtctccacaacaccaaaatatccagatgtaaaccccaaacttgtacacaaaagaaagcacagattgtttacctgttgtggattttagatgtaacaaatgtttatacaaatacatacatgtacaccatgtttcaaatactaaataaatagagtttaatgcc

SEQ ID NO: 100115 - DNA, 4269 bp, Artificial Sequence
  derived and/or modified sequence
atggcgactcttgcatgtcgtgttcaattcctggacgacactgatcccttcaactccacaaacttcccagagccttcccggccaccattgttcacttttcgagaggatttggccctggggactcagctggctggggtgcacagattactccaggcacctcataagttggacgactgtacccttcagttatctcacaacggagcttacctggatctcgaagcaacgttggccgagcagcgggacgagttagaaggcttccaggatgacgccggacgaggaaagaaacactccattattcttcggacccagctgagcgtgcgagtccacgcctgcattgagaagctgtataattcatcaggacgggatctgcgccgggccctgttctccctgaagcagatttttcaagatgataaagatctggtgcacgagttcgtggtcgctgaaggcctcacgtgcttgattaaagtgggggccgaagctgaccagaattaccagaactatattctgagagctttgggtcaaattatgctgtacgttgatgggatgaatggcgttattaataggaacgagactatccagtggctatatactttaatcggctctaagttccgtctggtggttaagaccgccctcaaactcctattagtcttcgtcgagtatagcgaaagcaacgctccactcctcatccaagccgtgaccgcagttgatacaaagagaggggttaagccatggtccaatattatggagatcctggaggagaaggacggagttgacacagaactgctcgtatacgccatgactctggtgaataagacactgtccggcctgccggaccaggatacattctacgatgtcgtcgattgtttagaggagctgggcattgctgcagtgagccagcggcacctaaataaaaaaggcacggacctcgacttggtggagcagttaaacatttacgaagtggctctgaggcatgaagatggagatgagactaccgagcctccaccctccgggtgccgagatcgtcggcgcgctagcgtgtgctcttctgggggaggggaacatcgcggtctcgaccgtagaaggagtcggcgtcactccgtacagtccataaagtccacccttagcgctccaacaagcccatgctcgcagtccgccccttcattcaaacccaatcaggtgcgagatttacgggagaaatactcaaattttggcaacaacagttatcattccagccggccgtccagtggctcatccgtgccaacaacacccacgagctccgtgtctccaccccaggaggcacgtctggagcggtcttcaccgtccggacttcttaccagttcttttcggcagcaccaggagagcttagccgcagagagagaaagacgccggcaggaacgagaggaacgcttacaaaggatcgagagagaggagcgcaacaaatttcgatataagtatctcgaacaactggctgccgaggagcatgagaaagagctgcgttcacggtccgtctctcggggacgtgcggacctttcactggatttgacttccccagccgctcctgcctgcctagctccactctcacactcccctagcagtagcgactcacaggaagcccttacagtttcagcatcctctccgggcaccccccaccatccccaagcaagcgcgggggatcccgagccggaatccgaggccgagccagaggcagaggccggagcaggccaagttgctgatgaagctggacaggatattgcgtccgcacacgaaggcgctgagacagaggtggaacaggccctggagcaggaaccagaagaacgcgccagcctgtcagagaaggagcggcagaatgaaggggtcaatgagcgtgataactgcagcgcctcttcagtgtcttcatcaagtagtacgttagaaagggaagaaaaggaagacaagttatcacgcgatcggaccaccggcctgtggcccgccggggtgcaggacgccggcgttaacggccaatgcggagatatcctgaccaacaagcgctttatgctggatatgctgtacgcccataaccgtaaatctcctgacgacgaagagaagggtgacggggaggccggtcgaactcagcaggaggcggaagctgtggcatcactcgctacgcgaatttccactttgcaggcgaactctcagactcaggacgaatccgtccggcgagtcgacgtgggttgcctggacaaccgcggctcagtcaaggcgttcgcggagaaatttaattcaggggacttaggaaggggatctataagtccggacgctgagcccaacgacaaggttcctgagacagccccggttcagcctaaaacagagtccgattatatttgggatcagttgatggccaaccctagggaattgcgaattcaggatatggactttactgatctgggcgaggaagacgacatcgacgtattggacgtcgacctgggtcatagagaagcccctgggccacctccccctccccctccaacatttttggggctcccaccacctcctcctccacctcttctcgacagcatccccccacctcccgtcccagggaatcttctagtgccaccacccccggtctttaacgctcctcagggtctggggtggtctcaggtgccccgagggcagcccacatttaccaagaaaaaaaagaccatacgtctcttctggaacgaggtcagaccatttgactggccgtgcaagaataatcgtcgctgtcgcgagttcctgtggagcaagctggagccaatcaaggtggatacttcgagactggaacatctgtttgaatccaagtcaaaggagctttcagtgtcaaagaagaccgccgcggacgggaagagacaggagatcattgtgctggactccaagcgatccaatgcaataaacataggtctcacagtgctgccgcccccgaggaccattaaaattgccatactgaatttcgatgagtacgccctaaacaaggagggcatcgagaagattctgacaatgataccaacagatgaagaaaaacagaaaattcaggaggcacaactggccaacccagagatccctttggggtccgctgaacagtttcttctgacactgtcctcaataagcgagctgtccgctcggctgcatctttgggccttcaagatggattacgagacaaccgaaaaggaagtggccgagcccttgctggatcttaaagagggtatcgaccaattagaaaacaacaagactctgggcttcatcctatcaacactactcgccattggaaatttccttaatggcactaacgctaaagctttcgaacttagttacctcgagaaagtccccgaggttaaagacacagtgcataagcagagcttgctccatcatgtctgcactatggtcgtggagaatttcccagacagctcagatctttatagtgagatcggcgccattactcggagcgcgaaggttgattttgaccagctccaggacaatctctgtcagatggagcgccggtgcaaagcctcatgggatcacctgaaagctattgccaaacacgaaatgaagcctgtgctgaagcagagaatgagcgagttcctgaaagattgcgctgaacgcataatcatccttaagatcgtgcaccgccgcataataaatcgatttcatagttttctcttgtttatgggtcatcccccttacgccattagggaagttaatattaataagttctgtcgaatcatcagtgagttcgccttggaatatcggaccacaagggagagggtgctccagcaaaaacagaagcgggctaatcacagggagcgaaataaaaccagaggtaagatgataacagatagtgggaagttttccggcagctccccggcccctccatcacaacctcagggactgtcctatgccgaggacgccgccgaacacgaaaatatgaaagcagtcctcaaaaccagttctccatcagtggaagacgctactccagcgctgggagttagaactcgttcgagagcgtcccgagggagcactagttcctggacgatgggcacggacgatagccccaacgttaccgatgacgccgctgatgaaattatggatagaattgttaagtctgccacacaggtcccgtcgcagagggtggttccccgggagcgcaagcgttcaagagccaacaggaaatccctcagacggaccctcaaaagcggcctcacccctgaagaagctcgcgcccttggtctggtgggcacctctgagttacaactctag

SEQ ID NO: 100116 - DNA, 4269 bp, Artificial Sequence
  derived and/or modified sequence
atggccaccctggcctgccgggtgcagttcctggatgacacagaccccttcaacagcaccaacttccctgagcccagccggcccccactcttcaccttccgggaggacctggccctgggcacccagctggccggcgtgcaccggctgctgcaggccccccacaagctggatgactgcaccctgcagctgagccacaacggggcctacctggacctggaggccaccctggccgagcagagagatgagctggagggcttccaggatgatgctggccggggcaagaagcacagcatcatcctgcggacccagctgtctgtgcgggtgcacgcctgcatcgagaagctgtacaacagcagcggccgggacctgcggcgggccctcttcagcctgaagcagatcttccaggatgacaaggacctggtgcatgaatttgtggtggccgagggcctgacctgcctgatcaaggtgggcgctgaggccgaccagaactaccagaactacatcctgcgggccctgggccagatcatgctgtatgtggatggcatgaatggagtcatcaacagaaatgagaccatccagtggctgtacaccctgattggcagcaagttccggctggtggtgaagacagccctgaagctgctgctggtgtttgtggagtacagcgagagcaatgcccccctgctgatccaggccgtgacagctgtggacaccaagaggggcgtgaagccctggagcaacatcatggagatcctggaggagaaggatggagtggacacagagctgctggtgtatgccatgaccctggtgaacaagaccctgagcggcctgcctgaccaggacaccttctatgatgtggtggactgcctggaggagctgggcattgctgctgtgtcccagaggcacctgaacaagaagggcacagacctggacctggtggagcagctgaacatctatgaggtggccctgcggcatgaagatggagatgagaccacagagcccccacccagcggctgccgggacagaagaagagcctctgtgtgcagcagcggcggcggggagcaccggggcctggacagaagaagaagcagaagacacagcgtgcagagcatcaagagcaccctgagcgcccccaccagcccctgcagccagagcgcccccagcttcaagcccaaccaggtgcgggacctgcgggagaagtacagcaactttggaaacaacagctaccacagcagccggcccagcagcggcagctctgtgcccaccacccccaccagctctgtgtccccaccccaggaggcccggctggagaggagcagccccagcggcctgctgaccagcagcttccggcagcaccaggagagcctggccgctgagcgggagcggcggcggcaggagcgggaggagcggctgcagagaattgagcgggaggagaggaacaagttccgctacaagtacctggagcagctggccgctgaggagcacgagaaggagctgcggagccgctctgtgtcccggggccgggctgacctgagcctggacctgaccagccctgctgccccagcctgcctggcccccctgagccacagccccagcagcagtgacagccaggaggccctgactgtgtctgccagcagccctggcaccccccaccacccccaggccagcgctggggaccctgagcctgagagcgaggccgagcctgaggccgaggccggggccggccaggtggctgatgaggccggccaggacatcgccagcgcccacgagggcgctgagacagaggtggagcaggccctggagcaggagcctgaggagcgggccagcctgtctgagaaggagcggcagaatgaaggagtgaatgaaagagacaactgcagcgccagctctgtgagcagcagcagcagcaccctggagcgggaggagaaggaggacaagctgagccgggacaggaccaccggcctgtggccagctggggtgcaggatgctggggtgaatggccagtgtggggacatcctgaccaacaagcgcttcatgctggacatgctgtatgcccacaacaggaagagcccagatgatgaggagaagggagatggagaggccggccgcacccagcaggaggccgaggccgtggccagcctggccacccgcatcagcaccctgcaggccaacagccagacccaggatgagagcgtgcggcgggtggatgtgggctgcctggacaacagaggctctgtgaaggcctttgctgagaagttcaacagcggggacctgggccggggcagcatcagcccagatgctgagcccaatgacaaggtgcctgagacagcccctgtgcagcccaagacagaaagtgactacatctgggaccagctgatggccaacccccgggagctgcgcatccaggacatggacttcacagacctgggggaggaggatgacattgatgtgctggatgtggacctgggccaccgggaggcccctggccccccacctcctcctccacccaccttcctgggcctgcccccacctcctcctccacccctgctggacagcatccccccacctcctgtgcccggcaacctgctggtgcccccacctcctgtgttcaatgccccccagggcctgggctggagccaggtgccccggggccagcccaccttcaccaagaagaagaagaccatccgcctcttctggaatgaggtgcggccctttgactggccctgcaagaacaacagacgctgccgggagttcctgtggagcaagctggagcccatcaaggtggacaccagccggctggagcacctgtttgagagcaagagcaaggagctgtctgtgtccaagaagacagctgctgatggcaagaggcaggagatcatcgtgctggacagcaagaggagcaatgccatcaacatcggcctgactgtgctgcccccacccaggaccatcaagatcgccatcctgaactttgatgaatatgccctgaacaaggagggcatcgagaagatcctgaccatgatccccacagatgaggagaagcagaagatccaggaggcccagctggccaaccctgagatccccctgggcagcgctgagcagttcctgctgaccctgagcagcatcagcgagctgagcgcccggctgcacctgtgggccttcaagatggactatgagaccacagagaaggaggtggccgagcccctgctggacctgaaggagggcatcgaccagctggagaacaacaagaccctgggcttcatcctgagcaccctgctggccatcggcaacttcctgaatggcaccaatgccaaggcctttgagctgagctacctggagaaggtgcctgaggtgaaggacacagtgcacaagcagagcctgctgcaccacgtgtgcaccatggtggtggagaacttcccagacagcagtgacctgtacagcgagattggagccatcaccaggtctgccaaggtggactttgaccagctgcaggacaacctgtgccagatggagcggcgctgcaaggcctcctgggaccacctgaaggccatcgccaagcatgagatgaagcctgtgctgaagcagaggatgtctgagttcctgaaggactgtgccgagcgcatcatcatcctgaagatcgtgcaccggcgcatcatcaaccgcttccacagcttcctgctcttcatgggccaccccccctatgccatccgggaggtgaacatcaacaagttctgccgcatcatcagcgagtttgccctggagtaccgcaccacccgggagcgggtgctgcagcagaagcagaagagggccaaccaccgggagaggaacaagacccggggcaagatgatcacagacagcggcaagttcagcggcagcagccctgccccacccagccagccccagggcctgtcctatgcagaagatgctgctgagcacgagaacatgaaggctgtgctgaagaccagcagccccagcgtggaggatgccaccccagccctgggcgtgaggaccaggagccgggccagccggggcagcaccagctcctggaccatgggcacagatgacagccccaacgtgacagatgatgctgctgatgagatcatggacagaattgtgaagagcgccacccaggtgcccagccagagggtggtgccccgggagaggaagaggagccgggccaacaggaagagcctgcggaggaccctgaagagcggcctgaccccagaggaggcccgggccctgggcctggtgggcaccagcgagctgcagctgtag

SEQ ID NO: 100117 - DNA, 4269 bp, Artificial Sequence
  derived and/or modified sequence
atggccaccctggcctgccgggtgcagttcctggacgacaccgacccattcaattctaccaattttccagaaccgagccgaccacctctgtttacctttcgagaggatcttgctcttgggacccagctggccggggtccacagacttttgcaggcaccgcacaaacttgatgactgtactctgcagctgtctcataacggcgcttacctagacttggaagctaccctggccgagcagagggatgaactggaaggattccaggacgacgctggccgcgggaagaaacattctatcatcctgaggacccaactgtcagtgagagtccacgcctgcatcgagaagctctacaacagctcaggcagggacctgcgccgtgccctcttttcacttaagcagatttttcaagatgataaggatctggtgcatgagttcgtggttgcagagggactaacttgtcttataaaggtcggagccgaagcagatcagaactaccagaactatatcctccgtgctcttgggcagatcatgctgtacgttgatgggatgaacggtgttattaatcgaaatgagacgatccaatggctatatactctgataggcagtaagtttcgactagtagtcaaaaccgctctgaagctcttgctggtctttgtggagtatagcgagagcaacgccccccttcttatccaggcagtaaccgcagttgatacaaaacggggtgtgaaaccatggagcaatatcatggaaattctggaggaaaaggatggagtggataccgaactactcgtgtacgctatgacgctggtgaataagactctgtcaggactgcctgaccaggatacattctacgacgtcgttgattgccttgaagagttgggcattgccgccgtaagccaacggcatctgaacaaaaaggggactgatctggacctggtagagcagctgaacatctacgaggtggcgctgaggcatgaggacggcgacgagaccacagagccccctccttcaggctgccgagacagaaggcgagccagtgtctgcagtagtggaggaggagagcatagagggctggatagacgcagaagccggcgccatagtgtgcagtcaatcaagtctacactaagtgccccaacctccccatgctctcagagcgcccctagctttaaacctaaccaggtgcgggatctacgcgaaaagtacagcaactttgggaataattcttaccactccagccgcccaagctctgggtcaagcgttcccaccactcctacatctagtgtgagcccccctcaagaagcccgcttggagcgcagctccccttcgggcttgctcactagttcattccggcagcatcaggaaagtctggctgctgagcgcgaacgtaggcgtcaggagcgggaggaacggcttcaacgcatcgagcgtgaagagagaaataagttccggtacaagtacctggaacagctggcagctgaggaacatgagaaagagcttagatcccgaagtgtgtcaaggggcagagcagacctgtccttggacctaaccagccccgccgctccagcttgtttagctcccctgagccactctccttctagttccgactctcaggaggccctcactgtgtccgcgtcttcacccggaacaccccaccatcctcaggccagcgcgggtgatcccgaacctgaatcagaggctgagccagaggcagaggcgggcgccggccaagtcgctgacgaggcaggtcaggatatcgcatccgctcatgaaggtgctgagacggaagtggagcaagcattagaacaggaacccgaggaacgagcaagtctaagcgagaaagaaaggcagaatgaaggggtgaacgagagggacaactgctccgcctccagcgtctccagctcctctagcacgttagaacgcgaagagaaggaggataaactgtctagagatcgaacaacgggcctgtggcccgctggagtgcaggacgccggcgtgaacggtcagtgtggagacatcctgaccaataaaagatttatgctggatatgctctacgcgcacaatcgaaaaagtccagacgacgaggaaaagggtgatggcgaagctggcaggacacaacaagaggctgaggctgttgctagtttagctacgcgtattagtaccctgcaggcgaatagccaaacccaggatgagtctgttagaagggtcgacgttggctgcctagacaaccgtggctcggtaaaagctttcgcggagaaattcaacagcggagatctgggccggggtagcatttctcccgatgcagaaccaaacgataaagtgcccgaaacagcacccgtgcagcccaagaccgagtccgactacatttgggatcaactgatggcaaaccctcgggagttgcgcattcaagatatggactttacagatctcggcgaggaagacgacatcgacgtgctggacgttgatctaggacatcgtgaagcaccgggtcctccccctccccctccccccaccttcctaggcctgccaccacctcctccccctccacttcttgattctatcccgccaccccctgtcccaggcaatttgctcgtcccccccccccccgtgttcaatgccccccagggactgggctggtctcaagtgccacggggccagccaaccttcaccaaaaagaagaagactataagactgttctggaacgaagtgcgaccattcgattggccctgtaagaataacaggcgctgccgggaatttttatggagcaaactagagccaattaaagtcgataccagccgactggagcacctgttcgaaagcaagtcaaaagagctgtccgtgtccaagaaaacagctgctgacggtaaaagacaggaaattatcgttcttgattcaaagcgcagcaacgcgatcaacatcggactgaccgtcctacccccacctcgcacaattaaaatcgccatccttaatttcgacgaatacgcactcaataaagaaggcatcgagaagatcctcaccatgattcccactgacgaagaaaagcaaaagattcaggaggcccagctagcgaatcccgagatacccttaggatcagcggagcagttcctcctgaccctcagcagcatttccgagttgtccgcacggttacatctctgggccttcaagatggattatgaaacaactgagaaggaggtggctgagccattgctcgatctcaaggaggggatcgaccagctggaaaataacaagacactgggcttcatacttagtacgctcctggccatcggcaactttctaaatgggactaatgccaaagcttttgagctgtcataccttgaaaaagtgccagaagtgaaggatacagtgcataagcagtctctcttgcatcacgtttgtaccatggtagtggaaaattttccagactcaagcgacctttactccgaaatcggcgccattacccggtctgccaaggttgattttgatcaactccaggataacctgtgccagatggagcgcagatgcaaagcatcctgggatcaccttaaagctatcgcaaagcatgaaatgaaacctgtgttgaaacagagaatgagtgagttcctgaaggactgcgccgaacggattattattttaaagattgttcaccgtaggattattaatagatttcactcctttctgttgttcatgggacaccccccttatgcgatcagggaggtgaacattaacaaattttgtagaatcattagcgagttcgccctggaatatagaacaactagagaacgtgtgctccagcagaagcagaagcgtgctaaccatagagagaggaataaaacgaggggcaaaatgattacagactccggaaagttctctggcagttccccagcgccaccaagccagccacagggcctctcttacgctgaagacgccgcagaacacgagaatatgaaggctgttctaaaaacatcctccccatccgtggaggacgcaacccctgccctcggagtacgcacgaggagccgggcgagcagaggaagtaccagctcatggacgatggggaccgacgactcacccaatgtgactgatgacgccgcagacgagattatggatagaatcgtgaagtctgctactcaagttccctctcaacgggtggttccaagagagcgaaaacgcagtcgggctaaccgcaagagtctacgaagaacactcaaatctggtctaacgcccgaggaagcccgcgccttgggactggtgggtacaagcgagttgcagctttag

SEQ ID NO: 100118 - DNA, 4269 bp, Artificial Sequence
  derived and/or modified sequence
atggccactctggcttgtcgggtacagtttcttgacgacacagatccgttcaatagtactaactttcccgagccaagcagaccacccctttttacattcagggaagatctggcattaggaactcagctcgcaggcgtccaccgtctgcttcaggcgccacacaagctagatgactgtactctccagctttctcacaatggcgcatatttggatttggaggcaaccctggccgagcaacgagatgaactggaagggtttcaagatgacgccggaaggggcaaaaagcattcgataatactgagaactcagctctcagtgagggtccacgcttgcattgaaaagctatacaattccagtggaagagacctgagacgcgcactcttcagccttaaacagatatttcaggatgacaaggacctggtgcacgagtttgtcgtggcagagggcctcacctgcttaataaaagtgggagcagaagccgatcaaaactatcagaattacatcctgcgggctctggggcagattatgctatacgtggacgggatgaatggagtgatcaatagaaacgagacaattcaatggctttataccttaattggtagtaaattccgcctggtcgtcaagactgctctcaagttactgcttgtgttcgtggagtatagcgaatccaacgccccacttctgatccaggcagttaccgcagtggacacaaaacgaggagtgaaaccctggagcaacatcatggagatccttgaagaaaaagacggagtggatacagagctcctcgtttacgctatgaccctcgtgaacaagaccctgtctgggctcccagaccaggatacattttatgacgtggtcgattgcctcgaggagctgggaatagccgcagtcagccaacggcatctcaacaagaaggggaccgacctggatctcgttgagcaactgaacatctatgaagtcgccctgcgtcatgaggacggggatgaaaccacagagccaccccctagcggatgtcgcgaccggagaagggccagtgtttgttcatcggggggtggtgagcatcgtggcctggatagacgcaggtctcgccgacattccgtgcagtcgattaaatcaactttaagtgctccgacatctccctgcagccagagcgcgccttccttcaaaccgaatcaggttagagacctgagagaaaaatacagtaattttggaaataattcctatcacagctctagaccctccagcgggagctcagtgccaactacacctacctccagcgtctccccaccccaggaagctcggcttgagcgcagttcaccttccggcctcctcacctcttcatttcgccagcaccaggagagcctagccgctgagcgagagagacggagacaggagcgggaggaaaggctgcagcgaatcgagagagaagagcgaaataaatttcgatacaagtacctggagcaacttgctgctgaggagcatgaaaaggaactcaggtccagatctgtgagcaggggaagagcagatctgtctctggacttgacctctccagccgctccagcgtgtttggccccactctcacacagcccttcctctagcgatagccaggaagcgctgactgtttctgccagctccccaggaacacctcaccacccccaggcttccgcaggagatcccgagcctgaatccgaagcggaaccagaggccgaggcaggtgccggacaggtggccgacgaggccggacaggatattgcctccgcacatgagggcgcagagactgaggtggagcaggccctggagcaggagcctgaggagagggctagtttgtcggagaaagaaaggcagaatgaaggcgtaaatgagcgcgataactgtagcgcatcctccgtgagctcttcttcttccaccctggaaagggaggaaaaagaggacaagctcagccgagatagaacgaccgggttatggccggctggtgtgcaggatgcaggggtcaacggacaatgcggcgacattttaaccaacaaaagattcatgctggacatgttatatgctcacaaccggaaatctcctgatgatgaagaaaagggcgacggggaagctggcaggactcagcaggaagccgaggccgtggctagtctggcaacccgcattagcaccctgcaagcgaactcccagacccaggacgaatcagtgcgtagggtcgacgtgggctgtctggataacagaggctccgtaaaggcatttgctgaaaagtttaattcaggagacctggggaggggttctatatcacctgacgcagaacctaacgacaaagttccagagaccgccccagttcagcccaagaccgaaagcgactatatctgggaccaactgatggccaaccctcgggagctacgtatccaagacatggacttcactgatcttggcgaggaagacgatatagacgtgcttgacgtagacctcggccacagagaagcgcctggtccgccacccccacccccacctaccttcttgggtctaccacccccaccacctccacccctcctggattcaatcccccctccaccagtgcctggcaaccttttagttcctccacccccagtgttcaatgcccctcagggacttggttggtcacaggttcctagggggcagcctacgttcaccaaaaaaaagaagacaatacggttgttctggaacgaagttagaccattcgattggccttgcaagaacaaccggcgttgtcgtgagtttctttggagcaagctggagcctatcaaggtggacacctctaggttagaacatctgtttgaaagtaaatcaaaagaactgagcgtgtctaagaagacggcagcagacggaaaaagacaggaaatcattgttctggacagtaaaagatcgaacgcaatcaacatcggactgacagtcctgcccccacctcgcacaatcaagatcgccattctaaatttcgacgaatacgccctgaataaagaggggatcgagaagatactcacaatgatccccaccgatgaagagaaacagaaaatacaagaggctcagctggccaatcccgaaattcctcttggtagtgcagaacagtttctgcttacattgtcgagcatcagcgaactctccgctcgcctgcatttgtgggcttttaaaatggattatgagaccacagaaaaggaggtggccgagcccctcctcgatcttaaggaaggcatagaccaacttgaaaacaataagacactgggcttcatactgtccacacttctggcaatcggaaacttcttaaacggaacaaacgccaaagccttcgaactttcttatctagaaaaagtccccgaggtcaaggatacggtacacaagcagagccttctccatcacgtctgcacaatggtagtagagaatttcccagattcatctgatctctacagcgaaattggcgctattacacggtctgccaaggtggactttgatcagttgcaggacaacctctgccagatggaacggagatgtaaggcctcctgggatcatctaaaggcaatagcgaaacacgaaatgaaacctgtccttaaacagcgcatgtccgaatttctcaaagattgcgctgaacgaatcatcatcctgaagatcgtgcatcggaggattatcaatagattccactcatttttactgtttatgggccacccgccatacgcaatacgggaggtcaacattaataaattctgtcggatcattagcgaattcgcactagagtataggacaacccgagagagagtgcttcagcaaaagcagaagcgggctaatcaccgcgagcggaataagacccgaggaaaaatgattacagatagtgggaagtttagcgggtcatcccctgctcctcctagccagcctcaagggctgtcctacgctgaggacgcagccgaacacgaaaacatgaaggcagtgctcaagacgagctctccctcagttgaagacgcgacacctgccttaggggtgcggactagatccagggcctctcgtggatccacttctagctggactatggggacagatgactctccaaatgtcactgacgatgccgcagatgagataatggatcgtatcgtcaaatcagcaacgcaggttccgtcgcagagggtcgtgcctcgtgaacgaaagcgatcccgggcaaacaggaaatccctgcggcgaaccctgaagagcggcttgacgccagaagaagcacgcgcactggggcttgtcggaaccagcgagctgcagctctag

SEQ ID NO: 100119 - DNA, 4269 bp, Artificial Sequence
  derived and/or modified sequence
atggccaccctggcctgcagagtgcagttcctggacgacaccgaccccttcaacagcaccaacttccccgagcccagcagaccccccctgttcaccttcagagaggacctggccctgggcacccagctggccggcgtgcacagactgctgcaggccccccacaagctggacgactgcaccctgcagctgagccacaacggcgcctacctggacctggaggccaccctggccgagcagagagacgagctggagggcttccaggacgacgccggcagaggcaagaagcacagcatcatcctgagaacccagctgagcgtgagagtgcacgcctgcatcgagaagctgtacaacagcagcggcagagacctgagaagagccctgttcagcctgaagcagatcttccaggacgacaaggacctggtgcacgagttcgtggtggccgagggcctgacctgcctgatcaaggtgggcgccgaggccgaccagaactaccagaactacatcctgagagccctgggccagatcatgctgtacgtggacggcatgaacggcgtgatcaacagaaacgagaccatccagtggctgtacaccctgatcggcagcaagttcagactggtggtgaagaccgccctgaagctgctgctggtgttcgtggagtacagcgagagcaacgcccccctgctgatccaggccgtgaccgccgtggacaccaagagaggcgtgaagccctggagcaacatcatggagatcctggaggagaaggacggcgtggacaccgagctgctggtgtacgccatgaccctggtgaacaagaccctgagcggcctgcccgaccaggacaccttctacgacgtggtggactgcctggaggagctgggcatcgccgccgtgagccagagacacctgaacaagaagggcaccgacctggacctggtggagcagctgaacatctacgaggtggccctgagacacgaggacggcgacgagaccaccgagcccccccccagcggctgcagagacagaagaagagccagcgtgtgcagcagcggcggcggcgagcacagaggcctggacagaagaagaagcagaagacacagcgtgcagagcatcaagagcaccctgagcgcccccaccagcccctgcagccagagcgcccccagcttcaagcccaaccaggtgagagacctgagagagaagtacagcaacttcggcaacaacagctaccacagcagcagacccagcagcggcagcagcgtgcccaccacccccaccagcagcgtgagccccccccaggaggccagactggagagaagcagccccagcggcctgctgaccagcagcttcagacagcaccaggagagcctggccgccgagagagagagaagaagacaggagagagaggagagactgcagagaatcgagagagaggagagaaacaagttcagatacaagtacctggagcagctggccgccgaggagcacgagaaggagctgagaagcagaagcgtgagcagaggcagagccgacctgagcctggacctgaccagccccgccgcccccgcctgcctggcccccctgagccacagccccagcagcagcgacagccaggaggccctgaccgtgagcgccagcagccccggcaccccccaccacccccaggccagcgccggcgaccccgagcccgagagcgaggccgagcccgaggccgaggccggcgccggccaggtggccgacgaggccggccaggacatcgccagcgcccacgagggcgccgagaccgaggtggagcaggccctggagcaggagcccgaggagagagccagcctgagcgagaaggagagacagaacgagggcgtgaacgagagagacaactgcagcgccagcagcgtgagcagcagcagcagcaccctggagagagaggagaaggaggacaagctgagcagagacagaaccaccggcctgtggcccgccggcgtgcaggacgccggcgtgaacggccagtgcggcgacatcctgaccaacaagagattcatgctggacatgctgtacgcccacaacagaaagagccccgacgacgaggagaagggcgacggcgaggccggcagaacccagcaggaggccgaggccgtggccagcctggccaccagaatcagcaccctgcaggccaacagccagacccaggacgagagcgtgagaagagtggacgtgggctgcctggacaacagaggcagcgtgaaggccttcgccgagaagttcaacagcggcgacctgggcagaggcagcatcagccccgacgccgagcccaacgacaaggtgcccgagaccgcccccgtgcagcccaagaccgagagcgactacatctgggaccagctgatggccaaccccagagagctgagaatccaggacatggacttcaccgacctgggcgaggaggacgacatcgacgtgctggacgtggacctgggccacagagaggcccccggccccccccccccccccccccccaccttcctgggcctgcccccccccccccccccccccctgctggacagcatcccccccccccccgtgcccggcaacctgctggtgccccccccccccgtgttcaacgccccccagggcctgggctggagccaggtgcccagaggccagcccaccttcaccaagaagaagaagaccatcagactgttctggaacgaggtgagacccttcgactggccctgcaagaacaacagaagatgcagagagttcctgtggagcaagctggagcccatcaaggtggacaccagcagactggagcacctgttcgagagcaagagcaaggagctgagcgtgagcaagaagaccgccgccgacggcaagagacaggagatcatcgtgctggacagcaagagaagcaacgccatcaacatcggcctgaccgtgctgcccccccccagaaccatcaagatcgccatcctgaacttcgacgagtacgccctgaacaaggagggcatcgagaagatcctgaccatgatccccaccgacgaggagaagcagaagatccaggaggcccagctggccaaccccgagatccccctgggcagcgccgagcagttcctgctgaccctgagcagcatcagcgagctgagcgccagactgcacctgtgggccttcaagatggactacgagaccaccgagaaggaggtggccgagcccctgctggacctgaaggagggcatcgaccagctggagaacaacaagaccctgggcttcatcctgagcaccctgctggccatcggcaacttcctgaacggcaccaacgccaaggccttcgagctgagctacctggagaaggtgcccgaggtgaaggacaccgtgcacaagcagagcctgctgcaccacgtgtgcaccatggtggtggagaacttccccgacagcagcgacctgtacagcgagatcggcgccatcaccagaagcgccaaggtggacttcgaccagctgcaggacaacctgtgccagatggagagaagatgcaaggccagctgggaccacctgaaggccatcgccaagcacgagatgaagcccgtgctgaagcagagaatgagcgagttcctgaaggactgcgccgagagaatcatcatcctgaagatcgtgcacagaagaatcatcaacagattccacagcttcctgctgttcatgggccaccccccctacgccatcagagaggtgaacatcaacaagttctgcagaatcatcagcgagttcgccctggagtacagaaccaccagagagagagtgctgcagcagaagcagaagagagccaaccacagagagagaaacaagaccagaggcaagatgatcaccgacagcggcaagttcagcggcagcagccccgccccccccagccagccccagggcctgagctacgccgaggacgccgccgagcacgagaacatgaaggccgtgctgaagaccagcagccccagcgtggaggacgccacccccgccctgggcgtgagaaccagaagcagagccagcagaggcagcaccagcagctggaccatgggcaccgacgacagccccaacgtgaccgacgacgccgccgacgagatcatggacagaatcgtgaagagcgccacccaggtgcccagccagagagtggtgcccagagagagaaagagaagcagagccaacagaaagagcctgagaagaaccctgaagagcggcctgacccccgaggaggccagagccctgggcctggtgggcaccagcgagctgcagctgtag

SEQ ID NO: 100120 - DNA, 153 bp, Artificial Sequence
  derived and/or modified sequence
atggccagccagaacagagaccccgccgccaccagcgtggccgccgccagaaagggcgccgagcccagcggcggcgccgccagaggccccgtgggcaagagactgcagcaggagctgatgaccctgatgaaccccaccctgatcgtgccctag

SEQ ID NO: 100121 - DNA, 153 bp, Artificial Sequence
  derived and/or modified sequence
atggctagccaaaacagggatcctgcagcaactagcgttgccgcggctcggaagggcgccgagccttcaggaggggctgctcggggcccagtgggcaagaggctgcagcaggagctgatgaccttgatgaatccaacattaatcgtcccctag

SEQ ID NO: 100122 - DNA, 153 bp, Artificial Sequence
  derived and/or modified sequence
atggccagccagaacagagatcctgctgccacctctgtggccgccgccaggaaaggagctgagcccagcggcggggccgcccggggccctgtgggcaagaggctgcagcaggagctgatgaccctgatgaaccccaccctcatcgtgccctag

SEQ ID NO: 100123 - DNA, 153 bp, Artificial Sequence
  derived and/or modified sequence
atggccagccagaaccgggaccccgccgccaccagcgtggccgccgctcggaagggagccgaacctagtgggggcgccgcacggggacctgttggaaaaaggcttcaacaggagcttatgacactgatgaacccgactctaatagtaccgtag

SEQ ID NO: 100124 - DNA, 153 bp, Artificial Sequence
  derived and/or modified sequence
atggcgagtcagaacagggaccccgctgcaacttcagtggccgcagctagaaagggcgctgaaccctccggtggggctgcccgaggcccagtggggaaaagactacagcaagaactgatgactctgatgaaccctacccttattgtgccatag

SEQ ID NO: 100125 - DNA, 476 bp, Artificial Sequence
  derived and/or modified sequence
gttctccgagttcctgtctctctgccaacgccgcccggatggcttcccaaaaccgcgacccagccgccactagcgtcgccgccgcccgtaaaggagctgagccgagcgggggcgccgcccggggtccggtgggcaaaaggctacagcaggagctgatgaccctcatgaacccaacattgatagtcccttgaacacacatgctgccgagctctggaaaaaccccacagcttttaagaagtacctgcaagaaacctactcaaagcaggtcaccagccaggagccctgacccaggctgcccagcctgtccttgtgtcgtctttttaatttttccttagatggtctgtcctttttgtgatttctgtataggactctttatcttgagctgtggtatttttgttttgtttttgtcttttaaattaagcctcggttgagcccttgtatattaaataaatgcatttttgtccttttttagacaa

SEQ ID NO: 100126 - protein, 1261 aa, Artificial Sequence
  derived and/or modified sequence
MAAAAASGAGGAAGAGTGGAGPAGRLLPPPAPGSPAAPAAVSPAAGQPRPPAPASRGPMPARIGYYEIDRTIGKGNFAVVKRATHLVTKAKVAIKIIDKTQLDEENLKKIFREVQIMKMLCHPHIIRLYQVMETERMIYLVTEYASGGEIFDHLVAHGRMAEKEARRKFKQIVTAVYFCHCRNIVHRDLKAENLLLDANLNIKIADFGFSNLFTPGQLLKTWCGSPPYAAPELFEGKEYDGPKVDIWSLGVVLYVLVCGALPFDGSTLQNLRARVLSGKFRIPFFMSTECEHLIRHMLVLDPNKRLSMEQICKHKWMKLGDADPNFDRLIAECQQLKEERQVDPLNEDVLLAMEDMGLDKEQTLQAEQAGTAMNISVPQVQLINPENQIVEPDGTLNLDSDEGEEPSPEALVRYLSMRRHTVGVADPRTEVMEDLQKLLPGFPGVNPQAPFLQVAPNVNFMHNLLPMQNLQPTGQLEYKEQSLLQPPTLQLLNGMGPLGRRASDGGANIQLHAQQLLKRPRGPSPLVTMTPAVPAVTPVDEESSDGEPDQEAVQRYLANRSKRHTLAMTNPTAEIPPDLQRQLGQQPFRSRVWPPHLVPDQHRSTYKDSNTLHLPTERFSPVRRFSDGAASIQAFKAHLEKMGNNSSIKQLQQECEQLQKMYGGQIDERTLEKTQQQHMLYQQEQHHQILQQQIQDSICPPQPSPPLQAACENQPALLTHQLQRLRIQPSSPPPNHPNNHLFRQPSNSPPPMSSAMIQPHGAASSSQFQGLPSRSAIFQQQPENCSSPPNVALTCLGMQQPAQSQQVTIQVQEPVDMLSNMPGTAAGSSGRGISISPSAGQMQMQHRTNLMATLSYGHRPLSKQLSADSAEAHSAHQQPPHYTTSALQQALLSPTPPDYTRHQQVPHILQGLLSPRHSLTGHSDIRLPPTEFAQLIKRQQQQRQQQQQQQQQQEYQELFRHMNQGDAGSLAPSLGGQSMTERQALSYQNADSYHHHTSPQHLLQIRAQECVSQASSPTPPHGYAHQPALMHSESMEEDCSCEGAKDGFQDSKSSSTLTKGCHDSPLLLSTGGPGDPESLLGTVSHAQELGIHPYGHQPTAAFSKNKVPSREPVIGNCMDRSSPGQAVELPDHNGLGYPARPSVHEHHRPRALQRHHTIQNSDDAYVQLDNLPGMSLVAGKALSSARMSDAVLSQSSLMGSQQFQDGENEECGASLGGHEHPDLSDGSQHLNSSCYPSTCITDILLSYKHPEVSFSMEQAGV

SEQ ID NO: 100127 - protein, 1203 aa, Artificial Sequence
  derived and/or modified sequence
MPARIGYYEIDRTIGKGNFAVVKRATHLVTKAKVAIKIIDKTQLDEENLKKIFREVQIMKMLCHPHIIRLYQVMETERMIYLVTEYASGGEIFDHLVAHGRMAEKEARRKFKQIVTAVYFCHCRNIVHRDLKAENLLLDANLNIKIADFGFSNLFTPGQLLKTWCGSPPYAAPELFEGKEYDGPKVDIWSLGVVLYVLVCGALPFDGSTLQNLRARVLSGKFRIPFFMSTECEHLIRHMLVLDPNKRLSMEQICKHKWMKLGDADPNFDRLIAECQQLKEERQVDPLNEDVLLAMEDMGLDKEQTLQAEQAGTAMNISVPQVQLINPENQIVEPDGTLNLDSDEGEEPSPEALVRYLSMRRHTVGVADPRTEVMEDLQKLLPGFPGVNPQAPFLQVAPNVNFMHNLLPMQNLQPTGQLEYKEQSLLQPPTLQLLNGMGPLGRRASDGGANIQLHAQQLLKRPRGPSPLVTMTPAVPAVTPVDEESSDGEPDQEAVQRYLANRSKRHTLAMTNPTAEIPPDLQRQLGQQPFRSRVWPPHLVPDQHRSTYKDSNTLHLPTERFSPVRRFSDGAASIQAFKAHLEKMGNNSSIKQLQQECEQLQKMYGGQIDERTLEKTQQQHMLYQQEQHHQILQQQIQDSICPPQPSPPLQAACENQPALLTHQLQRLRIQPSSPPPNHPNNHLFRQPSNSPPPMSSAMIQPHGAASSSQFQGLPSRSAIFQQQPENCSSPPNVALTCLGMQQPAQSQQVTIQVQEPVDMLSNMPGTAAGSSGRGISISPSAGQMQMQHRTNLMATLSYGHRPLSKQLSADSAEAHSAHQQPPHYTTSALQQALLSPTPPDYTRHQQVPHILQGLLSPRHSLTGHSDIRLPPTEFAQLIKRQQQQRQQQQQQQQQQEYQELFRHMNQGDAGSLAPSLGGQSMTERQALSYQNADSYHHHTSPQHLLQIRAQECVSQASSPTPPHGYAHQPALMHSESMEEDCSCEGAKDGFQDSKSSSTLTKGCHDSPLLLSTGGPGDPESLLGTVSHAQELGIHPYGHQPTAAFSKNKVPSREPVIGNCMDRSSPGQAVELPDHNGLGYPARPSVHEHHRPRALQRHHTIQNSDDAYVQLDNLPGMSLVAGKALSSARMSDAVLSQSSLMGSQQFQDGENEECGASLGGHEHPDLSDGSQHLNSSCYPSTCITDILLSYKHPEVSFSMEQAGV

SEQ ID NO: 100128 - DNA, 3786 bp, Artificial Sequence
  derived and/or modified sequence
atggccgccgccgccgccagcggcgccggcggcgccgccggcgccggcaccggcggcgccggccccgccggcagactgctgcccccccccgcccccggcagccccgccgcccccgccgccgtgagccccgccgccggccagcccagaccccccgcccccgccagcagaggccccatgcccgccagaatcggctactacgagatcgacagaaccatcggcaagggcaacttcgccgtggtgaagagagccacccacctggtgaccaaggccaaggtggccatcaagatcatcgacaagacccagctggacgaggagaacctgaagaagatcttcagagaggtgcagatcatgaagatgctgtgccacccccacatcatcagactgtaccaggtgatggagaccgagagaatgatctacctggtgaccgagtacgccagcggcggcgagatcttcgaccacctggtggcccacggcagaatggccgagaaggaggccagaagaaagttcaagcagatcgtgaccgccgtgtacttctgccactgcagaaacatcgtgcacagagacctgaaggccgagaacctgctgctggacgccaacctgaacatcaagatcgccgacttcggcttcagcaacctgttcacccccggccagctgctgaagacctggtgcggcagccccccctacgccgcccccgagctgttcgagggcaaggagtacgacggccccaaggtggacatctggagcctgggcgtggtgctgtacgtgctggtgtgcggcgccctgcccttcgacggcagcaccctgcagaacctgagagccagagtgctgagcggcaagttcagaatccccttcttcatgagcaccgagtgcgagcacctgatcagacacatgctggtgctggaccccaacaagagactgagcatggagcagatctgcaagcacaagtggatgaagctgggcgacgccgaccccaacttcgacagactgatcgccgagtgccagcagctgaaggaggagagacaggtggaccccctgaacgaggacgtgctgctggccatggaggacatgggcctggacaaggagcagaccctgcaggccgagcaggccggcaccgccatgaacatcagcgtgccccaggtgcagctgatcaaccccgagaaccagatcgtggagcccgacggcaccctgaacctggacagcgacgagggcgaggagcccagccccgaggccctggtgagatacctgagcatgagaagacacaccgtgggcgtggccgaccccagaaccgaggtgatggaggacctgcagaagctgctgcccggcttccccggcgtgaacccccaggcccccttcctgcaggtggcccccaacgtgaacttcatgcacaacctgctgcccatgcagaacctgcagcccaccggccagctggagtacaaggagcagagcctgctgcagccccccaccctgcagctgctgaacggcatgggccccctgggcagaagagccagcgacggcggcgccaacatccagctgcacgcccagcagctgctgaagagacccagaggccccagccccctggtgaccatgacccccgccgtgcccgccgtgacccccgtggacgaggagagcagcgacggcgagcccgaccaggaggccgtgcagagatacctggccaacagaagcaagagacacaccctggccatgaccaaccccaccgccgagatcccccccgacctgcagagacagctgggccagcagcccttcagaagcagagtgtggcccccccacctggtgcccgaccagcacagaagcacctacaaggacagcaacaccctgcacctgcccaccgagagattcagccccgtgagaagattcagcgacggcgccgccagcatccaggccttcaaggcccacctggagaagatgggcaacaacagcagcatcaagcagctgcagcaggagtgcgagcagctgcagaagatgtacggcggccagatcgacgagagaaccctggagaagacccagcagcagcacatgctgtaccagcaggagcagcaccaccagatcctgcagcagcagatccaggacagcatctgccccccccagcccagcccccccctgcaggccgcctgcgagaaccagcccgccctgctgacccaccagctgcagagactgagaatccagcccagcagccccccccccaaccaccccaacaaccacctgttcagacagcccagcaacagccccccccccatgagcagcgccatgatccagccccacggcgccgccagcagcagccagttccagggcctgcccagcagaagcgccatcttccagcagcagcccgagaactgcagcagcccccccaacgtggccctgacctgcctgggcatgcagcagcccgcccagagccagcaggtgaccatccaggtgcaggagcccgtggacatgctgagcaacatgcccggcaccgccgccggcagcagcggcagaggcatcagcatcagccccagcgccggccagatgcagatgcagcacagaaccaacctgatggccaccctgagctacggccacagacccctgagcaagcagctgagcgccgacagcgccgaggcccacagcgcccaccagcagcccccccactacaccaccagcgccctgcagcaggccctgctgagccccaccccccccgactacaccagacaccagcaggtgccccacatcctgcagggcctgctgagccccagacacagcctgaccggccacagcgacatcagactgccccccaccgagttcgcccagctgatcaagagacagcagcagcagagacagcagcagcagcagcagcagcagcagcaggagtaccaggagctgttcagacacatgaaccagggcgacgccggcagcctggcccccagcctgggcggccagagcatgaccgagagacaggccctgagctaccagaacgccgacagctaccaccaccacaccagcccccagcacctgctgcagatcagagcccaggagtgcgtgagccaggccagcagccccacccccccccacggctacgcccaccagcccgccctgatgcacagcgagagcatggaggaggactgcagctgcgagggcgccaaggacggcttccaggacagcaagagcagcagcaccctgaccaagggctgccacgacagccccctgctgctgagcaccggcggccccggcgaccccgagagcctgctgggcaccgtgagccacgcccaggagctgggcatccacccctacggccaccagcccaccgccgccttcagcaagaacaaggtgcccagcagagagcccgtgatcggcaactgcatggacagaagcagccccggccaggccgtggagctgcccgaccacaacggcctgggctaccccgccagacccagcgtgcacgagcaccacagacccagagccctgcagagacaccacaccatccagaacagcgacgacgcctacgtgcagctggacaacctgcccggcatgagcctggtggccggcaaggccctgagcagcgccagaatgagcgacgccgtgctgagccagagcagcctgatgggcagccagcagttccaggacggcgagaacgaggagtgcggcgccagcctgggcggccacgagcaccccgacctgagcgacggcagccagcacctgaacagcagctgctaccccagcacctgcatcaccgacatcctgctgagctacaagcaccccgaggtgagcttcagcatggagcaggccggcgtgtag

SEQ ID NO: 100129 - DNA, 3612 bp, Artificial Sequence
  derived and/or modified sequence
atgcccgccagaatcggctactacgagatcgacagaaccatcggcaagggcaacttcgccgtggtgaagagagccacccacctggtgaccaaggccaaggtggccatcaagatcatcgacaagacccagctggacgaggagaacctgaagaagatcttcagagaggtgcagatcatgaagatgctgtgccacccccacatcatcagactgtaccaggtgatggagaccgagagaatgatctacctggtgaccgagtacgccagcggcggcgagatcttcgaccacctggtggcccacggcagaatggccgagaaggaggccagaagaaagttcaagcagatcgtgaccgccgtgtacttctgccactgcagaaacatcgtgcacagagacctgaaggccgagaacctgctgctggacgccaacctgaacatcaagatcgccgacttcggcttcagcaacctgttcacccccggccagctgctgaagacctggtgcggcagccccccctacgccgcccccgagctgttcgagggcaaggagtacgacggccccaaggtggacatctggagcctgggcgtggtgctgtacgtgctggtgtgcggcgccctgcccttcgacggcagcaccctgcagaacctgagagccagagtgctgagcggcaagttcagaatccccttcttcatgagcaccgagtgcgagcacctgatcagacacatgctggtgctggaccccaacaagagactgagcatggagcagatctgcaagcacaagtggatgaagctgggcgacgccgaccccaacttcgacagactgatcgccgagtgccagcagctgaaggaggagagacaggtggaccccctgaacgaggacgtgctgctggccatggaggacatgggcctggacaaggagcagaccctgcaggccgagcaggccggcaccgccatgaacatcagcgtgccccaggtgcagctgatcaaccccgagaaccagatcgtggagcccgacggcaccctgaacctggacagcgacgagggcgaggagcccagccccgaggccctggtgagatacctgagcatgagaagacacaccgtgggcgtggccgaccccagaaccgaggtgatggaggacctgcagaagctgctgcccggcttccccggcgtgaacccccaggcccccttcctgcaggtggcccccaacgtgaacttcatgcacaacctgctgcccatgcagaacctgcagcccaccggccagctggagtacaaggagcagagcctgctgcagccccccaccctgcagctgctgaacggcatgggccccctgggcagaagagccagcgacggcggcgccaacatccagctgcacgcccagcagctgctgaagagacccagaggccccagccccctggtgaccatgacccccgccgtgcccgccgtgacccccgtggacgaggagagcagcgacggcgagcccgaccaggaggccgtgcagagatacctggccaacagaagcaagagacacaccctggccatgaccaaccccaccgccgagatcccccccgacctgcagagacagctgggccagcagcccttcagaagcagagtgtggcccccccacctggtgcccgaccagcacagaagcacctacaaggacagcaacaccctgcacctgcccaccgagagattcagccccgtgagaagattcagcgacggcgccgccagcatccaggccttcaaggcccacctggagaagatgggcaacaacagcagcatcaagcagctgcagcaggagtgcgagcagctgcagaagatgtacggcggccagatcgacgagagaaccctggagaagacccagcagcagcacatgctgtaccagcaggagcagcaccaccagatcctgcagcagcagatccaggacagcatctgccccccccagcccagcccccccctgcaggccgcctgcgagaaccagcccgccctgctgacccaccagctgcagagactgagaatccagcccagcagccccccccccaaccaccccaacaaccacctgttcagacagcccagcaacagccccccccccatgagcagcgccatgatccagccccacggcgccgccagcagcagccagttccagggcctgcccagcagaagcgccatcttccagcagcagcccgagaactgcagcagcccccccaacgtggccctgacctgcctgggcatgcagcagcccgcccagagccagcaggtgaccatccaggtgcaggagcccgtggacatgctgagcaacatgcccggcaccgccgccggcagcagcggcagaggcatcagcatcagccccagcgccggccagatgcagatgcagcacagaaccaacctgatggccaccctgagctacggccacagacccctgagcaagcagctgagcgccgacagcgccgaggcccacagcgcccaccagcagcccccccactacaccaccagcgccctgcagcaggccctgctgagccccaccccccccgactacaccagacaccagcaggtgccccacatcctgcagggcctgctgagccccagacacagcctgaccggccacagcgacatcagactgccccccaccgagttcgcccagctgatcaagagacagcagcagcagagacagcagcagcagcagcagcagcagcagcaggagtaccaggagctgttcagacacatgaaccagggcgacgccggcagcctggcccccagcctgggcggccagagcatgaccgagagacaggccctgagctaccagaacgccgacagctaccaccaccacaccagcccccagcacctgctgcagatcagagcccaggagtgcgtgagccaggccagcagccccacccccccccacggctacgcccaccagcccgccctgatgcacagcgagagcatggaggaggactgcagctgcgagggcgccaaggacggcttccaggacagcaagagcagcagcaccctgaccaagggctgccacgacagccccctgctgctgagcaccggcggccccggcgaccccgagagcctgctgggcaccgtgagccacgcccaggagctgggcatccacccctacggccaccagcccaccgccgccttcagcaagaacaaggtgcccagcagagagcccgtgatcggcaactgcatggacagaagcagccccggccaggccgtggagctgcccgaccacaacggcctgggctaccccgccagacccagcgtgcacgagcaccacagacccagagccctgcagagacaccacaccatccagaacagcgacgacgcctacgtgcagctggacaacctgcccggcatgagcctggtggccggcaaggccctgagcagcgccagaatgagcgacgccgtgctgagccagagcagcctgatgggcagccagcagttccaggacggcgagaacgaggagtgcggcgccagcctgggcggccacgagcaccccgacctgagcgacggcagccagcacctgaacagcagctgctaccccagcacctgcatcaccgacatcctgctgagctacaagcaccccgaggtgagcttcagcatggagcaggccggcgtgtag

SEQ ID NO: 100130 - DNA, 3786 bp, Artificial Sequence
  derived and/or modified sequence
atggccgccgccgccgcctctggcgcaggtggggctgctggagcaggtaccggcggcgctggaccagctgggaggctcctcccacccccagcgcccggaagcccagctgcacccgcagccgtgtcgccagcggccggtcaaccgcgacccccggcccccgctagcagaggaccaatgccagcacgcatcggatactatgagatagatcggaccattgggaagggcaatttcgcggtggtgaagcgggccacccacctagtcactaaggcaaaggtcgcgatcaaaattattgataaaacccaattagacgaggagaatttaaagaaaatcttccgggaggtacagatcatgaaaatgctttgtcaccctcatataatacgtctgtaccaggtgatggagaccgagcgcatgatctacctcgttacagaatatgcatcaggcggagaaattttcgatcacctggtggctcacggaaggatggccgagaaggaggcccgtcgtaaatttaaacagatcgtgaccgcagtatatttttgccactgccggaacattgtgcatagggatttaaaggcggagaatcttctgctggacgctaatctgaatataaagatcgcggatttcggtttctcaaacctgtttacgccaggacaactgctaaaaacctggtgcggctcaccgccatacgccgctcccgagttgtttgaaggcaaggagtacgatggtccaaaggtcgatatttggagtctgggtgtagtgctatacgtgctggtgtgtggggctctgccgtttgacggctccacattacaaaacttgagagcccgagtgttgagcggcaaattccgtattcctttcttcatgagtacagaatgcgaacacttgattcgacatatgctggtgctcgaccccaacaagagactgtcaatggagcagatatgcaagcataagtggatgaaactaggagatgccgaccctaactttgaccgattaattgctgagtgtcagcagttgaaggaagagcggcaggtggatccgttgaatgaggacgtgctcctggccatggaggacatggggctcgacaaagaacaaactctgcaggcagagcaggctggtaccgctatgaacatcagtgtgccacaggtccaacttatcaatcccgagaatcagattgtcgagccagatggaacattaaacctagacagtgacgagggggaggagccttcccctgaggctctcgtcaggtacctgtcaatgcggcgccacaccgttggcgttgcggaccctcgcaccgaggtgatggaggatcttcaaaagctgttgccaggctttccaggggtcaatccacaagccccctttctccaggtcgcccctaacgttaacttcatgcacaacctgctgcccatgcagaaccttcagcctacggggcagctcgagtataaagagcagtccctactgcagccgcccactctacagttgctgaacggtatgggacccttaggacgcagagcctcagatggtggcgctaacattcagctacatgcccaacagctgctgaaacgtccacgggggcccagcccactggtcactatgaccccggccgtaccagccgtaacacccgtggacgaggagagcagcgacggagaacccgatcaggaggcggtgcaacgctatcttgcaaaccgtagcaagaggcacactctcgccatgacaaatcccactgccgagatacctccggacctccagcggcagttgggccagcagccctttagatctagggtctggcccccccacctcgtgcccgatcagcataggtcgacctacaaagactccaatactctccacctgcccactgagaggttcagtcctgtacgtcgcttctcagatggcgccgcatccatccaggcattcaaagcacacttggaaaaaatggggaacaactcttccattaagcaacttcagcaggagtgcgagcagctgcagaagatgtatggcggccaaatcgacgaaagaactcttgagaagacacaacagcaacacatgctgtatcaacaggagcaacatcatcagattcttcaacagcaaatccaagattctatctgcccaccgcagccctccccccccctgcaggccgcgtgtgagaatcagcctgccctgctcacccaccagttgcaacggctccggatccagcccagctctccacctcctaaccaccccaacaatcaccttttcaggcagccatctaattctcctccgccgatgagctcagctatgatccagccccatggcgcagccagcagctcccagtttcagggtctgcccagtcggtcagcaatctttcagcaacagcccgaaaactgctctagtccacccaacgtcgctctgacatgcctgggaatgcagcaaccagcgcagtctcagcaggtcacaattcaggttcaggaaccagtggacatgctctctaacatgccaggaacagcggccggtagttcaggaagaggcatcagcatatcaccttccgccggacagatgcagatgcagcatagaacgaacctgatggcgacattaagctacggtcaccggcccctttctaaacagctctccgctgattctgcagaggcacacagtgcccaccaacaacccccacattatacgacctctgcgctccagcaggctctactgagccctacaccacctgactatacgaggcatcagcaagtccctcacattctgcagggtctgttgtccccaaggcactcattgacaggccactcggacatccggctgccgcccaccgaattcgcccaactcattaagcgacagcagcaacagcgtcagcagcagcagcagcagcagcagcagcaggaatatcaggagctctttcgccatatgaatcaaggcgacgcaggaagccttgctccctctctgggcggccagtccatgaccgagaggcaggctctgtcatatcagaatgctgactcataccaccaccacacaagcccccagcacctcctccagatcagagctcaggagtgtgtgtcccaagcctcttcaccaactcctccgcacggatacgcccaccaacccgctctgatgcattccgagtccatggaagaggattgttcttgcgagggggcaaaggatggttttcaggattcaaaatcatcgtcgactctgaccaaaggctgtcatgattcaccacttctgctgagcactggggggcccggggaccctgaatctctgttggggacggtaagccacgcgcaggaactggggattcacccatacggccaccagcctacggccgcattctccaagaataaagtgcctagccgcgagccggtgattgggaattgcatggatagatcatccccggggcaagcagtagaacttccagaccacaacggtctggggtaccctgccaggccatctgtacacgagcatcatcggcccagagctctgcagcgtcaccacacgatccagaattcagatgatgcctatgtgcagctggacaatctccctggtatgtccctggtggccggcaaggccttaagtagcgcccggatgtcagacgctgtgctctcacagagttcacttatgggctcacaacaattccaggatggcgagaatgaagagtgtggcgccagtttgggcggccacgaacaccccgacctgagtgacggatcacaacatcttaatagctcctgctaccctagtacgtgtatcaccgacattctgctgagctataagcaccctgaagtctcttttagcatggaacaggccggagtttag

SEQ ID NO: 100131 - DNA, 3612 bp, Artificial Sequence
  derived and/or modified sequence
atgcccgcaaggatcggctattatgagatcgatcgtacaattggcaagggaaatttcgccgttgttaagcgcgctacacatctggtcacaaaagccaaagtcgccataaagattatcgacaagacacagctggatgaggagaatctgaaaaagatttttagggaggtccagattatgaagatgctgtgtcaccctcatatcattaggctgtatcaggtaatggagactgaaagaatgatctatctcgttactgaatatgcctccggcggagaaatttttgatcacctcgtggcacacggccgcatggctgagaaggaggcccgaagaaagttcaagcaaatcgtcaccgccgtctatttctgccactgcaggaacatcgtgcatagagatctgaaggcagaaaatctgctactggatgctaatctcaacattaagattgccgattttgggttctccaacctgttcacacctggccagctcctcaaaacttggtgtggaagcccgccctacgccgctccggaactctttgagggtaaagagtacgatggtccaaaggtggacatctggagcctcggggtcgtactgtacgtgctggtctgcggagcattgccattcgacggttccacactgcaaaatttacgggctcgggtcttaagcggcaagttccgcattcctttctttatgtccaccgaatgcgagcatctgatccgccatatgcttgtgttggaccccaataagcggttgagcatggagcagatctgtaagcataagtggatgaagctgggagatgctgatcctaattttgataggctgatagccgagtgtcagcaactcaaggaggagcgtcaggtggatccacttaatgaagacgtcctgttagccatggaggatatgggactggacaaagagcagacactgcaggccgaacaggcaggcacagcaatgaatatctccgtcccacaggtgcagctgattaatcctgagaaccagattgtagagccggatggcacgctcaacctagacagcgacgagggtgaggagcctagcccagaggcccttgttcggtatttatctatgcgccggcacacagtgggagtggccgatcctcgaacagaggtcatggaggacctgcagaaactgctgcctgggttccctggcgtaaacccacaggctcctttcctgcaagttgccccaaatgtgaatttcatgcataaccttctccctatgcaaaacttgcagcctactggacagcttgagtataaggagcagtctctgctgcagccccccaccttacagttattaaacggaatggggcccctaggaagaagagcctcagatggaggtgcaaacatccaactccacgctcagcaactcttaaaaagaccaaggggacccagccccctggtcaccatgaccccggcggtgccggctgttacaccggtggacgaagagtcttccgacggtgaacctgaccaagaagctgtgcaacggtatctggcaaaccggtccaagagacacacgctggcaatgactaaccctacggccgagatccccccagaccttcagcgccaattgggacaacagccgttccgctcacgggtgtggcctccccaccttgttccagatcagcaccgcagcacgtataaggattctaatactctgcacttacctactgaacgcttttccccggtgcgtcggttctcagacggcgcggccagtatacaagcctttaaggcccaccttgagaagatgggtaacaattcatccataaagcagctccaacaggagtgtgagcagctccagaaaatgtacggaggccagattgacgaacgcaccctggagaagactcagcagcagcacatgctgtatcagcaggagcaacatcaccagattttgcagcagcaaatccaggactctatttgccccccgcagccttccccacccctccaggcggcctgtgagaaccagcctgcactgctcacccaccagcttcagaggctgcgtatccaaccgtcatcacccccaccaaaccatcccaacaaccatttgttccggcagccttcaaatagcccaccgccaatgtcctcggccatgatacagccacatggagctgcatccagttcccagttccagggattgccctcccggtcagccatcttccaacaacaaccggagaactgcagctctcctcctaacgtcgccctgacatgtctggggatgcaacaacctgctcagtcccagcaggttaccatccaggtccaggagcccgtcgatatgctttcaaatatgcctgggacggcagctggcagctccggtagggggataagtatcagcccgagcgccggccagatgcagatgcagcatagaaccaacctgatggctaccctgtcctacgggcaccgccccctcagcaagcagctgagtgcggactctgcagaagcgcacagtgcgcaccagcagccaccacactatacaacttctgcactgcagcaggccttactgtcgccaaccccccccgattacacgagacatcaacaggtcccacacattctgcaaggactgcttagcccaagacactcactgaccgggcatagtgatattagactgccccccaccgaattcgcccagctgatcaagcgccagcagcagcagcggcagcaacaacagcagcagcagcagcagcaggagtaccaggaactgtttcggcatatgaaccagggcgacgccgggagcttagctccctctttaggaggacagagtatgactgaacgacaagcgctgtcttaccaaaacgccgattcttaccatcaccacacttcccctcagcatctgttgcagatccgggcacaggagtgtgtatcccaggcaagtagtcctacgcccccccatggctacgcgcatcagcccgccctgatgcattcagagtcaatggaggaggattgttcttgcgagggagccaaggatggtttccaggattccaagtctagcagtacacttacaaaaggatgtcatgactctccactactgctgagcaccggtggtcctggcgacccggagtctctcctgggcaccgtgtcccatgcacaggaactgggaattcacccttacggtcatcagcccacggcagcctttagtaagaacaaggtgcccagcagagaacccgtgataggaaattgtatggatcggagcagcccagggcaggctgtggagctccctgatcataatggtttgggctatcccgctcgtccctcggtgcatgaacaccaccgcccgcgagctctgcagaggcaccacacgatacaaaatagcgatgatgcatacgtgcagctggacaatctgcccgggatgagcctcgtggctggaaaggccctttcttcagctagaatgagcgacgcggtcttaagccagtcctctcttatgggtagtcagcagttccaggatggagagaatgaggaatgcggcgcctctttagggggtcacgagcaccctgacctcagcgatggttctcagcatctgaactcaagttgttatccaagcacatgtattactgacatactgctgtcgtataaacacccagaggtctctttttcaatggaacaagccggagtgtag

SEQ ID NO: 100132 - DNA, 3786 bp, Artificial Sequence
  derived and/or modified sequence
atggctgctgctgctgccagcggggccggcggcgctgctggagctggcactggaggagctggccctgctggccgcctgctgcccccaccagcccctggcagccctgctgccccagctgctgtgtccccagctgctggccagccccggcccccagccccagccagccggggccccatgcctgccagaattggctactatgaaattgacaggaccatcggcaagggcaactttgctgtggtgaagagggccacccacctggtgaccaaggccaaggtggccatcaagatcatcgacaagacccagctggatgaggagaacctgaagaagatcttccgggaggtgcagatcatgaagatgctgtgccacccccacatcatccggctgtaccaggtgatggagacagagaggatgatctacctggtgacagaatatgccagcggcggggagatctttgaccacctggtggcccacggccgcatggccgagaaggaggcccggaggaagttcaagcagatcgtgacagctgtgtacttctgccactgcaggaacatcgtgcaccgggacctgaaggccgagaacctgctgctggatgccaacctgaacatcaagattgctgactttggcttcagcaacctcttcaccccaggccagctgctgaagacctggtgtggcagccccccctatgctgcccctgagctgtttgagggcaaggagtatgatggccccaaggtggacatctggagcctgggcgtggtgctgtatgtgctggtgtgtggggccctgccctttgatggcagcaccctgcagaacctgcgggcccgggtgctgagcggcaagttccgcatccccttcttcatgagcacagaatgtgagcacctgatccgccacatgctggtgctggaccccaacaagaggctgtccatggagcagatctgcaagcacaagtggatgaagctgggagatgctgaccccaactttgaccggctgattgctgagtgccagcagctgaaggaggagcggcaggtggaccccctgaatgaagatgtgctgctggccatggaggacatgggcctggacaaggagcagaccctgcaggccgagcaggccggcacagccatgaacatctctgtgccccaggtgcagctgatcaaccctgagaaccagatcgtggagccagatggcaccctgaacctggacagtgatgaaggagaggagcccagccctgaggccctggtgcgctacctgtccatgaggaggcacacagtgggcgtggccgaccccaggacagaggtgatggaggacctgcagaagctgctgcccggcttccctggggtgaacccccaggcccccttcctgcaggtggccccaaatgtgaacttcatgcacaacctgctgcccatgcagaacctgcagcccaccggccagctggagtacaaggagcagagcctgctgcagccccccaccctgcagctgctgaatggcatgggccccctgggccggcgggccagtgatggaggagccaacatccagctgcacgcccagcagctgctgaagaggccccggggccccagccccctggtgaccatgaccccagctgtgcctgctgtgacccctgtggatgaggagagcagtgatggagagccagaccaggaggccgtgcagcgctacctggccaacagaagcaagaggcacaccctggccatgaccaaccccacagctgagatccccccagacctgcagaggcagctgggccagcagcccttccgcagccgggtgtggccaccccacctggtgcctgaccagcacaggagcacctacaaggacagcaacaccctgcacctgcccacagagcgcttcagccctgtgcggcgcttcagtgatggagctgccagcatccaggccttcaaggcccacctggagaagatgggcaacaacagcagcatcaagcagctgcagcaggagtgtgagcagctgcagaagatgtatggaggccagattgatgagaggaccctggagaagacccagcagcagcacatgctgtaccagcaggagcagcaccaccagatcctgcagcagcagatccaggacagcatctgccccccccagcccagcccccccctgcaggccgcctgtgagaaccagcctgccctgctgacccaccagctgcagaggctgcgcatccagcccagcagccccccacccaaccaccccaacaaccacctgttccggcagcccagcaacagccccccacccatgagcagcgccatgatccagccccacggggccgccagcagcagccagttccagggcctgcccagccgcagcgccatcttccagcagcagcctgagaactgcagcagcccccccaacgtggccctgacctgcctgggcatgcagcagcctgcccagagccagcaggtgaccatccaggtgcaggagcctgtggacatgctgagcaacatgcctggaacagctgctggcagcagcggccggggcatcagcatcagccccagcgctggccagatgcagatgcagcacaggaccaacctgatggccaccctgtcctatggccaccggcccctgagcaagcagctgtctgctgacagcgctgaggcccacagcgcccaccagcagcccccccactacaccaccagcgccctgcagcaggccctgctgagccccaccccaccagactacaccaggcaccagcaggtgccccacatcctgcagggcctgctgagccccaggcacagcctgaccggccacagcgacatccggctgcccccaacagaatttgcccagctgatcaagaggcagcagcagcagaggcagcagcagcagcagcagcagcagcagcaggagtaccaggagctgttccgccacatgaaccagggagatgctggcagcctggcccccagcctgggcggccagagcatgacagagcggcaggccctgagctaccagaatgctgacagctaccaccaccacaccagcccccagcacctgctgcagatccgggcccaggagtgtgtgtcccaggccagcagccccaccccacctcatggctacgcccaccagcctgccctgatgcacagcgagagcatggaggaggactgcagctgtgagggcgccaaggatggcttccaggacagcaagagcagcagcaccctgaccaagggctgccacgacagccccctgctgctgagcactggaggccctggggaccctgagagcctgctgggcaccgtgtcccatgcccaggagctgggcatccacccctacggccaccagcccacagctgccttcagcaagaacaaggtgcccagccgggagcccgtcatcggcaactgcatggacaggagcagccctggccaggccgtggagctgcctgaccacaacggcctgggctacccagcccggcccagcgtgcatgagcaccaccggccccgggccctgcagaggcaccacaccatccagaacagtgatgatgcctacgtgcagctggacaacctgcccggcatgagcctggtggccggcaaggccctgagcagcgccaggatgtctgatgctgtgctgagccagagcagcctgatgggcagccagcagttccaggatggagaaaatgaggagtgtggggccagcctgggcggccacgagcacccagacctgagtgatggcagccagcacctgaacagcagctgctaccccagcacctgcatcacagacatcctgctgagctacaagcaccctgaggtgtccttctccatggagcaggccggcgtgtag

SEQ ID NO: 100133 - DNA, 3612 bp, Artificial Sequence
  derived and/or modified sequence
atgcctgccagaattggctactatgaaattgacaggaccatcggcaagggcaactttgctgtggtgaagagggccacccacctggtgaccaaggccaaggtggccatcaagatcatcgacaagacccagctggatgaggagaacctgaagaagatcttccgggaggtgcagatcatgaagatgctgtgccacccccacatcatccggctgtaccaggtgatggagacagagaggatgatctacctggtgacagaatatgccagcggcggggagatctttgaccacctggtggcccacggccgcatggccgagaaggaggcccggaggaagttcaagcagatcgtgacagctgtgtacttctgccactgcaggaacatcgtgcaccgggacctgaaggccgagaacctgctgctggatgccaacctgaacatcaagattgctgactttggcttcagcaacctcttcaccccaggccagctgctgaagacctggtgtggcagccccccctatgctgcccctgagctgtttgagggcaaggagtatgatggccccaaggtggacatctggagcctgggcgtggtgctgtatgtgctggtgtgtggggccctgccctttgatggcagcaccctgcagaacctgcgggcccgggtgctgagcggcaagttccgcatccccttcttcatgagcacagaatgtgagcacctgatccgccacatgctggtgctggaccccaacaagaggctgtccatggagcagatctgcaagcacaagtggatgaagctgggagatgctgaccccaactttgaccggctgattgctgagtgccagcagctgaaggaggagcggcaggtggaccccctgaatgaagatgtgctgctggccatggaggacatgggcctggacaaggagcagaccctgcaggccgagcaggccggcacagccatgaacatctctgtgccccaggtgcagctgatcaaccctgagaaccagatcgtggagccagatggcaccctgaacctggacagtgatgaaggagaggagcccagccctgaggccctggtgcgctacctgtccatgaggaggcacacagtgggcgtggccgaccccaggacagaggtgatggaggacctgcagaagctgctgcccggcttccctggggtgaacccccaggcccccttcctgcaggtggccccaaatgtgaacttcatgcacaacctgctgcccatgcagaacctgcagcccaccggccagctggagtacaaggagcagagcctgctgcagccccccaccctgcagctgctgaatggcatgggccccctgggccggcgggccagtgatggaggagccaacatccagctgcacgcccagcagctgctgaagaggccccggggccccagccccctggtgaccatgaccccagctgtgcctgctgtgacccctgtggatgaggagagcagtgatggagagccagaccaggaggccgtgcagcgctacctggccaacagaagcaagaggcacaccctggccatgaccaaccccacagctgagatccccccagacctgcagaggcagctgggccagcagcccttccgcagccgggtgtggccaccccacctggtgcctgaccagcacaggagcacctacaaggacagcaacaccctgcacctgcccacagagcgcttcagccctgtgcggcgcttcagtgatggagctgccagcatccaggccttcaaggcccacctggagaagatgggcaacaacagcagcatcaagcagctgcagcaggagtgtgagcagctgcagaagatgtatggaggccagattgatgagaggaccctggagaagacccagcagcagcacatgctgtaccagcaggagcagcaccaccagatcctgcagcagcagatccaggacagcatctgccccccccagcccagcccccccctgcaggccgcctgtgagaaccagcctgccctgctgacccaccagctgcagaggctgcgcatccagcccagcagccccccacccaaccaccccaacaaccacctgttccggcagcccagcaacagccccccacccatgagcagcgccatgatccagccccacggggccgccagcagcagccagttccagggcctgcccagccgcagcgccatcttccagcagcagcctgagaactgcagcagcccccccaacgtggccctgacctgcctgggcatgcagcagcctgcccagagccagcaggtgaccatccaggtgcaggagcctgtggacatgctgagcaacatgcctggaacagctgctggcagcagcggccggggcatcagcatcagccccagcgctggccagatgcagatgcagcacaggaccaacctgatggccaccctgtcctatggccaccggcccctgagcaagcagctgtctgctgacagcgctgaggcccacagcgcccaccagcagcccccccactacaccaccagcgccctgcagcaggccctgctgagccccaccccaccagactacaccaggcaccagcaggtgccccacatcctgcagggcctgctgagccccaggcacagcctgaccggccacagcgacatccggctgcccccaacagaatttgcccagctgatcaagaggcagcagcagcagaggcagcagcagcagcagcagcagcagcagcaggagtaccaggagctgttccgccacatgaaccagggagatgctggcagcctggcccccagcctgggcggccagagcatgacagagcggcaggccctgagctaccagaatgctgacagctaccaccaccacaccagcccccagcacctgctgcagatccgggcccaggagtgtgtgtcccaggccagcagccccaccccacctcatggctacgcccaccagcctgccctgatgcacagcgagagcatggaggaggactgcagctgtgagggcgccaaggatggcttccaggacagcaagagcagcagcaccctgaccaagggctgccacgacagccccctgctgctgagcactggaggccctggggaccctgagagcctgctgggcaccgtgtcccatgcccaggagctgggcatccacccctacggccaccagcccacagctgccttcagcaagaacaaggtgcccagccgggagcccgtcatcggcaactgcatggacaggagcagccctggccaggccgtggagctgcctgaccacaacggcctgggctacccagcccggcccagcgtgcatgagcaccaccggccccgggccctgcagaggcaccacaccatccagaacagtgatgatgcctacgtgcagctggacaacctgcccggcatgagcctggtggccggcaaggccctgagcagcgccaggatgtctgatgctgtgctgagccagagcagcctgatgggcagccagcagttccaggatggagaaaatgaggagtgtggggccagcctgggcggccacgagcacccagacctgagtgatggcagccagcacctgaacagcagctgctaccccagcacctgcatcacagacatcctgctgagctacaagcaccctgaggtgtccttctccatggagcaggccggcgtgtag

SEQ ID NO: 100134 - DNA, 3786 bp, Artificial Sequence
  derived and/or modified sequence
atggccgccgccgccgccagcggcgccggcggcgccgccggcgccggtaccgggggcgcaggtcccgcaggacgcctcttgccaccacccgccccaggctcccctgccgcccctgccgccgtgtcccctgcagctggacaacctcgacccccagctcccgctagcagaggacctatgcccgcaagaatcggctactacgagatcgatagaacaatagggaaaggaaacttcgccgtcgttaaaagggccacccatttggtcaccaaagccaaggttgctatcaaaatcatcgataaaactcagctggacgaagaaaacttgaagaagatcttccgggaggttcaaattatgaaaatgctctgccatccacacatcattcgcctctatcaggttatggagactgaacgaatgatttatttagtgacggagtacgcgagtggcggagagatcttcgaccacctggtggcacacgggagaatggccgagaaagaggcacggcggaagtttaaacaaatcgttacggcagtgtatttctgtcactgtaggaacatcgtccacagggatctgaaggctgagaatctcctattagacgctaatttgaatatcaaaatcgccgatttcggcttcagtaatctgttcaccccaggacagctgctgaagacctggtgtggctcccctccttacgctgccccagaactgtttgagggaaaggagtatgacggaccaaaagtagatatctggtcccttggagtcgtcctgtatgtgttggtctgcggggctctgccatttgatggttccacactgcagaatcttcgtgcaagggttctgtccggtaaattcaggattccttttttcatgagtaccgaatgtgaacaccttattcggcacatgctggtcctcgatccaaataaaaggctgagtatggaacagatttgtaaacacaaatggatgaaactgggggacgcagaccccaactttgataggctaattgctgaatgtcagcaactgaaggaagagaggcaggtcgacccactaaatgaagacgtgcttcttgccatggaagacatgggcctagataaagagcagactttgcaggctgaacaggctggaacggccatgaacatttctgtcccgcaggtccagttaatcaatccagaaaatcaaatcgtcgaacccgacggcacactgaatctggattccgatgaaggagaagaaccgtcccctgaagctctggtcaggtacctgtcgatgcgccgacacacggtcggagtcgccgacccgagaactgaagtgatggaagatcttcagaagctgctcccgggattccccggcgttaacccgcaggccccttttctgcaggttgcccctaatgtgaactttatgcacaacctgttgcctatgcaaaatttacagccaacaggccagttggagtacaaggaacagagcctgcttcagcctcccacacttcagctcttaaatgggatggggccacttggacgtagagcgagcgatggtggggccaatatccagcttcatgcccagcagttacttaagaggcctcgaggaccatcacctctcgtgacaatgacaccggctgtgcccgccgtcacccctgtggacgaagaaagctccgatggggaacccgatcaagaggcagttcagaggtatctcgccaaccgctcaaaacggcacacattggccatgacaaacccaacagcagaaatcccaccagatctgcagaggcagctaggacagcagccgtttaggtcccgagtttggcccccacaccttgtaccagaccagcatagatctacatacaaagactcaaatacccttcatctgcccaccgaacgcttcagccccgttaggcggttctccgacggagccgcatccattcaggcgtttaaggcccaccttgagaaaatgggcaataattcctcgatcaaacaactgcagcaggaatgcgaacagttgcaaaagatgtatggaggccagatagatgaaaggactttagaaaaaactcagcagcagcatatgctctatcagcaggaacaacaccaccaaattcttcagcagcagatccaggactccatttgccctccacaaccatcgcctcctctacaggctgcatgcgagaaccagccagcgttgctcactcatcaacttcagagactcagaattcagccctcaagccccccccctaaccacccaaacaaccacctatttcgacagcccagcaacagcccaccgccaatgtctagcgcaatgattcaacctcacggagcagcctcctctagccagtttcagggacttccatcgcggagcgctatcttccagcagcagcctgagaactgctcttccccccccaatgtggccctgacctgtttgggaatgcagcagccagcccagagccagcaggtcaccattcaggttcaggaacccgtcgacatgctgtctaacatgcccggcactgcagctggcagtagcggccgcggtatctctatcagcccctccgccggtcagatgcagatgcagcatagaacaaacctcatggccaccctcagttatggccatagacctctgtcaaagcaactatcggcggactctgcagaagctcatagcgcacaccaacagccaccccactatactaccagcgcccttcagcaagctctgctaagccccacacccccagactatactaggcaccagcaggtgccacatatcctgcagggcttgctgtcgcctcgtcattctttaactggtcactcagacattcgtctcccacccactgagtttgctcagctgatcaagcggcaacagcaacagcgccagcagcaacagcagcaacaacagcaacaggaataccaggagctgtttaggcatatgaaccaaggtgacgcagggtcactcgcaccgagccttggaggccagagtatgactgagaggcaggctctctcttatcagaatgccgatagctaccaccatcatactagcccacaacaccttctgcaaattagagctcaggagtgcgtgtcacaggcttcttcacccacccctccccacgggtacgcccaccagcccgccctgatgcattccgagtccatggaggaagactgctcctgcgagggcgcgaaggatgggtttcaggactctaaatcttctagcacactcaccaaggggtgccatgatagtccgcttttactatcaaccggcgggcccggggatccagaatccctgctaggcaccgtgagccatgcccaggagttagggatccacccctatggtcaccaaccaacagcagcctttagtaaaaacaaagtgccctccagagagcccgtaattggtaactgcatggaccgcagcagccccggccaagctgtggaactcccagatcataatggcctgggataccccgcccgcccatcggttcatgaacaccatcgccccagggcactccagcgccaccatacaatccagaactccgacgacgcctatgtgcagttagataatctacccgggatgtctctcgtggcaggcaaggctctctcaagcgccaggatgagcgacgctgtgctttctcagagttctctcatgggtagccagcagtttcaggatggggaaaacgaagagtgcggtgcctccctgggcgggcatgaacatccggacttatctgatggaagtcagcacttgaacagcagttgttacccttcgacatgcattacagacatcctgctgtcttacaagcatcccgaggtgagcttttctatggagcaggccggcgtgtag

SEQ ID NO: 100135 - DNA, 3612 bp, Artificial Sequence
  derived and/or modified sequence
atgcccgcccggatcggctactacgagatcgaccggaccatcggcaagggcaattttgctgtcgttaaaagagcaactcatctggttactaaagcaaaggtagcaataaaaatcattgataaaactcagcttgatgaggaaaatctgaaaaagatctttcgggaggtgcagattatgaagatgctttgccaccctcacataatcaggctttaccaggtgatggaaaccgaaaggatgatttatctggttaccgagtacgcttctggcggagaaatcttcgatcacctggttgcccatggaaggatggctgagaaagaggcgcggcgcaaatttaaacagatagtaactgcggtgtatttttgccactgcaggaacatcgtccaccgcgatcttaaagccgaaaatctgctcctcgatgctaacctcaacattaaaatagcggacttcggtttttcaaatttgttcactcctggccagctgttgaaaacgtggtgtggatcccccccatatgcggctccggaactgttcgaggggaaggaatacgatggtccgaaagtggacatttggagcctgggagtggtgctgtacgtgctggtttgcggcgcactgcccttcgacgggagcaccctgcagaacctcagggcccgagttctttccgggaagttcagaattcccttttttatgagcacggagtgtgagcatctgattcgtcatatgctggtgcttgaccccaacaagagattgtccatggagcagatctgtaagcacaagtggatgaaattaggagatgccgacccaaatttcgatagactgatcgccgagtgccaacagctgaaagaagagaggcaggttgacccactgaacgaggatgtgcttttggcaatggaagatatgggcctggataaggagcaaaccttgcaagccgaacaggccggaactgccatgaatatcagcgtgccccaggtccagctaataaatcctgaaaatcaaatcgtagagcccgatggaaccctgaacttggattccgatgagggcgaggaacccagcccagaggctctggtgcgctacctgagcatgcgacggcatactgtcggagtggccgatccgcggacggaagtcatggaagacttgcagaaactcttaccaggttttccgggtgtgaacccacaggctccgtttttgcaggtcgccccaaatgtaaatttcatgcataacctcctccccatgcaaaatctccagcccacgggccagctggaatacaaggaacagagcctgctacagccacctactctccagcttttaaatggaatgggccccctggggagacgagcatcagacggcggagcaaatatccagttacatgcgcagcaactgctgaagcgtcccagaggtccctcccccctggtaacaatgaccccagccgtgcccgccgtgacacccgttgacgaggagtcttccgacggagaaccagaccaggaggccgttcagcgttacctcgccaatagatctaagcgtcacactctggctatgaccaacccaacagctgagatccccccagacttgcaaaggcaactaggacagcagcccttcaggagccgcgtgtggcctccgcatcttgtgcctgatcagcataggtcaacatacaaggattcgaatacgctccacctgcccacggaaagatttagtcctgtacggagattcagcgacggtgcagcctccattcaagccttcaaagcgcacctcgagaagatgggcaacaacagcagtataaaacagctgcagcaggagtgcgagcagctccagaaaatgtacggcggtcagatcgacgaacgcaccctcgagaaaacccaacagcagcacatgctctatcaacaggagcaacatcatcaaatcctgcaacaacaaattcaggattcaatctgtcccccgcagcccagtcctcccttgcaagctgcctgtgaaaatcagcccgcccttttaacacaccagctacagaggctcagaattcagccgtcttcaccgcccccaaatcaccccaacaaccatctgtttcgccagcctagcaacagtcctcccccaatgagctctgccatgatacagccgcacggggccgcaagtagttctcagttccaaggtctccctagcagatcggcgatctttcaacagcagcctgaaaactgttccagcccaccaaatgttgccctgacctgcttgggaatgcagcaaccagcccagtcacagcaggtgacaatacaagtgcaagagccagtggacatgttgagcaacatgccgggaactgctgccggatcaagtggccgcggaattagcatctcacccagtgctggccaaatgcaaatgcaacaccgtaccaatctgatggcgactctgagctacggtcaccgcccccttagcaagcaattaagcgctgactctgcggaagcccattctgcccaccagcagccaccgcattacacaaccagtgcattgcagcaggctttgctatcgcctaccccaccagattatactagacatcaacaggtaccccatatcctccaggggctgctctccccaaggcattccttaactgggcatagtgatatccgccttccaccaactgaatttgcccaactcatcaaacggcagcagcagcaacgacagcagcagcagcagcaacaacagcagcaggaatatcaggaactattcaggcacatgaaccagggggatgccggatcgcttgcgccttctctgggcggtcagtccatgaccgaaaggcaggccctgagttatcagaacgccgactcataccaccaccacacatccccacagcatctcctgcaaattcgtgcacaggagtgtgtgagccaagcatctagccccacaccccctcacggatacgctcaccagcccgccttaatgcactccgaatcaatggaggaggactgcagctgcgagggagctaaagatggctttcaggatagcaaatcatcttccacgctgacaaagggctgtcatgattccccattgctgctgagcacagggggccccggagaccccgaaagcctccttgggaccgtttcacatgcccaggagttaggaatacacccatacggtcaccagcccactgccgctttttcgaagaacaaggtgccctcacgggagccagtgattggtaactgcatggacaggtcctctccaggtcaggccgtagagctcccagatcataacggactgggttatcctgcaaggcccagtgtgcacgagcaccatcggcctcgcgctctgcagcgacatcacacgatccagaatagtgatgacgcatacgttcagttagacaatctgccaggaatgagtctggttgctgggaaggctctctccagcgcacgtatgtctgacgctgttctgagtcagtctagccttatgggctctcaacagtttcaggacggcgagaacgaggaatgtggggcgagccttggcggccatgaacacccagacctgtcggatggcagccagcacctgaattcttcttgttatcccagcacatgtattactgacatcctcctcagctacaaacacccggaagtgtcttttagcatggaacaggccggagtctag

SEQ ID NO: 100136 - DNA, 3786 bp, Artificial Sequence
  derived and/or modified sequence
atggccgctgccgctgcctcaggtgcgggaggagctgcgggagccggaactggaggagccggaccggctggacgcctcctaccccctcctgcccctggttcacccgcagcacctgctgcagtgagtcctgcggcagggcaaccaaggcctcccgcacccgcttctagaggtccaatgcccgctaggattgggtactatgagattgatcgcaccataggaaaagggaactttgccgtggtaaagcgcgctacgcacctggtaaccaaagcgaaggtcgcgataaagatcattgataagactcagctcgatgaggagaatctaaagaagatattcagagaggtccagatcatgaaaatgctttgtcaccctcacataatccggttgtaccaagtcatggagacagagcgaatgatctacctcgtgactgaatatgcatctggcggagagatattcgatcatctggtagctcacgggagaatggccgagaaggaggcaagacggaagttcaagcagattgtaacggctgtgtacttttgtcactgtaggaatattgtgcatcgggatctgaaggcagaaaacctgcttctggatgccaacctcaacatcaagatagctgattttgggttttccaacctgttcactcccggacagttgctgaaaacctggtgcggctcacccccatacgcggcaccagagctcttcgagggaaaagaatacgacggacccaaagtggacatctggtccctcggggtggtcctgtacgtacttgtgtgcggggctttgcccttcgacgggtccaccctgcagaacctacgtgcaagggtactgtccggcaaattcagaattcctttttttatgtcaactgagtgtgaacatctgattcgacatatgttagtgttagacccaaataagcgattatctatggagcaaatatgcaaacacaagtggatgaaactgggtgatgccgatcctaactttgatcgccttatcgcggagtgtcagcagctcaaggaggagcgccaagtcgatccacttaacgaagacgtgttgctggcgatggaggacatgggcctggacaaggaacagactttgcaagctgaacaggccggaacagcaatgaatatcagtgttccacaggttcagctgattaacccagagaaccaaatcgtcgaacctgatggaacactgaatctcgatagcgacgagggagaagagccaagccccgaggccctggtccggtatctgagtatgcggagacacacggtgggagtagccgacccaaggacggaggtgatggaggacctgcagaagctgctcccaggtttcccaggggtgaacccccaggctccctttttgcaagtggcccctaatgtgaatttcatgcataatcttcttcctatgcagaatctacagccaacaggacagctggagtataaggaacagagcctgctccaaccacctactttacagctgttgaatgggatggggcctctcggaagaagggcttccgacggcggagcgaacatccagttgcacgctcagcagctgcttaagcggcctaggggcccttcccccctggttaccatgacaccggctgttcctgccgtcacaccggtcgatgaggagtccagcgacggcgagccagatcaagaagccgtccaaagatacctcgctaatcgcagcaagcgccataccctcgcaatgacgaacccaactgcagagattcccccagatctgcagagacaacttgggcagcagcctttcaggagtagggtgtggcctcctcatctagtgcccgaccagcacaggtccacctataaggatagtaataccctgcatttacctaccgaaagattcagtcccgtgcgcaggtttagcgatggtgctgctagtatccaggcctttaaagcacacttagagaagatggggaataacagctcaataaagcagctacagcaagagtgcgagcagctgcaaaagatgtacggcggacagatcgacgaaaggactctagagaaaacacagcaacagcatatgctgtatcaacaggagcagcaccatcaaattctgcagcagcaaattcaagatagtatctgcccgccacagccctcccctccattacaggcagcatgcgagaatcagcccgctctgcttacccaccaactgcaacgactaagaattcaaccctccagtccaccacccaaccacccaaataatcatttgttccgtcagccctctaattctccgcctcctatgtcatcagctatgatccaaccacacggcgcagcctcaagctcacaattccagggacttcccagtcgatccgccattttccaacagcagcccgagaactgcagcagcccccctaatgtagcattaacctgtctggggatgcagcagcccgctcagtctcagcaggtgacaatccaggtgcaagaacctgtggatatgcttagtaacatgccgggtaccgccgctgggtcctccggcagaggtattagcatctccccatctgccggacagatgcagatgcagcacaggacaaatttgatggctactctgtcgtacggacaccggcctctttccaagcaactgagtgccgattcagccgaggcacattccgcccaccaacagcccccacactatacaacgtcagccctgcaacaagcactgcttagccccacaccacctgattacaccagacatcaacaggtcccgcacatattgcaaggactgctgagcccgagacacagcctgacaggccattctgatattagattgccaccgactgaatttgcccagttaattaaaaggcagcagcagcagcgacagcagcagcagcagcagcagcagcagcaagaatatcaagagttattccggcacatgaatcaaggcgatgctggttccctcgccccttcactgggcggtcagtccatgacggaaaggcaggccctttcctatcagaatgcagattcctaccaccaccacacctcccctcaacatctgctgcagattcgcgcacaggaatgtgtaagccaagccagttcccccactccccctcatggttatgcccaccagcccgctctgatgcacagcgagtcgatggaggaggactgtagttgtgagggagctaaagacggcttccaggatagcaaaagttcatccacactgactaaaggctgccacgattcccctctgttgctctcaactgggggacctggggatccagaatccttactcggaacagttagccatgcgcaggaactggggattcatccatacgggcaccagccaactgcggcttttagtaaaaacaaggtcccaagcagagaacccgttattgggaactgcatggataggtcaagccccggacaggcagtggagctgcctgaccacaacgggcttggatatccagcacgccctagcgttcacgagcatcacagaccacgcgctctgcagcggcaccataccatccagaactcagatgacgcttatgtacagttagacaatctccctgggatgtcccttgtcgccggaaaggccctgtcttccgccaggatgagcgacgcagtgttatcccaaagcagcttaatgggtagccaacaatttcaggatggcgagaatgaagaatgtggcgcttccctcgggggtcacgaacatccagatctgtcggacgggagtcagcacctaaactcatcatgttatcccagcacgtgcatcaccgatatcctcctgagctacaagcatcccgaggtctcctttagcatggagcaagcgggagtctag

SEQ ID NO: 100137 - DNA, 3612 bp, Artificial Sequence
  derived and/or modified sequence
atgcccgctcggattgggtattacgaaatcgataggacgattggcaagggtaatttcgccgtggttaaacgagccacgcacttggtcaccaaggcaaaggtggctataaaaattatcgataagactcagctggacgaggaaaatctgaagaaaattttccgcgaggtacagattatgaagatgttatgtcatccacacattattcggttgtaccaagtgatggaaaccgagagaatgatttacctcgttacggagtacgcatcaggaggtgagattttcgaccatctggtggctcacgggaggatggcagaaaaggaggcgaggcgcaagttcaaacagatcgttacagccgtgtacttctgccactgtcggaacatcgtccacagagacttgaaagctgagaatctcctgctagatgccaacctaaacatcaagattgctgactttgggtttagtaacttgtttacccctggccagctgctcaagacctggtgcggctcccccccatacgcagctccagagctgtttgaaggcaaagaatatgatggccctaaggtggacatctggagcctaggggttgtactctacgtcctcgtgtgcggcgctctgccttttgatggaagcaccctgcagaatttgagggccagagtgctgtccggcaaattcaggatccccttttttatgtctacagaatgtgagcatctgataagacatatgttggtcctcgaccctaataaacgactcagcatggaacagatttgcaaacataagtggatgaaactcggggacgccgacccaaacttcgatagactgatcgctgagtgtcaacagctgaaagaagagcgacaggtagaccccctaaatgaggacgttctgctggcgatggaagatatgggcctggataaagagcagaccctgcaggctgaacaggcaggcacagctatgaacatttcagtgccacaggtgcagctgatcaatcccgagaatcagattgtggagcccgacggtacgttgaatttggatagtgacgaaggggaggagccttcaccagaggcgttggtgcggtatctgagtatgagacggcataccgtgggtgtggcggacccacgcaccgaagttatggaggatctccaaaagctcctgccaggattccctggcgtgaatcctcaggcacccttcctacaggttgccccaaacgtgaacttcatgcacaatcttctgccgatgcaaaacttacagccaactggacagctggaatacaaggagcagtccctccttcagcccccaaccctgcaactgcttaacggcatgggacctctgggccgacgagcaagcgacggcggagctaacattcagctacatgctcagcagctcctgaagaggccaagagggccttcccccctggtcaccatgacacccgcagtgcctgctgttactccggttgacgaagagagttcagacggcgaacctgaccaagaggctgtccagcgatatctagccaaccgctctaaacggcacacactcgcgatgaccaatcccaccgctgaaatcccccctgacctgcaacgacagttgggccagcagcccttccggtctagagtctggcctcctcacttggtgcctgaccaacatcgtagtacgtacaaggattctaataccctgcaccttcccaccgaacgctttagccccgtgcggcgattcagcgacggcgcagcgtccatccaggcttttaaggctcacctagaaaagatgggcaataatagtagtatcaagcagctccagcaggaatgcgagcagttgcagaagatgtacggaggacaaattgatgagagaactctggagaagacgcaacagcaacacatgttgtaccagcaagaacaacaccaccagatcctccagcagcaaatacaggatagtatctgccccccacagccttctccccctcttcaggctgcttgcgagaatcagccagcactgttgacccatcagctacaacgtttaaggattcagccaagttctccacctcccaaccacccaaataatcatctcttcagacaaccatccaattcacctccaccaatgagctccgctatgatccagccccacggagccgcaagcagctcccagttccaaggcttgccaagccgatctgctattttccagcaacagccggagaactgttccagtcccccaaacgtggcactgacatgtctcggtatgcagcaacctgcacagtcgcagcaggtgacaatccaggtgcaggaaccggtggacatgctgagtaacatgccaggcaccgcagccggatcgtcaggtcggggtattagtattagcccctctgccggtcagatgcaaatgcagcatcgtacaaacctaatggccacactgagctatggacatagaccactgagtaagcaactgagcgcagactctgcagaggcgcatagcgcccatcagcagcccccacactacaccacctcagcacttcaacaagcactactgtctccaacacccccagattataccagacaccaacaggtcccgcacattctccagggcctgctgagccccaggcacagtctcaccgggcattctgacattcggctgccgcctacagagtttgcacagctcatcaaaaggcagcagcagcagaggcagcagcagcaacagcaacagcagcagcaggagtatcaagagttgtttcgtcacatgaatcagggcgatgcagggagccttgccccatccctcggcggacagagtatgaccgaacgccaagccctgagctatcagaacgctgactcgtatcaccatcacaccagccctcagcacttgctccaaatccgggcacaggaatgtgtcagtcaggccagctccccaactcccccacacggctatgcccatcaacctgctctgatgcactctgaatctatggaggaggactgttcttgcgaaggcgcaaaagacgggtttcaggatagtaagtcaagctctaccctgaccaaaggctgccacgactcacccctcttactgagtaccggtggtcctggggatccggagtctctgcttggcacagtgagccacgcccaggagttgggaatccatccctatggtcaccaaccgaccgcagctttctcaaagaataaggtgcccagtcgggaaccagttattggcaactgcatggaccgctcgagtccgggtcaggccgtcgagctccctgaccacaacgggctgggatacccggcaagaccgtctgtccacgaacaccacaggccccgtgctctgcaacggcatcatactatacaaaattctgatgatgcatacgttcagctggacaatctgccaggaatgtcattggttgctggtaaggccctatcttccgcacggatgtcagatgcagtcttgagccaatctagcctcatgggttctcagcagttccaagacggcgagaatgaagaatgtggagccagcttaggaggacacgaacaccccgatttgagcgatggtagtcaacaccttaactcatcctgctacccgtccacatgtatcacagatattttgctgtcttataaacacccagaagtgagcttcagcatggaacaggccggagtttag

SEQ ID NO: 100138 - DNA, 3858 bp, Artificial Sequence
  derived and/or modified sequence
ggaggtttcactgcacaacaagatggcggcggcggcggcgagcggagctggcggggctgccggggccgggactgggggagccgggcccgcgggccgcctgctgcctccgcccgcgccggggtccccagccgcccccgctgccgtgtcccctgcggccggccagccgcgtcccccagccccggcctcccgcggacccatgcccgcccgtatcggctactacgagatcgaccgcaccatcggcaagggcaacttcgcggtggtcaagcgggccacgcacctcgtcaccaaggccaaggttgctatcaagatcatagataagacccagctggatgaagaaaacttgaagaagattttccgggaagttcaaattatgaagatgctttgccacccccatatcatcaggctctaccaggttatggagacagaacggatgatttatctggtgacagaatatgctagtggaggggaaatatttgaccacctggtggcccatggtagaatggcagaaaaggaggcacgtcggaagttcaaacagatcgtcacagctgtctatttttgtcactgtcggaacattgttcatcgtgatttaaaagctgaaaatttacttctggatgccaatctgaatatcaaaatagcagattttggtttcagtaacctcttcactcctgggcagctgctgaagacctggtgtggcagccctccctatgctgcacctgaactctttgaaggaaaagaatatgatgggcccaaagtggacatctggagccttggagttgtcctctacgtgcttgtgtgcggtgccctgccatttgatggaagcacactgcagaatctgcgggcccgcgtgctgagtggaaagttccgcatcccattttttatgtccacagaatgtgagcatttgatccgccatatgttggtgttagatcccaataagcgcctctccatggagcagatctgcaagcacaagtggatgaagctaggggacgccgatcccaactttgacaggttaatagctgaatgccaacaactaaaggaagaaagacaggtggaccccctgaatgaggatgtcctcttggccatggaggacatgggactggacaaagaacagacactgcaggcggagcaggcaggtactgctatgaacatcagcgttccccaggtgcagctgatcaacccagagaaccaaattgtggagccggatgggacactgaatttggacagtgatgagggtgaagagccttcccctgaagcattggtgcgctatttgtcaatgaggaggcacacagtgggtgtggctgacccacgcacggaagttatggaagatctgcagaagctcctacctggctttcctggagtcaacccccaggctccattcctgcaggtggcccctaatgtgaacttcatgcacaacctgttgcctatgcaaaacttgcaaccaaccgggcaacttgagtacaaggagcagtctctcctacagccgcccacgctacagctgttgaatggaatgggcccccttggccggagggcatcagatggaggagccaacatccaactgcatgcccagcagctgctgaagcgcccacggggaccctctccgcttgtcaccatgacaccagcagtgccagcagttacccctgtggacgaggagagctcagacggggagccagaccaggaagctgtgcagaggtacttggcaaataggtccaaaagacatacactggccatgaccaaccctacagctgagatcccaccggacctacaacggcagctaggacagcagcctttccgttcccgggtctggcctcctcacctggtacctgatcagcatcgctctacctacaaggactccaacactctgcacctccctacggagcgtttctcccctgtgcgccggttctcagatggggctgcgagcatccaggccttcaaagctcacctggaaaaaatgggcaacaacagcagcatcaaacagctgcagcaggagtgtgagcagctgcagaagatgtacggggggcagattgatgaaagaaccctggagaagacccagcagcagcatatgttataccagcaggagcagcaccatcaaattctccagcaacaaattcaagactctatctgtcctcctcagccatctccacctcttcaggctgcatgtgaaaatcagccagccctccttacccatcagctccagaggttaaggattcagccttcaagcccaccccccaaccaccccaacaaccatctcttcaggcagcccagtaatagtcctccccccatgagcagtgccatgatccagcctcacggggctgcatcttcttcccagtttcaaggcttaccttcccgcagtgcaatctttcagcagcaacctgagaactgttcctctcctcccaacgtggcactaacctgcttgggtatgcagcagcctgctcagtcacagcaggtcaccatccaagtccaagagcctgttgacatgctcagcaacatgccaggcacagctgcaggctccagtgggcgcggcatctccatcagccccagtgctggtcagatgcagatgcagcaccgtaccaacctgatggccaccctcagctatgggcaccgtcccttgtccaagcagctgagtgctgacagtgcagaggctcacagtgcacatcagcagccgccacactataccacgtcggcactacagcaggccctgctgtctcccacgccgccagactatacaagacaccagcaggtaccccacatccttcaaggactgctttctccccggcattcgctcaccggccactcggacatccggctgcccccaacagagtttgcacagctcattaaaaggcagcagcaacaacggcagcagcagcagcaacagcagcaacagcaagaataccaggaactgttcaggcacatgaaccaaggggatgcggggagtctggctcccagccttgggggacagagcatgacagagcgccaggctttatcttatcaaaatgctgactcttatcaccatcacaccagcccccagcatctgctacaaatcagggcacaagaatgtgtctcacaggcttcctcacccaccccgccccacgggtatgctcaccagccggcactgatgcattcagagagcatggaggaggactgctcgtgtgagggggccaaggatggcttccaagacagtaagagttcaagtacattgaccaaaggttgccatgacagccctctgctcttgagtaccggtggacctggggaccctgaatctttgctaggaactgtgagtcatgcccaagaattggggatacatccctatggtcatcagccaactgctgcattcagtaaaaataaggtgcccagcagagagcctgtcatagggaactgcatggatagaagttctccaggacaagcagtggagctgccggatcacaatgggctcgggtacccagcacgcccctccgtccatgagcaccacaggccccgggccctccagagacaccacacgatccagaacagcgacgatgcttatgtacagctggataacttgccaggaatgagtctcgtggctgggaaagcacttagctctgcccggatgtcggatgcagttctcagtcagtcttcgctcatgggcagccagcagtttcaggatggggaaaatgaggaatgtggggcaagcctgggaggtcatgagcacccagacctgagtgatggcagccagcatttaaactcctcttgctatccatctacgtgtattacagacattctgctcagctacaagcaccccgaagtctccttcagcatggagcaggcaggcgtgtaacaagaaacagagagttttgtgtacagcttgggaatgaaaaggttgattgt

SEQ ID NO: 100139 - DNA, 3700 bp, Artificial Sequence
  derived and/or modified sequence
cagccgcgtcccccagccccggcctcccgcggacccatgcccgcccgtatcggctactacgagatcgaccgcaccatcggcaagggcaacttcgcggtggtcaagcgggccacgcacctcgtcaccaaggccaaggttgctatcaagatcatagataagacccagctggatgaagaaaacttgaagaagattttccgggaagttcaaattatgaagatgctttgccacccccatatcatcaggctctaccaggttatggagacagaacggatgatttatctggtgacagaatatgctagtggaggggaaatatttgaccacctggtggcccatggtagaatggcagaaaaggaggcacgtcggaagttcaaacagatcgtcacagctgtctatttttgtcactgtcggaacattgttcatcgtgatttaaaagctgaaaatttacttctggatgccaatctgaatatcaaaatagcagattttggtttcagtaacctcttcactcctgggcagctgctgaagacctggtgtggcagccctccctatgctgcacctgaactctttgaaggaaaagaatatgatgggcccaaagtggacatctggagccttggagttgtcctctacgtgcttgtgtgcggtgccctgccatttgatggaagcacactgcagaatctgcgggcccgcgtgctgagtggaaagttccgcatcccattttttatgtccacagaatgtgagcatttgatccgccatatgttggtgttagatcccaataagcgcctctccatggagcagatctgcaagcacaagtggatgaagctaggggacgccgatcccaactttgacaggttaatagctgaatgccaacaactaaaggaagaaagacaggtggaccccctgaatgaggatgtcctcttggccatggaggacatgggactggacaaagaacagacactgcaggcggagcaggcaggtactgctatgaacatcagcgttccccaggtgcagctgatcaacccagagaaccaaattgtggagccggatgggacactgaatttggacagtgatgagggtgaagagccttcccctgaagcattggtgcgctatttgtcaatgaggaggcacacagtgggtgtggctgacccacgcacggaagttatggaagatctgcagaagctcctacctggctttcctggagtcaacccccaggctccattcctgcaggtggcccctaatgtgaacttcatgcacaacctgttgcctatgcaaaacttgcaaccaaccgggcaacttgagtacaaggagcagtctctcctacagccgcccacgctacagctgttgaatggaatgggcccccttggccggagggcatcagatggaggagccaacatccaactgcatgcccagcagctgctgaagcgcccacggggaccctctccgcttgtcaccatgacaccagcagtgccagcagttacccctgtggacgaggagagctcagacggggagccagaccaggaagctgtgcagaggtacttggcaaataggtccaaaagacatacactggccatgaccaaccctacagctgagatcccaccggacctacaacggcagctaggacagcagcctttccgttcccgggtctggcctcctcacctggtacctgatcagcatcgctctacctacaaggactccaacactctgcacctccctacggagcgtttctcccctgtgcgccggttctcagatggggctgcgagcatccaggccttcaaagctcacctggaaaaaatgggcaacaacagcagcatcaaacagctgcagcaggagtgtgagcagctgcagaagatgtacggggggcagattgatgaaagaaccctggagaagacccagcagcagcatatgttataccagcaggagcagcaccatcaaattctccagcaacaaattcaagactctatctgtcctcctcagccatctccacctcttcaggctgcatgtgaaaatcagccagccctccttacccatcagctccagaggttaaggattcagccttcaagcccaccccccaaccaccccaacaaccatctcttcaggcagcccagtaatagtcctccccccatgagcagtgccatgatccagcctcacggggctgcatcttcttcccagtttcaaggcttaccttcccgcagtgcaatctttcagcagcaacctgagaactgttcctctcctcccaacgtggcactaacctgcttgggtatgcagcagcctgctcagtcacagcaggtcaccatccaagtccaagagcctgttgacatgctcagcaacatgccaggcacagctgcaggctccagtgggcgcggcatctccatcagccccagtgctggtcagatgcagatgcagcaccgtaccaacctgatggccaccctcagctatgggcaccgtcccttgtccaagcagctgagtgctgacagtgcagaggctcacagtgcacatcagcagccgccacactataccacgtcggcactacagcaggccctgctgtctcccacgccgccagactatacaagacaccagcaggtaccccacatccttcaaggactgctttctccccggcattcgctcaccggccactcggacatccggctgcccccaacagagtttgcacagctcattaaaaggcagcagcaacaacggcagcagcagcagcaacagcagcaacagcaagaataccaggaactgttcaggcacatgaaccaaggggatgcggggagtctggctcccagccttgggggacagagcatgacagagcgccaggctttatcttatcaaaatgctgactcttatcaccatcacaccagcccccagcatctgctacaaatcagggcacaagaatgtgtctcacaggcttcctcacccaccccgccccacgggtatgctcaccagccggcactgatgcattcagagagcatggaggaggactgctcgtgtgagggggccaaggatggcttccaagacagtaagagttcaagtacattgaccaaaggttgccatgacagccctctgctcttgagtaccggtggacctggggaccctgaatctttgctaggaactgtgagtcatgcccaagaattggggatacatccctatggtcatcagccaactgctgcattcagtaaaaataaggtgcccagcagagagcctgtcatagggaactgcatggatagaagttctccaggacaagcagtggagctgccggatcacaatgggctcgggtacccagcacgcccctccgtccatgagcaccacaggccccgggccctccagagacaccacacgatccagaacagcgacgatgcttatgtacagctggataacttgccaggaatgagtctcgtggctgggaaagcacttagctctgcccggatgtcggatgcagttctcagtcagtcttcgctcatgggcagccagcagtttcaggatggggaaaatgaggaatgtggggcaagcctgggaggtcatgagcacccagacctgagtgatggcagccagcatttaaactcctcttgctatccatctacgtgtattacagacattctgctcagctacaagcaccccgaagtctccttcagcatggagcaggcaggcgtgtaacaagaaacagagagttttgtgtacagcttgggaatgaaaaggttgattgtaa

SEQ ID NO: 100140 - protein, 1004 aa, Artificial Sequence
  derived and/or modified sequence
MRGSGPRGAGRRRPPSGGGDTPITPASLAGCYSAPRRAPLWTCLLLCAALRTLLASPSNEVNLLDSRTVMGDLGWIAFPKNGWEEIGEVDENYAPIHTYQVCKVMEQNQNNWLLTSWISNEGASRIFIELKFTLRDCNSLPGGLGTCKETFNMYYFESDDQNGRNIKENQYIKIDTIAADESFTELDLGDRVMKLNTEVRDVGPLSKKGFYLAFQDVGACIALVSVRVYYKKCPSVVRHLAVFPDTITGADSSQLLEVSGSCVNHSVTDEPPKMHCSAEGEWLVPIGKCMCKAGYEEKNGTCQVCRPGFFKASPHIQSCGKCPPHSYTHEEASTSCVCEKDYFRRESDPPTMACTRPPSAPRNAISNVNETSVFLEWIPPADTGGRKDVSYYIACKKCNSHAGVCEECGGHVRYLPRQSGLKNTSVMMVDLLAHTNYTFEIEAVNGVSDLSPGARQYVSVNVTTNQAAPSPVTNVKKGKIAKNSISLSWQEPDRPNGIILEYEIKYFEKDQETSYTIIKSKETTITAEGLKPASVYVFQIRARTAAGYGVFSRRFEFETTPVSVAASSDQSQIPVIAVSVTVGVILLAVVIGVLLSGSCCECGCGRASSLCAVAHPSLIWRCGYSKAKQDPEEEKMHFHNGHIKLPGVRTYIDPHTYEDPNQAVHEFAKEIEASCITIERVIGAGEFGEVCSGRLKLPGKRELPVAIKTLKVGYTEKQRRDFLGEASIMGQFDHPNIIHLEGVVTKSKPVMIVTEYMENGSLDTFLKKNDGQFTVIQLVGMLRGISAGMKYLSDMGYVHRDLAARNILINSNLVCKVSDFGLSRVLEDDPEAAYTTRGGKIPIRWTAPEAIAFRKFTSASDVWSYGIVMWEVVSYGERPYWEMTNQDVIKAVEEGYRLPSPMDCPAALYQLMLDCWQKERNSRPKFDEIVNMLDKLIRNPSSLKTLVNASCRVSNLLAEHSPLGSGAYRSVGEWLEAIKMGRYTEIFMENGYSSMDAVAQVTLE

SEQ ID NO: 100141 - DNA, 3015 bp, Artificial Sequence
  derived and/or modified sequence
atgcggggctcgggcccaaggggcgccggccggcgcagacccccttcagggggcggggacacgcctatcactcccgcttctttggcgggctgctattctgcccctagacgggctcccctgtggacatgtcttctcctgtgcgccgctctgcggacactactggcttccccatctaacgaagttaacttactggactctagaactgttatgggggacttgggttggatcgcctttcctaaaaacggctgggaagagatcggagaggtcgatgagaactacgctccaatccatacataccaagtgtgcaaggtgatggagcaaaatcagaacaactggctgctgacttcctggatttctaacgagggcgcaagccggatttttatcgagctgaagttcactttgagggattgcaactctttgcctgggggcctgggaacatgcaaagagacatttaacatgtattactttgagtctgatgatcaaaatggaagaaacattaaagagaaccagtacatcaaaatcgacaccattgccgctgacgaatcttttaccgaactggatctgggggatagagtgatgaagttaaacacagaagtacgagacgtcggccctctgagcaaaaagggcttctatctggctttccaggacgtgggggcctgcatcgctcttgtctcagtgcgcgtttactataagaaatgcccaagtgtcgtgcgccacctcgcggttttccccgatacaataacgggcgctgacagttcacaactgctggaagtttctggcagttgtgtgaaccatagtgtaaccgacgaacccccaaaaatgcactgcagcgctgaaggggaatggctggtcccaattggcaaatgcatgtgcaaggctggctatgaagagaagaacgggacttgccaggtgtgtaggcctggcttttttaaggcctcaccgcacatccaaagctgcggcaaatgtccccctcattcttacacacacgaggaagctagcacttcatgcgtgtgcgagaaagattacttccgcagggagtcggacccaccgaccatggcatgcacccggccgcccagcgcaccaaggaatgcaatctccaatgtgaacgaaactagtgtgtttctggaatggatcccccctgctgacaccggaggacgcaaggacgtctcttactacattgcgtgcaagaaatgtaattcccacgctggagtgtgcgaagaatgtggcggccacgtcaggtacttgcctcggcagtctggcctgaaaaataccagtgtgatgatggtagacttactcgctcatacaaattatactttcgagattgaggccgtgaatggcgtgtccgacctcagccctggagcccgccagtatgtgtccgtcaatgtgactaccaatcaggcagctccatcgccggtgaccaatgtcaagaaaggaaaaattgctaagaattccatatcgctcagctggcaagagccagaccgcccaaacgggatcatcctggaatacgaaattaagtatttcgaaaaagaccaggaaacatcatatactatcatcaagtctaaggagaccactatcacagccgaaggattaaagcctgcatctgtatacgtctttcaaatccgcgccaggaccgccgcaggatatggagttttttcaagacggtttgaatttgagacgacacctgtgagtgttgctgcctcttctgaccagagccagatacctgtcatcgccgtgtctgtcaccgttggcgtgatcctgttggccgtggtgattggcgtgctgttgagtgggagctgctgtgagtgtggctgtggaagggcgtcaagtctctgcgctgtggcacatccatctcttatatggcgctgcgggtacagtaaggccaaacaggatcccgaggaagagaagatgcactttcataatgggcatataaagctgccaggcgtgcgcacttacatcgatcctcatacatatgaggaccctaaccaggcagtccatgaattcgcaaaggaaatcgaggcatcttgtataaccatcgaacgcgtcattggagcaggagaatttggggaggtttgcagcggaaggcttaaactacccgggaagagagagttgcccgtggctattaaaaccctaaaagtcgggtacaccgagaagcaacgcagggactttctcggagaggcaagtattatgggacaatttgaccatccaaatatcattcaccttgagggtgtggtaacaaaatctaagccggtcatgattgtgacagaatacatggagaatggatccctcgataccttcttgaagaagaatgatggccagtttaccgttattcaactggtgggcatgctccggggaattagcgcgggtatgaaatacctgtctgacatgggatatgtgcatcgcgatctcgcagccagaaacattctgattaactccaacctggtttgtaaggtgtccgacttcggactgagtcgggttctggaggatgacccagaagccgcgtacactacgagaggtggcaagatcccaatccgatggactgccccagaggctatagccttccgtaagtttacgagcgcttccgatgtatggagttacgggatagtgatgtgggaggtagtgtcctacggggaacggccgtactgggaaatgactaaccaggatgtgatcaaggccgttgaggaagggtacaggctgccaagccccatggattgccccgcagccctctatcaactgatgctcgactgttggcagaaagagagaaattcaaggcctaagtttgatgagatagtgaacatgctcgataagctgattcggaacccatcaagcttgaagactctggtcaacgcttcatgtagagtcagtaatttactcgctgagcatagcccgttgggtagtggtgcataccgctcagtcggagagtggctggaggctattaagatggggcggtacacggaaatcttcatggaaaatggctatagttcgatggacgccgtcgcacaggtcacactggaatag

SEQ ID NO: 100142 - DNA, 3015 bp, Artificial Sequence
  derived and/or modified sequence
atgaggggcagcggccccagaggagctggaagaagaagaccacccagcggcggcggggacacccccatcaccccagccagcctggccggctgctacagcgccccccggcgggcccccctgtggacctgcctgctgctgtgtgccgccctgcggaccctgctggccagccccagcaatgaggtgaacctgctggacagcaggacagtgatgggagacctgggctggatcgccttccccaagaatggctgggaggagatcggggaggtggatgaaaattatgcccccatccacacctaccaggtgtgcaaggtgatggagcagaaccagaacaactggctgctgacctcctggatcagcaatgaaggagccagccgcatcttcatcgagctgaagttcaccctgcgggactgcaacagcctgcccggcggcctgggcacctgcaaggagaccttcaacatgtactactttgaaagtgatgaccagaatggaagaaacatcaaggagaaccagtacatcaagattgacaccatcgctgctgatgagagcttcacagagctggacctgggggacagagtgatgaagctgaacacagaggtgagagatgtgggccccctgagcaagaagggcttctacctggccttccaggatgtgggcgcctgcatcgccctggtgtctgtgcgggtgtactacaagaagtgccccagcgtggtgcgccacctggccgtgtttcctgacaccatcaccggggctgacagcagccagctgctggaggtgtctggcagctgtgtgaaccacagcgtgacagatgagccccccaagatgcactgcagcgctgagggggagtggctggtgcccatcggcaagtgcatgtgcaaggccggctatgaggagaagaatggcacctgccaggtgtgcaggcctggcttcttcaaggccagcccccacatccagagctgtgggaaatgtcctccccacagctacacccatgaggaggccagcaccagctgtgtgtgtgagaaggactacttccggcgggagagtgacccccccaccatggcctgcaccaggcctccttctgcccccagaaatgccatcagcaatgtgaatgagaccagcgtcttcctggagtggatccccccagctgacacaggaggcaggaaggatgtgtcctactacatcgcctgcaagaagtgcaacagccacgccggcgtgtgtgaagaatgtggcggccacgtgcgctacctgccccggcagagcggcctgaagaacacctctgtgatgatggtggacctgctggcccacaccaactacacctttgaaattgaagctgtgaatggagtgtctgacctgagccctggggcccggcagtatgtgtctgtgaatgtgaccaccaaccaggccgcccccagccctgtgaccaacgtgaagaagggcaagatcgccaagaacagcatcagcctgtcctggcaggagccagaccggcccaacggcatcatcctggagtatgagatcaagtactttgagaaggaccaggagaccagctacaccatcatcaagagcaaggagaccaccatcacagctgagggcctgaagccagcctctgtgtatgtgttccagatccgggccaggacagctgctggctacggcgtcttcagcagaagatttgaatttgagaccacccctgtgtctgtggccgccagcagtgaccagagccagatccctgtgattgctgtgtctgtgacagtgggcgtcatcctgctggccgtggtgattggagtgctgctgagcggcagctgctgtgaatgtggctgcggccgggccagcagcctgtgtgctgtggcccaccccagcctcatctggaggtgtggctacagcaaggccaagcaggaccctgaggaggagaagatgcacttccacaacggccacatcaagctgcccggggtgaggacctacatcgacccccacacctatgaggaccccaaccaggccgtgcatgaatttgccaaggagattgaggccagctgcatcaccatcgagagggtcatcggggccggggagtttggagaggtgtgcagcggccgcctgaagctgcccgggaagcgggagctgcctgtggccatcaagaccctgaaggtgggctacacagagaagcagaggcgggacttcctgggggaggccagcatcatgggccagtttgaccaccccaacatcatccacctggagggcgtggtgaccaagagcaagcctgtgatgattgtgacagagtacatggagaatggcagcctggacaccttcctgaagaagaatgatggccagttcaccgtcatccagctggtgggcatgctgcggggcatctctgctggcatgaagtacctgagtgacatgggctacgtgcaccgggacctggccgccaggaacatcctgatcaacagcaacctggtgtgcaaggtgtctgactttggcctgagccgggtgctggaggatgatcctgaggccgcctacaccacccggggcggcaagatccccatccgctggacagcccctgaggccatcgccttcaggaagttcaccagcgccagtgatgtgtggagctatggaattgtgatgtgggaggtggtgtcctatggagagcggccctactgggagatgaccaaccaggatgtgatcaaggctgtggaggagggctaccgcctgcccagccccatggactgcccagctgccctgtaccagctgatgctggactgctggcagaaggagaggaacagccggcccaagtttgatgaaattgtgaacatgctggacaagctgatccggaaccccagcagcctgaagaccctggtgaatgccagctgccgggtgagcaacctgctggccgagcacagccccctgggcagcggggcctacagatctgtgggggagtggctggaggccatcaagatgggccgctacacagagatcttcatggagaatggctacagctccatggatgctgtggcccaggtgaccctggagtag

SEQ ID NO: 100143 - DNA, 3015 bp, Artificial Sequence
  derived and/or modified sequence
atgcggggcagcggcccccggggcgccggccggcggcggcccccctccgggggaggcgacactccaattacccctgctagcctagctgggtgctattctgctcccaggcgggcgcccctttggacctgcttattgctgtgtgcagcactccgaaccctacttgcgagtccaagcaacgaggtcaacctcctggacagcagaacagtaatgggagatttggggtggattgcttttcctaaaaacggttgggaggaaatcggcgaagtggacgaaaattacgcacccatccacacataccaggtctgcaaggtaatggagcagaaccagaataattggcttctgacttcttggatttccaacgagggcgcaagcaggatttttattgaactcaagtttacccttagggactgtaacagtttacctggaggtctgggaacatgcaaggagacattcaacatgtactattttgagtccgacgatcagaacggccgtaatatcaaggagaaccaatacataaaaattgatacaatcgccgccgatgagtcgttcacagaactggaccttggtgacagagtcatgaagctcaacaccgaagtccgggacgtcggccctctgagcaagaagggtttctatctggcgtttcaggatgtgggcgcttgtattgcactggtttccgtgcgggtctattataagaaatgcccttctgtggtcagacatttagccgtgtttcctgataccatcacaggcgcggatagctctcagttgctcgaagtgtctggtagctgtgtcaaccatagcgtgacggatgaacccccaaagatgcactgcagtgctgagggggaatggctggtgcccatcggtaaatgcatgtgcaaagcggggtatgaagaaaaaaacggaacttgtcaggtctgcagaccaggcttctttaaagcctcgccccacattcagagttgcggcaagtgcccaccacactcctatactcatgaagaggccagtacctcctgtgtttgcgaaaaggattattttcggagggaaagcgatcctccgactatggcctgtacccgtccacctagtgcccccaggaacgcaatctccaatgtgaatgaaacatccgtgtttctggaatggatcccgcccgctgacacaggcggacgaaaagatgtttcctattacattgcttgcaaaaagtgtaactcgcacgcgggcgtgtgcgaggagtgtggggggcatgtacggtaccttcctcgacagagcggcctgaagaatacttccgtgatgatggtggacttgctcgcgcacacaaactacactttcgaaattgaggcagtcaatggcgtgtccgacctttcgccaggagcacgccagtacgtttctgtcaacgtaacaaccaaccaggccgctccatccccagtgaccaacgtgaaaaaaggtaagatagccaaaaacagcatttcattgtcctggcaggagcccgatagacctaacgggatcattcttgaatacgagattaaatatttcgaaaaggaccaggagacgagttatacaatcattaaatctaaggagacgacaatcaccgcagaaggtctcaaacctgcctctgtgtacgttttccagattagggccaggacagcagctggttatggtgtattctccaggcgctttgaatttgagacgacgccggtgtctgtcgccgcatcaagtgaccagtcgcagattcccgtgattgcggtcagcgtgactgtgggcgtcattttgctggccgttgtgattggagtgctcctgtctggctcgtgttgtgaatgtggctgcggccgcgcaagttccctttgcgcagttgctcatccttccctgatttggagatgtggttacagcaaggcaaagcaagatccggaagaggagaaaatgcatttccacaacggacatattaagctgcccggtgttagaacatatatcgatccacacacctatgaagatccaaaccaagcggtacatgagttcgctaaagagatcgaagctagttgtatcacaattgagcgggtgattggcgccggtgagttcggagaagtgtgttccgggcgcttgaaacttccaggcaaaagagagctccctgtggcaataaagactttaaaagttgggtacactgagaaacagcgacgcgacttcctgggtgaggcatctataatgggtcagttcgaccacccaaatatcattcacctggaaggggtcgtaacaaagagtaagcctgtgatgatcgtcactgaatacatggaaaacggatccttggacacctttctcaaaaaaaatgatggacagttcaccgtgattcagttagttggaatgctgcgtgggataagcgcaggcatgaagtacctcagcgacatgggatacgtccatagggatttggcagcaaggaacattttaatcaatagcaacctggtatgcaaagtctcagacttcggactgtcacgcgtgctggaggacgatccagaagccgcgtacactacacgcggtggtaagatacccatccgttggacagcccctgaggcaatcgcttttcggaagttcacatcggcaagcgacgtttggtcctacggcattgtgatgtgggaggtcgtgtcttacggggaaaggccctactgggaaatgacaaaccaagatgtgattaaagcagtagaagaaggttatcgactgccatcacccatggactgccccgccgctctttaccaactgatgctcgattgctggcaaaaagaaaggaatagcagaccaaaatttgatgaaattgttaacatgctggacaagctcattaggaatccttcctcactgaagacgctggtgaacgcttcttgccgcgttagcaacctgcttgcggagcacagcccccttggatcaggtgcataccgttctgtgggagaatggctggaggcaatcaaaatggggaggtacactgagatcttcatggagaatggttactcgtcaatggacgcagtggctcaggtgactctggagtag

SEQ ID NO: 100144 - DNA, 3015 bp, Artificial Sequence
  derived and/or modified sequence
atgagaggcagcggccctaggggagccggacgccgacgaccaccatctggaggaggtgacacgcccatcacgcctgccagccttgcaggctgttacagtgcacccaggcgagcccctttgtggacctgcttattattgtgcgccgcactcagaaccttactcgcctccccatccaacgaagtgaatctgctcgacagtagaaccgtgatgggagacttggggtggatagcgttccctaaaaatggatgggaggagatcggtgaggtggacgaaaattatgcaccaatccacacctaccaggtgtgtaaggtgatggagcagaatcaaaacaattggcttctgacctcatggattagtaatgagggcgctagccggattttcattgaattgaagttcacactgcgggactgcaattccctccccggaggtctgggaacttgcaaggagacgtttaacatgtattattttgagtctgatgaccaaaacggaaggaatattaaggagaaccagtacatcaagatcgacacaatcgctgcagatgagtctttcactgaactggatctgggggatcgggtcatgaagctgaatacggaggtgagggacgtgggtcccctgtccaagaagggattctacctcgctttccaagatgttggcgcatgtattgccctggtctccgtgcgggtctattacaaaaaatgtccaagtgtggtcaggcacctcgcggtgttccccgacaccatcaccggggctgatagctcacagctcctggaagtgtcaggtagttgcgtgaatcatagcgtcacagatgagccacccaagatgcattgttcagcagaaggggagtggctagtgcccataggaaagtgcatgtgtaaagcgggttatgaggagaaaaatggaacatgccaagtgtgtcgaccaggcttcttcaaagcaagcccgcacatacagagttgcggcaagtgtcctccccattcctacacacacgaggaagcgagcacctcatgtgtctgcgaaaaggactacttcagaagagaaagcgatccccctacaatggcttgcacacgtcctccatcagccccacgcaatgccatctccaacgtgaatgagactagcgtcttcttagaatggatcccaccggctgacaccggcggtcgcaaagatgtgtcttactatattgcctgcaagaaatgcaacagccacgcgggagtgtgtgaggagtgcggaggtcacgtccgctatctgccacgccaatcaggcctgaagaataccagcgttatgatggtggatcttttagcccatactaattatactttcgagatagaggcagtcaacggtgtctccgatttgtcacccggtgctcggcagtatgttagcgtgaatgtgacgaccaaccaagctgccccttcccctgttactaacgtgaagaaaggaaagatcgcgaagaattcaatctctttgtcctggcaggagccagatcggccaaatggcatcatcttagaatacgaaattaagtacttcgagaaggaccaggagacctcctacactattattaaaagcaaggaaaccaccattaccgctgagggactgaagcccgcttccgtctacgtattccagatccgtgctcgcactgctgccggatacggcgtgttctccaggcggtttgaattcgaaacaacgcccgtatcggtggctgcaagctcagatcaatctcagattcctgtgatagcagtgagcgtgaccgtaggcgtgattcttttggctgtggtgatcggcgtgcttctgtctggatcctgttgtgagtgcggctgtggcagagccagcagtctctgtgctgtggcacatccatcactaatctggagatgcgggtattccaaagccaagcaagacccggaggaggaaaagatgcatttccacaacgggcatataaaactgccaggggtgcggacgtatatcgatccacacacttacgaggatcccaatcaagccgtgcacgagttcgcaaaggaaatcgaggcaagctgcataactatagaacgggtaatcggcgctggtgaatttggggaagtgtgctcaggcagactcaagctgcccggtaaacgcgaactccccgtagccatcaaaactctgaaggtaggatacacggaaaagcagagacgagatttcctgggggaggctagtattatgggacaatttgatcaccccaatatcattcacctggagggcgttgtgaccaagagcaagcccgtcatgatcgttaccgaatatatggaaaacggcagcctggacacttttctaaagaagaacgacggccagtttactgtgattcagctggtggggatgctaagaggtatcagtgctggaatgaagtatctcagcgacatgggatacgttcatagggacctggccgctagaaacatcttgattaactctaatcttgtttgcaaggtgtctgacttcggattatcacgagtgctcgaggacgatcccgaggccgcatacaccacccggggtggcaaaatcccaatcaggtggacagctcctgaggccatcgccttccgcaaattcaccagcgccagtgacgtgtggtcatacgggatcgtgatgtgggaggttgtgagttacggcgaacggccatactgggaaatgaccaaccaggacgttatcaaggcggtagaggaaggctatcggttgccctccccaatggattgtccagccgcactgtaccaattgatgcttgattgttggcagaaagaaagaaatagccgccctaagtttgacgaaatcgttaacatgctagataaacttatccgaaatccaagttccctgaagaccctggtgaacgcatcctgtcgggtgtctaacttattagccgagcactcacctctggggtccggggcatatcgctcagtgggtgagtggttggaagctatcaagatgggcaggtacactgaaatcttcatggaaaacggatactctagcatggacgccgtagcccaggttacgctggaatag

SEQ ID NO: 100145 - DNA, 3015 bp, Artificial Sequence
  derived and/or modified sequence
atgagaggcagcggccccagaggcgccggcagaagaagaccccccagcggcggcggcgacacccccatcacccccgccagcctggccggctgctacagcgcccccagaagagcccccctgtggacctgcctgctgctgtgcgccgccctgagaaccctgctggccagccccagcaacgaggtgaacctgctggacagcagaaccgtgatgggcgacctgggctggatcgccttccccaagaacggctgggaggagatcggcgaggtggacgagaactacgcccccatccacacctaccaggtgtgcaaggtgatggagcagaaccagaacaactggctgctgaccagctggatcagcaacgagggcgccagcagaatcttcatcgagctgaagttcaccctgagagactgcaacagcctgcccggcggcctgggcacctgcaaggagaccttcaacatgtactacttcgagagcgacgaccagaacggcagaaacatcaaggagaaccagtacatcaagatcgacaccatcgccgccgacgagagcttcaccgagctggacctgggcgacagagtgatgaagctgaacaccgaggtgagagacgtgggccccctgagcaagaagggcttctacctggccttccaggacgtgggcgcctgcatcgccctggtgagcgtgagagtgtactacaagaagtgccccagcgtggtgagacacctggccgtgttccccgacaccatcaccggcgccgacagcagccagctgctggaggtgagcggcagctgcgtgaaccacagcgtgaccgacgagccccccaagatgcactgcagcgccgagggcgagtggctggtgcccatcggcaagtgcatgtgcaaggccggctacgaggagaagaacggcacctgccaggtgtgcagacccggcttcttcaaggccagcccccacatccagagctgcggcaagtgccccccccacagctacacccacgaggaggccagcaccagctgcgtgtgcgagaaggactacttcagaagagagagcgacccccccaccatggcctgcaccagaccccccagcgcccccagaaacgccatcagcaacgtgaacgagaccagcgtgttcctggagtggatcccccccgccgacaccggcggcagaaaggacgtgagctactacatcgcctgcaagaagtgcaacagccacgccggcgtgtgcgaggagtgcggcggccacgtgagatacctgcccagacagagcggcctgaagaacaccagcgtgatgatggtggacctgctggcccacaccaactacaccttcgagatcgaggccgtgaacggcgtgagcgacctgagccccggcgccagacagtacgtgagcgtgaacgtgaccaccaaccaggccgcccccagccccgtgaccaacgtgaagaagggcaagatcgccaagaacagcatcagcctgagctggcaggagcccgacagacccaacggcatcatcctggagtacgagatcaagtacttcgagaaggaccaggagaccagctacaccatcatcaagagcaaggagaccaccatcaccgccgagggcctgaagcccgccagcgtgtacgtgttccagatcagagccagaaccgccgccggctacggcgtgttcagcagaagattcgagttcgagaccacccccgtgagcgtggccgccagcagcgaccagagccagatccccgtgatcgccgtgagcgtgaccgtgggcgtgatcctgctggccgtggtgatcggcgtgctgctgagcggcagctgctgcgagtgcggctgcggcagagccagcagcctgtgcgccgtggcccaccccagcctgatctggagatgcggctacagcaaggccaagcaggaccccgaggaggagaagatgcacttccacaacggccacatcaagctgcccggcgtgagaacctacatcgacccccacacctacgaggaccccaaccaggccgtgcacgagttcgccaaggagatcgaggccagctgcatcaccatcgagagagtgatcggcgccggcgagttcggcgaggtgtgcagcggcagactgaagctgcccggcaagagagagctgcccgtggccatcaagaccctgaaggtgggctacaccgagaagcagagaagagacttcctgggcgaggccagcatcatgggccagttcgaccaccccaacatcatccacctggagggcgtggtgaccaagagcaagcccgtgatgatcgtgaccgagtacatggagaacggcagcctggacaccttcctgaagaagaacgacggccagttcaccgtgatccagctggtgggcatgctgagaggcatcagcgccggcatgaagtacctgagcgacatgggctacgtgcacagagacctggccgccagaaacatcctgatcaacagcaacctggtgtgcaaggtgagcgacttcggcctgagcagagtgctggaggacgaccccgaggccgcctacaccaccagaggcggcaagatccccatcagatggaccgcccccgaggccatcgccttcagaaagttcaccagcgccagcgacgtgtggagctacggcatcgtgatgtgggaggtggtgagctacggcgagagaccctactgggagatgaccaaccaggacgtgatcaaggccgtggaggagggctacagactgcccagccccatggactgccccgccgccctgtaccagctgatgctggactgctggcagaaggagagaaacagcagacccaagttcgacgagatcgtgaacatgctggacaagctgatcagaaaccccagcagcctgaagaccctggtgaacgccagctgcagagtgagcaacctgctggccgagcacagccccctgggcagcggcgcctacagaagcgtgggcgagtggctggaggccatcaagatgggcagatacaccgagatcttcatggagaacggctacagcagcatggacgccgtggcccaggtgaccctggagtag

SEQ ID NO: 100146 - DNA, 5176 bp, Artificial Sequence
  derived and/or modified sequence
ccagacacagcaggagcgcgccttggcggtgcagtttcaacctcgacttcgcagccgcgcacacaccgcctgctccccgagcagcgggaaccgcagcagctcctgggccgccgcagcgcagctccgcgctcctaccggccggcagccgtcagtccctcccctcttcagcactcagcccgcagctatttccttctgccagtctctttgaactctggatctttgcttttgctcgctgctctcctgtttttcattctccacattttctcaagtcctctttctttatccttagccaccctgcttttttcctccttttttaaaaaatcggagatttcgtcttaaaatgatttgccttccttaccttcgtccatttcaacactgaaggctgcaaagaaccttcacctttcccctagtggtatttaaaaattctcaatccgtaaaaagtctttttgaaaggcaaaggaacaggacccaggaccctctcgacacccttgatccgagtccagatctgcactagcaaccagaactaatatttcatttaaccccaccaaagggggaggcgagaggagccagaagcaaacttcagctgtctcagccggatccgtggttcctacatttggaggagccgcgtgccagaaggcgtaggaccccaaggggggacaaggaggactcccgagtctcccttcgccgctctgcgaggccgaagcggtggactgagccgctcgggacagcggcaccggaggaggctcggagaagatgcggggctcggggccccggggtgcgggacgccggcggcccccaagcggcggcggcgacacccccatcaccccagcgtccctggccggctgctactctgcacctcgacgggctcccctctggacgtgccttctcctgtgcgccgcactccggaccctcctggccagccccagcaacgaagtgaatttattggattcacgcactgtcatgggggacctgggatggattgcttttccaaaaaatgggtgggaagagattggtgaagtggatgaaaattatgcccctatccacacataccaagtatgcaaagtgatggaacagaatcagaataactggcttttgaccagttggatctccaatgaaggtgcttccagaatcttcatagaactcaaatttaccctgcgggactgcaacagccttcctggaggactggggacctgtaaggaaacctttaatatgtattactttgagtcagatgatcagaatgggagaaacatcaaggaaaaccaatacatcaaaattgataccattgctgccgatgaaagctttacagaacttgatcttggtgaccgtgttatgaaactgaatacagaggtcagagatgtaggacctctaagcaaaaagggattttatcttgcttttcaagatgttggtgcttgcattgctctggtttctgtgcgtgtatactataaaaaatgcccttctgtggtacgacacttggctgtcttccctgacaccatcactggagctgattcttcccaattgctcgaagtgtcaggctcctgtgtcaaccattctgtgaccgatgaacctcccaaaatgcactgcagcgccgaaggggagtggctggtgcccatcgggaaatgcatgtgcaaggcaggatatgaagagaaaaatggcacctgtcaagtgtgcagacctgggttcttcaaagcctcacctcacatccagagctgcggcaaatgtccacctcacagttatacccatgaggaagcttcaacctcttgtgtctgtgaaaaggattatttcaggagagagtctgatccacccacaatggcatgcacaagacccccctctgctcctcggaatgccatctcaaatgttaatgaaactagtgtctttctggaatggattccgcctgctgacactggtggaaggaaagacgtgtcatattatattgcatgcaagaagtgcaactcccatgcaggtgtgtgtgaggagtgtggcggtcatgtcaggtaccttccccggcaaagcggcctgaaaaacacctctgtcatgatggtggatctactcgctcacacaaactatacctttgagattgaggcagtgaatggagtgtccgacttgagcccaggagcccggcagtatgtgtctgtaaatgtaaccacaaatcaagcagctccatctccagtcaccaatgtgaaaaaagggaaaattgcaaaaaacagcatctctttgtcttggcaagaaccagatcgtcccaatggaatcatcctagagtatgaaatcaagtattttgaaaaggaccaagagaccagctacacgattatcaaatctaaagagacaactattactgcagagggcttgaaaccagcttcagtttatgtcttccaaattcgagcacgtacagcagcaggctatggtgtcttcagtcgaagatttgagtttgaaaccaccccagtgtcagttgcagcatccagcgatcaaagccagattcctgtaattgctgtgtctgtgacagtgggagtcattttgttggcagtggttatcggcgtcctcctcagtggaagttgctgcgaatgtggctgtgggagggcttcttccctgtgcgctgttgcccatccaagcctaatatggcggtgtggctacagcaaagcaaaacaagatccagaagaggaaaagatgcattttcataatgggcacattaaactgccaggagtaagaacttacattgatccacatacctatgaggatcccaatcaagctgtccacgaatttgctaaggagatagaagcatcatgtatcaccattgagagagttattggagcaggtgaatttggtgaagtttgtagtggacgtttgaaactaccaggaaaaagagaattacctgtggctatcaaaacccttaaagtaggctatactgaaaagcaacgcagagatttcctaggtgaagcaagtatcatgggacagtttgatcatcctaacatcatccatttagaaggtgtggtgaccaaaagtaaaccagtgatgatcgtgacagagtatatggagaatggctctttagatacatttttgaagaaaaacgatgggcagttcactgtgattcagcttgttggcatgctgagaggtatctctgcaggaatgaagtacctttctgacatgggctatgtgcatagagatcttgctgccagaaacatcttaatcaacagtaaccttgtgtgcaaagtgtctgactttggactttcccgggtactggaagatgatcccgaggcagcctacaccacaaggggaggaaaaattccaatcagatggactgccccagaagcaatagctttccgaaagtttacttctgccagtgatgtctggagttatggaatagtaatgtgggaagttgtgtcttatggagagagaccctactgggagatgaccaatcaagatgtgattaaagcggtagaggaaggctatcgtctgccaagccccatggattgtcctgctgctctctatcagttaatgctggattgctggcagaaagagcgaaatagcaggcccaagtttgatgaaatagtcaacatgttggacaagctgatacgtaacccaagtagtctgaagacgctggttaatgcatcctgcagagtatctaatttattggcagaacatagcccactaggatctggggcctacagatcagtaggtgaatggctagaggcaatcaagatgggccggtatacagagattttcatggaaaatggatacagttcaatggacgctgtggctcaggtgaccttggagtgagtaatttttctgataatttttacataattgctggggcaagaaaaattgttcaaaaaccaatctggatgaggtaagggaaatcagttaacctttgcggatgtgtggcagctctcaaagaagcctcatcatctttagcctgtattgttaacaactgcatggttaatgctacatgtggccagtatctttgcttctttgcttcaaacaaataacattggcatacttgaataattggaataacagctccttggcaaaatactggtgttttgtgttgtggaaaagatgttttcttgacaagtttttttatactggtatctatgttatatgaatgtaaatacaaaacaaaataaactgtaagcacaattggtgtggctagtcctacataaggaccaaacatatttgtacattttggctctctacgatgaatatcaaggtaacagtagcttaaacaaagcttccctggcaggatctcatttaatttctaaatggtgcaccttacattctttcaatctaaggatgtatcagatcccgcctctgatttgttatttggtacaatctcagtggaaccaattgtgcccttttctgtttgcacgtttaagataaaatttatcaaaccttattaaataaaaatcactagagttaaatattaagttctttaaggttgtaagttgtttgtattttattatatactctgtacatgtggttgttttagcctaattgttatttgtgaaaattaactgtctttatggtggttccatctagattacattaacattaatgttttaacctgtgaatataatgataacttacttcaaattacctgccaattcaaaggttaaaatattgtaaggtttagaaaatggtagaatattctgaagcactaaaccatagttgttattttatttgtacacatgatatgaacattgagcagttcttgctcacccatctctattattctgacattctttgattcattgaattcattgttcctccccacagaaggtaacagggtaccaccatttatcaccaattaatgtcacattctcagcattctcttccttcataccgataactaaaaggacctgaaaccaaccactcagcttgctttctaaatttactgaatctcattctcacggtccaccagatcatatctacttgataacacatatgctttgtccattatttctttggacactcaaggaacccatttgtgctatatttaaactggtatactgaaaaatttactgataatttaaaactatttttacatgattgctatttaatttttcagtaaaaatggtcattttaatttattaaagtcatttgtcattttatattaaaatgatattgtaggtatttcttctacccaatgtcagattacttgtaaatatataataaaattatttgcatt

SEQ ID NO: 100147 - DNA, 75 bp, Artificial Sequence
  derived and/or modified sequence
atggacatcagcaccagaagcaaggaccccggcagcgccgagagaaccgcccagaagagaaagttccccagctag

SEQ ID NO: 100148 - DNA, 129 bp, Artificial Sequence
  derived and/or modified sequence
atggacatcagcaccagaagcaaggaccccggcagcgccgagagaaccgcccagaagagaaagttccccagccccccccacagcagcaacggccacagcccccaggacaccagcaccagccccatctag

SEQ ID NO: 100149 - DNA, 75 bp, Artificial Sequence
  derived and/or modified sequence
atggacatctcgacccgatccaaagatccaggttcagctgaaaggacagcccagaaacgcaagttcccatcatag

SEQ ID NO: 100150 - DNA, 129 bp, Artificial Sequence
  derived and/or modified sequence
atggacatctctacacggtctaaggatccggggtctgcagagcggactgcacaaaagcgcaagttcccttcgccaccacattctagcaacggccacagtcctcaggacaccagcacaagcccaatctag

SEQ ID NO: 100151 - DNA, 75 bp, Artificial Sequence
  derived and/or modified sequence
atggacatcagcaccaggagcaaggaccccggcagcgctgagaggacagcccagaagaggaagttccccagctag

SEQ ID NO: 100152 - DNA, 129 bp, Artificial Sequence
  derived and/or modified sequence
atggacatcagcaccaggagcaaggaccccggcagcgctgagaggacagcccagaagaggaagttccccagccccccccacagcagcaatggccacagcccccaggacaccagcaccagccccatctag

SEQ ID NO: 100153 - DNA, 75 bp, Artificial Sequence
  derived and/or modified sequence
atggacatcagcacccggagcaaggaccccggcagcgccgagcggaccgctcagaagcgaaagtttccgtcctag

SEQ ID NO: 100154 - DNA, 129 bp, Artificial Sequence
  derived and/or modified sequence
atggacatcagcacccggagcaaggaccccggcagcgccgagcggacggcccagaaacgcaaatttccgtctcctccccattcaagcaatggccacagcccacaggacacaagcacttcccccatctag

SEQ ID NO: 100155 - DNA, 75 bp, Artificial Sequence
  derived and/or modified sequence
atggacatcagtactaggagcaaggacccagggagcgcagaacgtaccgcccaaaaacgaaaatttccttcctag

SEQ ID NO: 100156 - DNA, 129 bp, Artificial Sequence
  derived and/or modified sequence
atggatatctccactcggtccaaagatccgggtagcgccgagcgcactgcgcagaagcggaaattcccatcaccccctcatagcagtaatggacactcaccacaggacacatccactagtcccatttag

SEQ ID NO: 100157 - DNA, 341 bp, Artificial Sequence
  derived and/or modified sequence
tttaggaaggtggctttgaaactcgcagggctgcttaaacaagagctacagctattgaacaaactgctaccattttagcttcaacacaggaatgaggcagtgttgccagacgccattttaagaatcctgcataaatagcttagctaccgatgactctgcctgttttagcttggctgaagaggaaataaaaacagaacaggaggtggtagagggcatggatatctctactcgctccaaagatcctggctctgcagagagaacagcccagaaaagaaagttccccagccctccacattcttccaatggccactcgccgcaggacacatcaacaagccccatta

SEQ ID NO: 100158 - protein, 1186 aa, Artificial Sequence
  derived and/or modified sequence
MFSSLQKSFNLAEEEIKTEQEVVEGMDISTRSKDPGSAERTAQKRKFPSPPHSSNGHSPQDTSTSPIKKKKKPGLLNSNNKEQDGRNDFYCWVCHREGQVLCCELCPRVYHAKCLRLTSEPEGDWFCPECEKITVAECIETQSKAMTMLTIEQLSYLLKFAIQKMKQPGTDAFQKPVPLEQHPDYAEYIFHPMDLCTLEKNAKKKMYGCTEAFLADAKWILHNCIIYNGGNHKLTQIAKVVIKICEHEMNEIEVCPECYLAACQKRDNWFCEPCSNPHPLVWAKLKGFPFWPAKALRDKDGQVDARFFGQHDRAWVPINNCYLMSKEIPFSVKKTKSIFNSAMQEMEVYVENIRRKFGVFNYSPFRTPYTPNSQYQMLLDPTNPSAGTAKIDKQEKVKLNFDMTASPKILMSKPVLSGGTGRRISLSDMPRSPMSTNSSVHTGSDVEQDAEKKATSSHFSASEESMDFLDKSTASPASTKTGQAGSLSGSPKPFSPQLSAPITTKTDKTSTTGSILNLNLDRSKAEMDLKELSESVQQQSTPVPLISPKRQIRSRFQLNLDKTIESCKAQLGINEISEDVYTAVEHSDSEDSEKSDSSDSEYISDDEQKSKNEPEDTEDKEGCQMDKEPSAVKKKPKPTNPVEIKEELKSTSPASEKADPGAVKDKASPEPEKDFSEKAKPSPHPIKDKLKGKDETDSPTVHLGLDSDSESELVIDLGEDHSGREGRKNKKEPKEPSPKQDVVGKTPPSTTVGSHSPPETPVLTRSSAQTSAAGATATTSTSSTVTVTAPAPAATGSPVKKQRPLLPKETAPAVQRVVWNSSSKFQTSSQKWHMQKMQRQQQQQQQQNQQQQPQSSQGTRYQTRQAVKAVQQKEITQSPSTSTITLVTSTQSSPLVTSSGSMSTLVSSVNADLPIATASADVAADIAKYTSKMMDAIKGTMTEIYNDLSKNTTGSTIAEIRRLRIEIEKLQWLHQQELSEMKHNLELTMAEMRQSLEQERDRLIAEVKKQLELEKQQAVDETKKKQWCANCKKEAIFYCCWNTSYCDYPCQQAHWPEHMKSCTQSATAPQQEADAEVNTETLNKSSQGSSSSTQSAPSETASASKEKETSAEKSKESGSTLDLSGSRETPSSILLGSNQGSDHSRSNKSSWSSSDEKRGSTRSDHNTSTSTKSLLPKESRLDTFWD

SEQ ID NO: 100159 - protein, 42 aa, Artificial Sequence
  derived and/or modified sequence
MDISTRSKDPGSAERTAQKRKFPSPPHSSNGHSPQDTSTSPI

SEQ ID NO: 100160 - DNA, 3561 bp, Artificial Sequence
  derived and/or modified sequence
atgttcagcagcctgcagaagagcttcaacctggccgaggaggagatcaagaccgagcaggaggtggtggagggcatggacatcagcaccagaagcaaggaccccggcagcgccgagagaaccgcccagaagagaaagttccccagccccccccacagcagcaacggccacagcccccaggacaccagcaccagccccatcaagaagaagaagaagcccggcctgctgaacagcaacaacaaggagcaggacggcagaaacgacttctactgctgggtgtgccacagagagggccaggtgctgtgctgcgagctgtgccccagagtgtaccacgccaagtgcctgagactgaccagcgagcccgagggcgactggttctgccccgagtgcgagaagatcaccgtggccgagtgcatcgagacccagagcaaggccatgaccatgctgaccatcgagcagctgagctacctgctgaagttcgccatccagaagatgaagcagcccggcaccgacgccttccagaagcccgtgcccctggagcagcaccccgactacgccgagtacatcttccaccccatggacctgtgcaccctggagaagaacgccaagaagaagatgtacggctgcaccgaggccttcctggccgacgccaagtggatcctgcacaactgcatcatctacaacggcggcaaccacaagctgacccagatcgccaaggtggtgatcaagatctgcgagcacgagatgaacgagatcgaggtgtgccccgagtgctacctggccgcctgccagaagagagacaactggttctgcgagccctgcagcaacccccaccccctggtgtgggccaagctgaagggcttccccttctggcccgccaaggccctgagagacaaggacggccaggtggacgccagattcttcggccagcacgacagagcctgggtgcccatcaacaactgctacctgatgagcaaggagatccccttcagcgtgaagaagaccaagagcatcttcaacagcgccatgcaggagatggaggtgtacgtggagaacatcagaagaaagttcggcgtgttcaactacagccccttcagaaccccctacacccccaacagccagtaccagatgctgctggaccccaccaaccccagcgccggcaccgccaagatcgacaagcaggagaaggtgaagctgaacttcgacatgaccgccagccccaagatcctgatgagcaagcccgtgctgagcggcggcaccggcagaagaatcagcctgagcgacatgcccagaagccccatgagcaccaacagcagcgtgcacaccggcagcgacgtggagcaggacgccgagaagaaggccaccagcagccacttcagcgccagcgaggagagcatggacttcctggacaagagcaccgccagccccgccagcaccaagaccggccaggccggcagcctgagcggcagccccaagcccttcagcccccagctgagcgcccccatcaccaccaagaccgacaagaccagcaccaccggcagcatcctgaacctgaacctggacagaagcaaggccgagatggacctgaaggagctgagcgagagcgtgcagcagcagagcacccccgtgcccctgatcagccccaagagacagatcagaagcagattccagctgaacctggacaagaccatcgagagctgcaaggcccagctgggcatcaacgagatcagcgaggacgtgtacaccgccgtggagcacagcgacagcgaggacagcgagaagagcgacagcagcgacagcgagtacatcagcgacgacgagcagaagagcaagaacgagcccgaggacaccgaggacaaggagggctgccagatggacaaggagcccagcgccgtgaagaagaagcccaagcccaccaaccccgtggagatcaaggaggagctgaagagcaccagccccgccagcgagaaggccgaccccggcgccgtgaaggacaaggccagccccgagcccgagaaggacttcagcgagaaggccaagcccagcccccaccccatcaaggacaagctgaagggcaaggacgagaccgacagccccaccgtgcacctgggcctggacagcgacagcgagagcgagctggtgatcgacctgggcgaggaccacagcggcagagagggcagaaagaacaagaaggagcccaaggagcccagccccaagcaggacgtggtgggcaagaccccccccagcaccaccgtgggcagccacagcccccccgagacccccgtgctgaccagaagcagcgcccagaccagcgccgccggcgccaccgccaccaccagcaccagcagcaccgtgaccgtgaccgcccccgcccccgccgccaccggcagccccgtgaagaagcagagacccctgctgcccaaggagaccgcccccgccgtgcagagagtggtgtggaacagcagcagcaagttccagaccagcagccagaagtggcacatgcagaagatgcagagacagcagcagcagcagcagcagcagaaccagcagcagcagccccagagcagccagggcaccagataccagaccagacaggccgtgaaggccgtgcagcagaaggagatcacccagagccccagcaccagcaccatcaccctggtgaccagcacccagagcagccccctggtgaccagcagcggcagcatgagcaccctggtgagcagcgtgaacgccgacctgcccatcgccaccgccagcgccgacgtggccgccgacatcgccaagtacaccagcaagatgatggacgccatcaagggcaccatgaccgagatctacaacgacctgagcaagaacaccaccggcagcaccatcgccgagatcagaagactgagaatcgagatcgagaagctgcagtggctgcaccagcaggagctgagcgagatgaagcacaacctggagctgaccatggccgagatgagacagagcctggagcaggagagagacagactgatcgccgaggtgaagaagcagctggagctggagaagcagcaggccgtggacgagaccaagaagaagcagtggtgcgccaactgcaagaaggaggccatcttctactgctgctggaacaccagctactgcgactacccctgccagcaggcccactggcccgagcacatgaagagctgcacccagagcgccaccgccccccagcaggaggccgacgccgaggtgaacaccgagaccctgaacaagagcagccagggcagcagcagcagcacccagagcgcccccagcgagaccgccagcgccagcaaggagaaggagaccagcgccgagaagagcaaggagagcggcagcaccctggacctgagcggcagcagagagacccccagcagcatcctgctgggcagcaaccagggcagcgaccacagcagaagcaacaagagcagctggagcagcagcgacgagaagagaggcagcaccagaagcgaccacaacaccagcaccagcaccaagagcctgctgcccaaggagagcagactggacaccttctgggactag

SEQ ID NO: 100161 - DNA, 3561 bp, Artificial Sequence
  derived and/or modified sequence
atgttttcctctctccagaagtcatttaatctggccgaagaggaaattaagactgaacaagaagttgtggaaggcatggacattagcacccggtctaaggacccaggcagcgccgaaagaacggcacagaagcgcaagttcccatcccccccccactcgagcaacggccactcaccacaggacaccagcacttcacccataaaaaagaaaaaaaagcctggcctgctgaattctaataacaaggagcaggatggaagaaacgatttttactgttgggtgtgtcatcgagagggtcaggttctctgttgcgagctttgccccagggtgtatcacgctaaatgtctccggctgacgtcagaacccgagggggattggttttgtcccgaatgcgagaagatcaccgttgcagagtgtatcgaaacccaatctaaggccatgaccatgttaaccatcgagcagctctcttacttgcttaaatttgccatccagaaaatgaagcagccaggtactgatgctttccaaaagccagtcccgctggaacaacaccctgattatgcagaatatatattccaccctatggacttgtgcacactcgagaaaaatgcgaagaaaaaaatgtacgggtgtacagaagcctttctggcagatgcaaaatggatcctgcacaactgtatcatctataacggaggaaatcataagctcacacaaattgccaaagtggtcattaagatctgcgagcatgaaatgaacgaaatcgaggtgtgcccagaatgttatctcgctgcttgccagaaacgcgataattggttttgcgagccttgctctaatccgcatccccttgtgtgggcgaagctgaaaggtttcccattttggcctgctaaggctcttcgggataaggatgggcaggtcgacgcgcgcttctttggccagcatgaccgagcctgggtgcctataaacaactgctacctgatgtcaaaagaaatccccttctcggtgaagaaaacaaagtccattttcaatagtgccatgcaggaaatggaggtgtatgtggaaaacatcaggaggaaatttggcgtgtttaattatagcccctttcggaccccttatacaccgaattctcagtaccagatgctcctggatcccactaacccgtctgccggcaccgctaagatagacaaacaggagaaagtaaagcttaacttcgatatgaccgcaagccccaagatactcatgtctaagcctgtgttgtctggcggaaccgggaggcggatcagcctgtccgacatgcctaggtctccaatgagcactaatagtagcgtccatacgggatcagacgtggaacaggatgcagagaaaaaggccacctccagccacttttcagctagtgaagagagcatggattttcttgataagagcacagctagccccgcaagtaccaaaaccggacaagctggctcactatctggatcccccaagccctttagtcctcaactaagcgctcccattaccactaaaactgacaagacatctacaacgggaagtatcctcaatctaaatctagaccgtagcaaggccgagatggatttgaaagagctgtcagagagcgtccagcagcagagtactccagtccctctcatctcaccaaagcgccagataaggtctcgattccaactcaacttagacaagacaatcgagagctgcaaggcacaacttggaattaacgagatttctgaagatgtttacactgccgtcgagcactccgattctgaggacagtgagaagtccgatagtagcgatagcgagtacatttcagacgatgagcagaagagcaagaacgagccagaagacactgaggacaaggagggttgccagatggacaaagagccaagcgcagtcaagaagaagccaaaacctactaatcctgtggagatcaaagaagaactaaaatccacatcacctgcttccgaaaaagcggatcctggcgctgtgaaggataaggcttccccagaacccgagaaggatttcagtgagaaggccaagccgagccctcatcctataaaagataagttgaaaggcaaggacgaaacagattcgccaactgttcatttgggactggattccgactccgaatcagaattagtgatagatctcggggaagaccattcgggccgggaaggacgcaaaaataagaaagagccaaaggaaccgtccccaaagcaggacgtcgtgggcaaaactccgccttccaccactgtggggtcacatagccccccagagacacccgtcctgacacgatcttccgcccagacctccgccgctggggccactgcaaccacgagcacaagcagtacggtgacagtgaccgcaccagcgcccgccgccaccggatcaccagtgaagaagcagcggccgctgctcccaaaagagacagcccctgccgtacagcgggttgtgtggaattcttccagtaagtttcagaccagcagccagaagtggcacatgcagaagatgcaacgccagcaacagcagcaacagcaacagaatcagcagcagcagccccagagctcccaggggactcggtaccagacccggcaggccgtgaaagcagtccagcagaaagaaatcacacagagcccttctacgagcacaatcacattggtgacctctacccagagtagtcccttggtcacgtcttccggatctatgtcgactcttgtgtcttctgtgaacgccgacttaccaatcgcaacagcctctgccgatgtggcagccgatatcgccaagtacacctccaaaatgatggacgccatcaaaggaactatgacggaaatctataatgatttgtctaaaaatactaccgggtcaaccatcgctgagattcgaaggttacgaatagagattgaaaaattgcagtggctccaccagcaggagctgtcggaaatgaaacataatctcgagttaactatggctgagatgcgccagtccctggagcaggagcgcgacaggctcattgccgaggtgaaaaagcagctggagttggaaaaacaacaggcagtcgatgagacaaaaaaaaaacagtggtgcgccaactgcaagaaggaggcgatattctattgctgctggaacacaagctattgtgattatccctgtcagcaggcccactggcccgagcatatgaaatcttgtacacagtctgccacggctccccagcaggaggccgacgccgaggtgaatacagaaaccctcaacaagagtagccagggttcttcatccagcactcagtccgctccctcagagaccgcaagtgcttctaaggagaaggaaacctccgccgagaaaagtaaagagtccggcagcaccttggatctctctggatctcgggaaaccccttcctcaatcctgctcggctcaaatcagggcagcgaccacagcaggtccaataaatcctcctggtctagttcagatgagaagcgcggatcaactcggtcagaccataatacaagtacctctacaaagtccttgcttcccaaggagtctcggctggatactttttgggactag

SEQ ID NO: 100162 - DNA, 3561 bp, Artificial Sequence
  derived and/or modified sequence
atgttcagcagcctgcagaagagcttcaacctggccgaggaggagatcaagacagagcaggaggtggtggagggcatggacatcagcaccaggagcaaggaccccggcagcgctgagaggacagcccagaagaggaagttccccagccccccccacagcagcaatggccacagcccccaggacaccagcaccagccccatcaagaagaagaagaagccaggcctgctgaacagcaacaacaaggagcaggacggcagaaatgacttctactgctgggtgtgccaccgggagggccaggtgctgtgctgtgagctgtgcccccgggtgtaccacgccaagtgcctgcggctgaccagcgagcctgagggggactggttctgcccagaatgtgagaagatcaccgtggctgaatgtattgagacccagagcaaggccatgaccatgctgaccatcgagcagctgagctacctgctgaagtttgccatccagaagatgaagcagcccggcacagatgccttccagaagcctgtgcccctggagcagcacccagactatgcagagtacatcttccaccccatggacctgtgcaccctggagaagaatgccaagaagaagatgtatggctgcacagaggccttcctggctgatgccaagtggatcctgcacaactgcatcatctacaacggcggcaaccacaagctgacccagatcgccaaggtggtgatcaagatctgtgaacatgagatgaatgaaattgaggtgtgcccagagtgctacctggccgcctgccagaagagggacaactggttctgtgagccctgcagcaacccccaccccctggtgtgggccaagctgaagggcttccccttctggccagccaaggccctgcgggacaaggatggccaggtggatgcccgcttcttcggccagcacgaccgggcctgggtgcccatcaacaactgctacctgatgagcaaggagatccccttctctgtgaagaagaccaagagcatcttcaacagcgccatgcaggagatggaggtgtatgtggagaacatccggaggaagtttggagtcttcaactacagccccttccgcaccccctacacccccaacagccagtaccagatgctgctggaccccaccaaccccagcgctggaacagccaagattgacaagcaggagaaggtgaagctgaactttgacatgacagccagccccaagatcctgatgagcaagcctgtgctgagcggcggcaccggccgccgcatcagcctgagtgacatgcccaggagccccatgagcaccaacagctctgtgcacacaggcagtgatgtggagcaggatgctgagaagaaggccaccagcagccacttcagcgccagcgaggagagcatggacttcctggacaagagcacagccagccctgccagcaccaagacaggccaggccggcagcctgagcggcagccccaagcccttcagcccccagctgagcgcccccatcaccaccaagacagacaagaccagcaccaccggcagcatcctgaacctgaacctggacaggagcaaggccgagatggacctgaaggagctgtctgagagcgtgcagcagcagagcacccctgtgcccctcatcagccccaagaggcagatccgcagccgcttccagctgaacctggacaagaccatcgagagctgcaaggcccagctgggcatcaatgagatcagtgaagatgtgtacacagctgtggagcacagcgacagcgaggacagcgagaagagtgacagcagtgacagcgagtacatcagtgatgatgagcagaagagcaagaatgaacctgaggacacagaggacaaggagggctgccagatggacaaggagcccagcgctgtgaagaagaagcccaagcccaccaaccctgtggagatcaaggaggagctgaagagcaccagccctgccagcgagaaggctgaccccggggctgtgaaggacaaggccagccctgagcctgagaaggacttcagcgagaaggccaagcccagcccccaccccatcaaggacaagctgaagggcaaggatgaaacagacagccccaccgtgcacctgggcctggacagcgacagcgagagcgagctggtgattgacctgggggaggaccacagcggccgggagggcaggaagaacaagaaggagcccaaggagcccagccccaagcaggatgtggtgggcaagaccccacccagcaccaccgtgggcagccacagccccccagagacccctgtgctgaccaggagcagcgcccagaccagcgctgctggggccacagccaccaccagcaccagcagcacagtgacagtgacagccccagccccagctgccaccggcagccctgtgaagaagcagaggcccctgctgcccaaggagacagccccagctgtgcagagggtggtgtggaacagcagcagcaagttccagaccagcagccagaagtggcacatgcagaagatgcagaggcagcagcagcagcagcagcagcagaaccagcagcagcagccccagagcagccagggcacccgctaccagacccggcaggccgtgaaggctgtgcagcagaaggagatcacccagagccccagcaccagcaccatcaccctggtgaccagcacccagagcagccccctggtgaccagcagcggctccatgagcaccctggtgtcctctgtgaatgctgacctgcccatcgccacagccagcgcagatgtggccgctgacatcgccaagtacaccagcaagatgatggatgccatcaagggcaccatgacagagatctacaatgacctgagcaagaacaccaccggcagcaccatcgccgagatccggcggctgagaattgaaattgagaagctgcagtggctgcaccagcaggagctgtctgagatgaagcacaacctggagctgaccatggccgagatgaggcagagcctggagcaggagcgggaccggctgattgctgaggtgaagaagcagctggagctggagaagcagcaggccgtggatgagaccaagaagaagcagtggtgtgccaactgcaagaaggaggccatcttctactgctgctggaacaccagctactgtgactacccctgccagcaggcccactggccagagcacatgaagagctgcacccagagcgccacagccccccagcaggaggctgatgctgaggtgaacacagagaccctgaacaagagcagccagggcagcagcagcagcacccagagcgcccccagcgagacagccagcgccagcaaggagaaggagaccagcgctgagaagagcaaggagagcggcagcaccctggacctgagcggcagccgggagacccccagcagcatcctgctgggcagcaaccagggcagtgaccacagccgcagcaacaagagctcctggagcagcagtgatgagaagaggggcagcaccaggagtgaccacaacaccagcaccagcaccaagagcctgctgcccaaggagagccggctggacaccttctgggactag

SEQ ID NO: 100163 - DNA, 3561 bp, Artificial Sequence
  derived and/or modified sequence
atgttcagcagcctgcagaagagcttcaacctggccgaggaggagatcaaaacagagcaggaggtcgtggaagggatggacatctctaccaggtccaaggatccaggctctgccgaacgaaccgctcaaaaacggaagtttccatctccgccccatagttccaatgggcattccccgcaggacacatcaacctctcccattaaaaaaaagaagaagcctggactcctgaactctaataataaggagcaggacggacgcaatgacttttactgttgggtgtgccaccgcgaggggcaggtgctgtgttgtgaactgtgccctagggtctaccacgccaagtgtctgaggctcacctccgagccagaaggtgactggttttgcccggaatgtgagaagatcactgtggcagaatgcatcgagacccaatccaaggctatgaccatgctcacaatcgaacaacttagttatcttcttaagtttgcaatccagaagatgaaacagccaggcacagatgccttccagaaacctgtgccccttgaacaacacccagattatgcagaatatatcttccatcccatggatttatgcaccttggaaaaaaacgcaaaaaaaaaaatgtatggctgcacagaagcttttttggctgacgctaaatggatcctgcacaactgcattatatacaacgggggcaatcacaaactgactcagatcgctaaagtggtaataaagatttgtgagcacgagatgaacgagattgaagtctgtcctgaatgttatctggccgcatgtcagaaacgggacaattggttttgcgaaccttgctctaacccccaccccctggtatgggccaagctcaaagggtttcctttttggccagctaaggccttgcgcgacaaggatgggcaagtcgacgcaagattcttcgggcagcatgaccgggcgtgggtgcctatcaacaattgctacctgatgtccaaggagattcctttttctgttaaaaagaccaagagcatttttaacagcgcgatgcaagagatggaagtttacgtcgagaacattaggcggaagttcggggtgttcaactattccccattccgtaccccctacacccctaactctcaatatcaaatgctcctcgatccaacaaatccctccgctggcacggctaaaatcgacaaacaggaaaaagttaagttgaattttgacatgaccgctagcccaaagattttgatgagcaaacccgtactcagcggcgggaccggaagaaggatctctctgtcggacatgccccgttccccaatgagcaccaattcttcagttcacacggggtccgacgttgagcaagacgctgagaaaaaggcgaccagcagtcacttctctgcctctgaggaatcgatggattttttggataagagcaccgcctctcctgcttcaacaaagaccggccaagctggctcactgagtggctcacctaaacctttctctccccagctctccgcccctattactacaaaaaccgacaagacctctacaactggcagcatcctgaacttgaaccttgatagaagtaaagcagaaatggatctgaaggagctcagcgagagcgtccagcaacagagtacccccgtacccctcatctcaccaaaaaggcagatccgttcccggtttcagctgaatctggacaaaactatagagtcctgtaaggctcagctgggaattaacgagatttccgaagacgtatacaccgccgtggagcactctgactccgaagactccgagaaatccgatagctcagatagcgaatatatttctgacgacgagcagaagagcaaaaacgagccagaggataccgaggataaggagggttgccaaatggacaaggagccctccgctgtcaaaaagaaaccaaaaccaacgaatccagttgagatcaaagaagaactcaagagcacaagtccggcatcagagaaagccgatcccggggccgtgaaggacaaggcaagccccgaacctgagaaagactttagtgaaaaggccaagccaagtccacaccctatcaaggacaaactaaagggcaaagacgaaacagactctcccacagtccacttgggattggacagtgactccgagtcagaactagtcatagatctgggggaggatcactcaggaagagaaggtagaaagaataaaaaagaaccgaaggaaccctcccctaagcaggatgtcgtcggcaagacacccccaagtacaaccgtgggcagccactctcctccagagacccccgtgctgacacggagctctgctcagacgtcggcagccggcgccaccgccacaacctctacctcctccacagtgaccgtaacagcacctgcccccgccgccaccgggagcccagtgaaaaaacagaggccattgttgcctaaagagaccgcacctgccgtgcagagagtggtctggaactcctccagcaagttccagactagttcccagaagtggcatatgcagaagatgcagcggcagcagcaacagcagcaacagcagaatcagcagcagcagcctcaaagcagccaaggcaccaggtaccagactagacaagcggtaaaagccgtccagcagaaggagatcactcaatcacccagcaccagtacaatcacactggtgacatccactcaaagcagcccactggtgacctcttccgggagtatgtcaacgctggtcagttctgtgaatgcggaccttcctattgccaccgcaagtgctgatgtggctgcggatattgcgaaatacacatcgaaaatgatggacgccataaagggaacaatgacagagatctacaacgatttatctaaaaacaccacagggagcacaattgctgaaatccgaagactccgcattgagattgagaagttgcagtggctgcaccagcaggagctcagcgaaatgaagcataatctagaattaacaatggctgagatgcgccagtccttagaacaggaaagggacaggctcatcgccgaagtaaaaaaacaactggaacttgagaagcagcaggcagttgacgaaaccaagaaaaagcagtggtgcgctaactgtaaaaaggaagcgatcttttattgttgctggaacacttcttactgtgactatccttgccaacaggcgcactggccagagcacatgaaatcttgcacacagtctgctaccgctccccagcaagaagccgatgccgaagttaacactgagaccctgaacaaaagcagtcaaggttcgtcctcttctacccagtccgcgccatctgagaccgcaagtgcaagcaaagaaaaggagacttcggccgaaaagtccaaggagagcgggagtactcttgatcttagtggcagtagggagaccccctcgagtatattgctggggtcaaaccaaggaagtgaccacagccggtcaaacaagtcatcctggagctcgtccgacgaaaagcgcggctccacccgctctgatcataacacatctacatccaccaaatcattgttaccaaaggagagccggttggacacattttgggactag

SEQ ID NO: 100164 - DNA, 3561 bp, Artificial Sequence
  derived and/or modified sequence
atgtttagctccttgcagaagagctttaatttggcagaagaggaaattaagactgagcaggaagtggtagaagggatggatatctctacccgttctaaggatcccggatctgccgagcgaaccgcccagaaacgcaagtttccatcaccaccacattcatctaatggccacagtcctcaagatacctctaccagcccgattaagaagaagaagaagcccggtctgctcaacagcaataataaggagcaagatgggagaaatgatttctactgttgggtgtgccatcgcgaggggcaggtactttgttgtgaactctgccccagagtgtatcacgccaagtgcctccggctcactagtgaacctgagggggattggttctgccccgagtgcgagaaaattaccgtggcggaatgcatcgagacgcagagtaaagcaatgacaatgctgactatcgaacagctgagttatctgctcaagttcgcgattcaaaaaatgaagcagccaggaacagatgcattccagaaacctgtaccattggaacagcaccctgactatgctgagtatatctttcatccaatggacctctgcaccttggaaaagaatgcaaagaagaaaatgtacggctgtaccgaggctttcctggccgatgctaagtggatactgcacaattgcatcatttacaatggagggaatcataagctgacccagattgctaaagtcgtgattaagatctgcgagcatgaaatgaacgagatcgaggtgtgtccagaatgttatctggccgcttgtcaaaaacgcgataattggttttgcgaaccctgttcaaatccccatccactggtgtgggctaagttgaagggatttccgttttggccagctaaggccctcagagacaaagacgggcaggtcgatgcgcgtttttttggccaacatgaccgagcttgggtgcccattaataactgctaccttatgtctaaggaaattcccttcagtgttaaaaaaacgaagtctatcttcaatagcgcgatgcaggagatggaggtgtacgttgagaacattcggagaaagttcggcgtttttaattacagcccattcagaaccccgtacacgcctaactcccagtaccagatgcttctggacccgacaaatccttccgcgggaacagcgaagatcgataaacaggaaaaggtcaaattgaacttcgacatgacagcctcaccaaaaatccttatgagcaaacccgtgctttcggggggaaccggccgtcgaatttccttgagcgatatgccaagatcgcccatgtcaactaatagcagcgtgcacactggttcggatgtggaacaggacgccgagaaaaaggccacaagcagtcatttcagcgcctcagaggagtctatggatttccttgataagagtacagcttcacccgctagcaccaagacagggcaggccggttccctgtcaggatctcccaaaccattctctcctcagctgtccgccccaatcacaacaaagacagacaaaacgtccactactgggagtatactgaatctaaatttggaccggagcaaggctgagatggacctgaaagagttgagcgagtccgtccaacagcaatcaacccctgtcccccttatcagccctaaacgccaaataaggtcaagatttcagttgaacttggataagaccatcgaaagctgcaaggcacagctcggtatcaacgaaatttcggaggatgtgtataccgccgtcgagcacagcgactctgaagactcagagaagagtgactcctcagactctgaatacatctctgacgacgaacaaaaatcaaaaaatgagcctgaggacaccgaagacaaggagggctgccagatggacaaggaaccatccgcagtgaagaaaaagcctaaaccaactaaccctgtagaaatcaaggaagagctcaaaagtacatcccctgcctccgagaaggcggacccaggcgctgtaaaagacaaagctagccctgaaccagaaaaagatttttccgagaaggccaagccgagtcctcatccgataaaagataagctgaagggcaaagatgagactgattcaccaaccgtgcacttaggccttgactcagatagcgaaagtgagctggtgatagacttgggcgaagaccactccggaagggaaggcagaaaaaacaaaaaggagcctaaggagccctctcctaagcaggatgtggttggaaaaacaccgcctagcaccacagtcgggagtcactcaccccctgagacccccgtcctcacaaggtcatctgcacagaccagtgctgccggagcaacagcaaccacaagtaccagctccaccgtgaccgtgaccgctcccgctcctgccgctaccgggtctccagtgaaaaagcaacggcctctacttcccaaagagacagcgccagctgtgcaaagagttgtgtggaacagcagctccaaatttcagactagctcccaaaaatggcacatgcagaagatgcagcgacagcagcagcaacagcaacagcagaatcagcagcaacagcctcagtcttcacaaggtacgcggtaccagacacgacaagccgtgaaggctgttcaacagaaggagataacccagtcgccctcaacaagcaccataacactggtgacaagcacacaatcttctcccctcgtcacttcatccggtagcatgtctactctggtctctagcgtgaacgcagacttaccaattgccacagccagcgcagacgttgccgcagatattgccaaatacacctctaagatgatggacgccatcaagggtaccatgacagagatctataatgatctttcaaagaacacaaccggatccacaatcgccgagatccgaaggcttcgcatcgaaatagagaagctgcagtggctgcatcagcaggagctctctgagatgaagcacaacctggagctgacaatggctgagatgcgccagtctttggaacaagagcgggatcgattgattgccgaagttaaaaagcagctggaactggagaaacaacaggccgtggacgaaaccaagaagaaacagtggtgcgctaattgcaagaaggaggccattttttattgctgctggaacacctcttattgtgattatccctgccagcaagcgcactggcccgagcacatgaagagctgtacccaaagcgccactgcgcctcagcaggaagctgacgcagaagtgaacacggagacccttaacaaaagctcacaggggtccagctcatctacccaatcagccccttcagaaacagcgtctgcttccaaagagaaggagacctcagccgagaagtcaaaagagagtggatccacattagatctctccggatcaagagagacaccgagtagtatcctgctgggcagtaaccagggcagcgaccactcaagatctaacaaatcatcttggagcagctcagatgaaaaacgcggtagtaccaggagtgaccacaacaccagcacgtcaaccaagagtctgctgccaaaagagtctcggttggacacattctgggattag

SEQ ID NO: 100165 - DNA, 4075 bp, Artificial Sequence
  derived and/or modified sequence
ataagtattgacattacacagtgttaacaatgcatccacagagtcccaaatctgccagcctgttctctcttcctaactgtggaaaaatgagacggttgcttgaacatttgttggcagcattcctgcctgaagtattcagctcctctaggctgttacaagccaaataatggttcccttgaatgcagccttcctccatgatcaatacacctttgaatgttttcatcgctgcagaaatccttcaacttggctgaagaggaaataaaaacagaacaggaggtggtagagggcatggatatctctactcgctccaaagatcctggctctgcagagagaacagcccagaaaagaaagttccccagccctccacattcttccaatggccactcgccgcaggacacatcaacaagccccattaaaaagaaaaagaaacctggcttactgaacagtaacaataaggagcaggatggacggaatgatttctactgctgggtttgtcaccgggaaggccaagtcctttgctgtgagctctgtccccgggtttatcacgctaagtgtctgagactgacatcggaaccagagggggactggttttgtcctgaatgtgagaaaattacagtagcagaatgcatcgagacccagagtaaagccatgacaatgctcaccattgaacagttatcctacctgctcaagtttgccattcagaaaatgaaacagccagggacagatgcattccagaagcccgttccattggaacagcaccctgactatgcggaatacatcttccatccaatggacctttgtacattggaaaagaatgcgaaaaagaaaatgtatggctgcacagaagccttcctggctgatgcaaagtggattttgcacaactgcatcatttataatgggggaaatcacaaattgacgcaaatagcgaaagtagtcatcaaaatctgtgaacatgagatgaatgaaatcgaagtatgtccagaatgttatctagctgcttgccaaaaacgagataactggttttgtgagccttgtagcaatccacatcctttggtctgggccaaactgaaggggtttccattctggcctgcaaaagctctaagggataaagacgggcaggtcgatgcccgattctttggacaacatgacagggcctgggttccaataaataattgctacctcatgtctaaagaaattcctttttctgtgaaaaagactaagagcatcttcaacagtgccatgcaagagatggaggtttacgtggagaacatccgcaggaagtttggggtttttaattactctccatttaggacaccctacacacccaacagccagtatcaaatgctgctcgatcccaccaaccccagcgccggcactgccaagatagacaagcaggagaaggtcaagctcaactttgacatgacggcatcccccaagatcctgatgagcaagcctgtgctgagtgggggcacaggccgccggatttccttgtcggatatgccgcgctcccccatgagcacaaactcttctgtgcacacgggctccgacgtggagcaggatgctgagaagaaggccacgtcgagccacttcagtgcgagcgaggagtccatggacttcctggataagagcacagcttcaccagcctccaccaagacgggacaagcagggagtttatccggcagcccaaagcccttctctcctcaactgtcagctcctatcacgacgaaaacggacaaaacctccaccaccggcagcatcctgaatcttaacctggatcgaagcaaagctgagatggatttgaaggagctgagcgagtcggtccagcaacagtccacccctgttcctctcatctctcccaagcgccagattcgtagcaggttccagctgaatcttgacaagaccatagagagttgcaaagcacaattaggcataaatgaaatctcggaagatgtctatacggccgtagagcacagcgattcggaggattctgagaagtcagatagtagcgatagtgagtatatcagtgatgatgagcagaagtctaagaacgagccagaagacacagaggacaaagaaggttgtcagatggacaaagagccatctgctgttaaaaaaaagcccaagcctacaaacccagtggagattaaagaggagctgaaaagcacgtcaccagccagcgagaaggcagaccctggagcagtcaaggacaaggccagccctgagcctgagaaggacttttccgaaaaggcaaaaccttcacctcaccccataaaggataaactgaagggaaaagatgagacggattccccaacagtccatttgggcctggactctgattcagagagcgaacttgtcatagatttaggagaagaccattctgggcgggagggtcgaaaaaataagaaggaacccaaagaaccatctcccaaacaggatgttgtaggtaaaactccaccatccacgacggtgggcagccattctcccccggaaacaccggtgctcacccgctcttccgcccaaacttccgcggctggcgccacagccaccaccagcacgtcctccacggtcaccgtcacggccccggcccccgccgccacaggaagcccagtgaaaaagcagaggccgcttttaccgaaggagactgccccggccgtgcagcgggtcgtgtggaactcatcaagtaagtttcaaacgtcctcccaaaagtggcacatgcagaagatgcagcgtcagcagcagcagcagcagcagcaaaaccagcagcagcagcctcagtcttcccaggggacgagatatcagaccagacaggctgtgaaagctgtccagcagaaggagatcacacagagcccatccacgtccaccatcaccctggtgaccagcacacagtcatcgcccctggtcaccagctcggggtccatgagcacccttgtgtcctcagtcaacgctgacctgcccatcgccactgcctcagctgatgtcgccgctgatattgccaagtacactagcaaaatgatggatgcaataaaaggaacaatgacagaaatatacaacgatctttctaaaaacactactggaagcacaatagctgagattcgcaggctgaggatcgagatagagaagctccagtggctgcaccagcaagagctctccgaaatgaaacacaacttagagctgaccatggcggagatgcggcagagcctggagcaggagcgggaccggctcatcgccgaggtgaagaagcagctggagttggagaagcagcaggcggtggatgagaccaagaagaagcagtggtgcgccaactgcaagaaggaggccatcttttactgctgttggaacactagctactgtgactacccctgccagcaagcccactggcctgagcacatgaagtcctgcacccagtcagctactgctcctcagcaggaagcggatgctgaggtgaacacagaaacactaaataagtcctcccaggggagctcctcgagcacacaatcagcaccttcagaaacggccagcgcctccaaagagaaggagacgtcagctgagaaaagcaaggagagtggctcgacccttgacctttctggctccagagagacgccctcctccattctcttaggctccaaccaaggctctgaccattcccggagtaataaatccagttggagcagcagtgatgagaagaggggatcgacacgttccgatcacaacaccagtaccagcacgaagagcctcctcccgaaagagtctcggctggacaccttctgggactagcagtgaatcgggacacaaaccacccaccccattgggagaaaaacccagacgccaggaaaagaagaaacaacaaaggcaggagaacagccactttcagacttgaaaatgacaaaaccctcagttgagcctgagcccccggcgcgggggctgctacactacaggacacccagcatcggctttgactgcagactgttcacccacacgagccctgtgcttttggtgtaaataatgtacaatttgtggatgtcattgaatctagaggactttcccctttttatatttgtattaactttaacttatt

SEQ ID NO: 100166 - DNA, 3510 bp, Artificial Sequence
  derived and/or modified sequence
atggacatcagcaccagaagcaaggaccccggcagcgccgagagaaccgcccagaagagaaagttccccagccccccccacagcagcaacggccacagcccccaggacaccagcaccagccccatcaagaagaagaagaagcccggcctgctgaacagcaacaacaaggagcagagcgagctgagacacggccccttctactacatgaagcagcccctgaccaccgaccccgtggacgtggtgccccaggacggcagaaacgacttctactgctgggtgtgccacagagagggccaggtgctgtgctgcgagctgtgccccagagtgtaccacgccaagtgcctgagactgaccagcgagcccgagggcgactggttctgccccgagtgcgagaagatcaccgtggccgagtgcatcgagacccagagcaaggccatgaccatgctgaccatcgagcagctgagctacctgctgaagttcgccatccagaagatgaagcagcccggcaccgacgccttccagaagcccgtgcccctggagcagcaccccgactacgccgagtacatcttccaccccatggacctgtgcaccctggagaagaacgccaagaagaagatgtacggctgcaccgaggccttcctggccgacgccaagtggatcctgcacaactgcatcatctacaacggcggcaaccacaagctgacccagatcgccaaggtggtgatcaagatctgcgagcacgagatgaacgagatcgaggtgtgccccgagtgctacctggccgcctgccagaagagagacaactggttctgcgagccctgcagcaacccccaccccctggtgtgggccaagctgaagggcttccccttctggcccgccaaggccctgagagacaaggacggccaggtggacgccagattcttcggccagcacgacagagcctgggtgcccatcaacaactgctacctgatgagcaaggagatccccttcagcgtgaagaagaccaagagcatcttcaacagcgccatgcaggagatggaggtgtacgtggagaacatcagaagaaagttcggcgtgttcaactacagccccttcagaaccccctacacccccaacagccagtaccagatgctgctggaccccaccaaccccagcgccggcaccgccaagatcgacaagcaggagaaggtgaagctgaacttcgacatgaccgccagccccaagatcctgatgagcaagcccgtgctgagcggcggcaccggcagaagaatcagcctgagcgacatgcccagaagccccatgagcaccaacagcagcgtgcacaccggcagcgacgtggagcaggacgccgagaagaaggccaccagcagccacttcagcgccagcgaggagagcatggacttcctggacaagagcaccgccagccccgccagcaccaagaccggccaggccggcagcctgagcggcagccccaagcccttcagcccccagctgagcgcccccatcaccaccaagaccgacaagaccagcaccaccggcagcatcctgaacctgaacctgggccacagaagcaaggccgagatggacctgaaggagctgagcgagagcgtgcagcagcagagcacccccgtgcccctgatcagccccaagagacagatcagaagcagattccagctgaacctggacaagaccatcgagagctgcaaggcccagctgggcatcaacgagatcagcgaggacgtgtacaccgccgtggagcacagcgacagcgaggacagcgagaagagcgacagcagcgacagcgagtacatcagcgacgacgagcagaagagcaagaacgagcccgaggacaccgaggacaaggagggctgccagatggacaaggagcccagcgccgtgaagaagaagcccaagcccaccaaccccgtggagatcaaggaggagctgaagagcaccagccccgccagcgagaaggccgaccccggcgccgtgaaggacaaggccagccccgagcccgagaaggacttcagcgagaaggccaagcccagcccccaccccatcaaggacaagctgaagggcaaggacgagaccgacagccccaccgtgcacctgggcctggacagcgacagcgagagcgagctggtgatcgacctgggcgaggaccacagcggcagagagggcagaaagaacaagaaggagcccaaggagcccagccccaagcaggacgtggtgggcaagaccccccccagcaccaccgtgggcagccacagcccccccgagacccccgtgctgaccagaagcagcgcccagaccagcgccgccggcgccaccgccaccaccagcaccagcagcaccgtgaccgtgaccgcccccgcccccgccgccaccggcagccccgtgaagaagcagagacccctgctgcccaaggagaccgcccccgccgtgcagagagtggtgtggaacagcagcaccgtgcagcagaaggagatcacccagagccccagcaccagcaccatcaccctggtgaccagcacccagagcagccccctggtgaccagcagcggcagcatgagcaccctggtgagcagcgtgaacgccgacctgcccatcgccaccgccagcgccgacgtggccgccgacatcgccaagtacaccagcaagatgatggacgccatcaagggcaccatgaccgagatctacaacgacctgagcaagaacaccaccggcagcaccatcgccgagatcagaagactgagaatcgagatcgagaagctgcagtggctgcaccagcaggagctgagcgagatgaagcacaacctggagctgaccatggccgagatgagacagagcctggagcaggagagagacagactgatcgccgaggtgaagaagcagctggagctggagaagcagcaggccgtggacgagaccaagaagaagcagtggtgcgccaactgcaagaaggaggccatcttctactgctgctggaacaccagctactgcgactacccctgccagcaggcccactggcccgagcacatgaagagctgcacccagagcgccaccgccccccagcaggaggccgacgccgaggtgaacaccgagaccctgaacaagagcagccagggcagcagcagcagcacccagagcgcccccagcgagaccgccagcgccagcaaggagaaggagaccagcgccgagaagagcaaggagagcggcagcaccctggacctgagcggcagcagagagacccccagcagcatcctgctgggcagcaaccagggcagcgtgagcaagagatgcgacaagcagcccgcctacgcccccaccaccaccgaccaccagccccaccccaactaccccgcccagaagtaccacagcagaagcaacaagagcagctggagcagcagcgacgagaagagaggcagcaccagaagcgaccacaacaccagcaccagcaccaagagcctgctgcccaaggagagcagactggacaccttctgggactag

SEQ ID NO: 100167 - DNA, 3291 bp, Artificial Sequence
  derived and/or modified sequence
tgaaccgaccccgtggacgtggtgccccaggacggcagaaacgacttctactgctgggtgtgccacagagagggccaggtgctgtgctgcgagctgtgccccagagtgtaccacgccaagtgcctgagactgaccagcgagcccgagggcgactggttctgccccgagtgcgagaagatcaccgtggccgagtgcatcgagacccagagcaaggccatgaccatgctgaccatcgagcagctgagctacctgctgaagttcgccatccagaagatgaagcagcccggcaccgacgccttccagaagcccgtgcccctggagcagcaccccgactacgccgagtacatcttccaccccatggacctgtgcaccctggagaagaacgccaagaagaagatgtacggctgcaccgaggccttcctggccgacgccaagtggatcctgcacaactgcatcatctacaacggcggcaaccacaagctgacccagatcgccaaggtggtgatcaagatctgcgagcacgagatgaacgagatcgaggtgtgccccgagtgctacctggccgcctgccagaagagagacaactggttctgcgagccctgcagcaacccccaccccctggtgtgggccaagctgaagggcttccccttctggcccgccaaggccctgagagacaaggacggccaggtggacgccagattcttcggccagcacgacagagcctgggtgcccatcaacaactgctacctgatgagcaaggagatccccttcagcgtgaagaagaccaagagcatcttcaacagcgccatgcaggagatggaggtgtacgtggagaacatcagaagaaagttcggcgtgttcaactacagccccttcagaaccccctacacccccaacagccagtaccagatgctgctggaccccaccaaccccagcgccggcaccgccaagatcgacaagcaggagaaggtgaagctgaacttcgacatgaccgccagccccaagatcctgatgagcaagcccgtgctgagcggcggcaccggcagaagaatcagcctgagcgacatgcccagaagccccatgagcaccaacagcagcgtgcacaccggcagcgacgtggagcaggacgccgagaagaaggccaccagcagccacttcagcgccagcgaggagagcatggacttcctggacaagagcaccgccagccccgccagcaccaagaccggccaggccggcagcctgagcggcagccccaagcccttcagcccccagctgagcgcccccatcaccaccaagaccgacaagaccagcaccaccggcagcatcctgaacctgaacctgggccacagaagcaaggccgagatggacctgaaggagctgagcgagagcgtgcagcagcagagcacccccgtgcccctgatcagccccaagagacagatcagaagcagattccagctgaacctggacaagaccatcgagagctgcaaggcccagctgggcatcaacgagatcagcgaggacgtgtacaccgccgtggagcacagcgacagcgaggacagcgagaagagcgacagcagcgacagcgagtacatcagcgacgacgagcagaagagcaagaacgagcccgaggacaccgaggacaaggagggctgccagatggacaaggagcccagcgccgtgaagaagaagcccaagcccaccaaccccgtggagatcaaggaggagctgaagagcaccagccccgccagcgagaaggccgaccccggcgccgtgaaggacaaggccagccccgagcccgagaaggacttcagcgagaaggccaagcccagcccccaccccatcaaggacaagctgaagggcaaggacgagaccgacagccccaccgtgcacctgggcctggacagcgacagcgagagcgagctggtgatcgacctgggcgaggaccacagcggcagagagggcagaaagaacaagaaggagcccaaggagcccagccccaagcaggacgtggtgggcaagaccccccccagcaccaccgtgggcagccacagcccccccgagacccccgtgctgaccagaagcagcgcccagaccagcgccgccggcgccaccgccaccaccagcaccagcagcaccgtgaccgtgaccgcccccgcccccgccgccaccggcagccccgtgaagaagcagagacccctgctgcccaaggagaccgcccccgccgtgcagagagtggtgtggaacagcagcaccgtgcagcagaaggagatcacccagagccccagcaccagcaccatcaccctggtgaccagcacccagagcagccccctggtgaccagcagcggcagcatgagcaccctggtgagcagcgtgaacgccgacctgcccatcgccaccgccagcgccgacgtggccgccgacatcgccaagtacaccagcaagatgatggacgccatcaagggcaccatgaccgagatctacaacgacctgagcaagaacaccaccggcagcaccatcgccgagatcagaagactgagaatcgagatcgagaagctgcagtggctgcaccagcaggagctgagcgagatgaagcacaacctggagctgaccatggccgagatgagacagagcctggagcaggagagagacagactgatcgccgaggtgaagaagcagctggagctggagaagcagcaggccgtggacgagaccaagaagaagcagtggtgcgccaactgcaagaaggaggccatcttctactgctgctggaacaccagctactgcgactacccctgccagcaggcccactggcccgagcacatgaagagctgcacccagagcgccaccgccccccagcaggaggccgacgccgaggtgaacaccgagaccctgaacaagagcagccagggcagcagcagcagcacccagagcgcccccagcgagaccgccagcgccagcaaggagaaggagaccagcgccgagaagagcaaggagagcggcagcaccctggacctgagcggcagcagagagacccccagcagcatcctgctgggcagcaaccagggcagcgtgagcaagagatgcgacaagcagcccgcctacgcccccaccaccaccgaccaccagccccaccccaactaccccgcccagaagtaccacagcagaagcaacaagagcagctggagcagcagcgacgagaagagaggcagcaccagaagcgaccacaacaccagcaccagcaccaagagcctgctgcccaaggagagcagactggacaccttctgggactag

SEQ ID NO: 100168 - DNA, 3510 bp, Artificial Sequence
  derived and/or modified sequence
atggacatttcgaccagaagtaaagacccgggcagtgccgagcgcaccgcccagaaacgcaagttcccatccccacctcacagctctaatggacactcgccacaggacacaagcacgagcccaataaaaaaaaagaaaaaaccaggcctgcttaattcgaacaataaggaacagtcggagttgaggcatggcccattctactacatgaagcagccactcacaaccgacccggttgacgtggtgccccaagacgggagaaatgacttttactgctgggtatgtcacagggagggccaggtactctgctgcgaactctgtcctcgcgtctatcacgccaagtgcctgcgcttgacttcagagcctgaaggtgattggttctgtccggagtgcgagaaaattaccgtcgcagaatgtatcgaaactcaatccaaagctatgacaatgctcaccatagaacagctgtcatatctgctgaaattcgcaatccagaaaatgaaacagcccggaaccgacgccttccagaagcctgtgcctctggaacaacacccggactatgctgagtacatatttcaccccatggacctttgtacacttgaaaaaaatgcgaagaagaagatgtacggctgcacggaggcttttctggccgacgcaaaatggatcctccacaattgtatcatatacaatggcggcaaccacaaattgacacagattgctaaagtggtcattaagatctgcgagcacgaaatgaatgaaatagaagtctgccctgagtgctaccttgcggcctgtcagaaaagggataactggttttgcgagccctgtagtaatccccatccattggtatgggcaaaactcaagggctttccattttggcctgctaaggcattgagggacaaggatggtcaggttgatgcccgttttttcggacaacatgaccgggcatgggtgccgattaataattgctatctcatgagcaaagagatcccattttcagtcaaaaagaccaaaagcatctttaatagcgctatgcaggagatggaggtatacgtggaaaatatcagacggaaatttggtgtttttaactacagccctttccgcaccccctatacccccaactctcagtaccagatgctgctggatccaacaaacccctcagctggaaccgcaaagatcgataagcaggagaaggtaaagctgaatttcgacatgacagcttccccaaaaattcttatgagtaaaccagtgctgagtggcggaactgggagacgaatcagcctgtctgatatgcccaggagccccatgtccacaaatagtagcgtgcacacaggttccgacgtggaacaggacgctgagaaaaaggccacgtcaagccacttcagtgcctctgaagagagcatggacttcctggacaagtcaaccgccagcccggcatccaccaaaactggtcaggcggggagcctcagcgggtcacccaaacccttttccccccagcttagcgcacccataactactaagaccgacaaaacaagcaccacaggctccattctgaacctgaaccttggccatcggtccaaagccgaaatggacctaaaagagttatctgagagcgttcagcagcagagtacccccgtgcctttgatcagccctaagcgccagattcgatctcgcttccagctaaacctggacaagactattgagtcctgcaaggcacagctgggcattaacgaaatctcagaggatgtctataccgcagtggaacattcagacagtgaagacagcgagaagtccgattccagtgattccgaatacatctccgatgacgaacagaaatccaaaaatgaaccagaggacactgaggacaaagaaggctgtcaaatggataaggagcctagcgctgtcaagaagaagccaaaacctactaaccctgtagaaattaaagaagagctgaagtctacctctcctgcaagtgaaaaagccgatcccggagcggtgaaggacaaagcctccccggaacctgagaaagatttttctgagaaggcaaaaccttccccccatcccataaaagataagttgaagggcaaagacgagaccgactcacccacagtccacctgggcctggattcagatagcgagtctgagttagtgatcgatctcggtgaggatcactcaggcagggaaggacgaaaaaataaaaaggaacctaaggaacccagccccaaacaggatgtcgtgggcaaaaccccacctagcactacagtgggaagccacagtcccccagaaacccccgtgcttacgagaagcagtgcacagactagcgccgccggcgccacggcaactacgagcacatcatccaccgttaccgtaactgcacctgcccccgccgcaacaggatcccctgtcaaaaagcagcgacccctcctccctaaggagactgcgccagccgtgcagcgagttgtctggaattcatcaaccgtgcagcagaaggaaatcacgcagtccccgtccacatcaacaatcaccttagtgacaagcacccagtcttctcccttagtcacctcctctggaagcatgtctacactggtgtcctcagttaatgctgacctgccaattgcgaccgccagcgccgatgtcgctgccgatatcgcaaaatatacatcaaaaatgatggacgccattaaaggtaccatgacagaaatttacaacgatctgagtaagaatacaaccggtagcacaatagccgaaattcgaaggctgcggattgaaattgaaaagcttcagtggctgcaccagcaagaactgtccgaaatgaagcataatctggagttaaccatggcagagatgcgccagtctttagaacaggaaagagaccggctcattgccgaggtaaagaagcagctggaacttgaaaagcagcaggccgtagatgagacaaagaagaaacagtggtgtgcgaactgcaaaaaggaggctatattctattgttgttggaacacctcttattgtgattatccatgccagcaggcacactggcctgaacacatgaagtcctgcactcaatctgcaaccgcccctcagcaggaggctgatgctgaagtgaatactgaaacattaaataagagttcccagggatcctcctcatcaacacagtccgcaccctcagagaccgcctcggcctccaaggagaaggagaccagcgccgagaaatcaaaggaatcaggctcgacactggatttatccggcagtcgggaaaccccatcttctattttactaggcagcaatcaggggtccgtcagtaagcggtgtgacaaacagccggcttatgccccaaccacaaccgatcaccagcctcaccccaattatcccgcacagaagtatcactcgcggagcaataagtcttcctggagctcttcagatgagaagcgtggttctactaggtcagatcacaacacatcaacttcaaccaagtccctcctccccaaggagtctcgcctcgacacattttgggattag

SEQ ID NO: 100169 - DNA, 3291 bp, Artificial Sequence
  derived and/or modified sequence
tgaacagatcctgtcgacgtagtgccccaagacgggcggaacgatttctactgttgggtttgccacagagaagggcaggtgctgtgttgtgagctgtgtccccgggtttatcacgctaaatgcctgcgtttgacaagcgagccagagggcgattggttctgccctgagtgtgaaaaaatcaccgtcgccgaatgtattgagacccagtcaaaggcgatgactatgcttacaatcgaacagctgtcttacctgctgaaattcgctattcagaagatgaaacaacctgggacagatgccttccaaaaacccgtaccactggagcagcatcctgactacgccgagtatatctttcatcccatggacctgtgtactttggaaaagaacgctaaaaaaaaaatgtatggctgcacggaggcgtttctggcggacgcaaaatggatcctgcataattgtatcatttacaatggaggcaaccataagcttacgcagattgcgaaggtggtgatcaaaatatgtgaacatgaaatgaatgagatagaagtgtgccctgagtgctatctggcagcttgtcagaagcgcgacaattggttttgtgaaccgtgtagcaatccacaccccctggtttgggcaaaacttaaaggatttcctttttggccagcgaaggcattgagagacaaggacggacaggtcgacgctagattctttggacaacacgatcgcgcctgggtccccatcaataactgctatttaatgtcgaaggaaatcccttttagcgtgaagaaaacaaagagcatcttcaactccgcgatgcaggaaatggaagtatatgttgagaacatcagacgtaagttcggtgtgttcaattactcccccttcagaacaccctacactcctaattcccagtaccagatgctgctggatcccacaaatccctccgctggcacagctaaaatcgataaacaggagaaggttaaattgaactttgacatgaccgcctctcctaaaattctgatgtctaagccagttttatccggaggaacaggacgccggatcagcctgagcgacatgcccagaagtccaatgtcgaccaatagtagcgtacatactggctcagacgtagaacaggacgcagagaaaaaagccacctcctcacacttttccgcgtctgaagagtccatggacttcctagacaaatcaactgccagcccggcctcaaccaagacaggccaggctgggtcgcttagtgggtcgccaaaacctttcagcccacaacttagcgcccccatcactactaaaacagataagacctctaccacaggctccattttgaatttaaatctgggtcaccgcagtaaagctgagatggacctgaaggaactctccgaatcagtgcagcagcaaagcacaccagtgccactcatctcacccaagcgacaaattcgaagcaggttccagctgaatcttgacaagactatcgaaagctgtaaagctcagcttggcattaacgaaatctccgaagacgtttataccgcggtcgaacatagtgatagtgaggatagtgagaagtcagactcctctgactccgaatacatctctgacgacgagcagaagagtaagaatgagccggaagatacagaggacaaggaggggtgtcagatggacaaagagcctagtgccgttaagaagaaacctaagcctacaaaccctgtagagatcaaagaggagctcaaaagtacctcccccgccagtgaaaaagctgatccaggagcggtgaaagacaaggctagtcccgagccggaaaaagacttctccgagaaagccaagccatcacctcatccaatcaaagataaactaaagggaaaggatgagacagactccccaaccgtccatctggggctggattctgattctgaatccgaactcgtcatcgatttgggtgaggaccattctggccgggaaggccgcaagaataaaaaagagcctaaagagccctctcccaagcaggatgtggtcggcaaaacgcctccgagcacgacagtgggtagtcactctccccccgagacaccagttttgacccggagctccgcccagacttccgctgcaggtgccacagcgacaacctcaacatcctccacggtgacagttaccgccccagccccagctgcaaccggttctccagtgaagaagcaaagacccctcttgcccaaggagaccgcacccgccgtgcagcgagtggtatggaattcttccacagtccaacagaaagagattacacagagtccttcaacttctaccatcacactcgtgaccagtacccagtcctcccctctggtaacatctagtggttcaatgtctacattggtgagtagtgtcaacgctgatctgcccatcgctaccgccagtgccgatgtagccgcagacatagctaaatacacttctaaaatgatggatgccatcaagggtacaatgacagaaatctacaatgacctgagcaaaaatactactggctccaccatcgcggagattcggcgattgagaatagagattgagaagctgcaatggctacatcaacaagagcttagtgagatgaaacacaacttagagctaacaatggcagaaatgcgtcagtcattagaacaagagagggaccggcttattgctgaagttaagaagcagctcgaattggaaaagcagcaagccgttgatgaaaccaagaagaaacagtggtgtgccaattgcaagaaggaggcaatattttactgttgctggaacaccagttattgtgattacccttgccagcaggcccactggccggaacacatgaaaagctgcactcaatctgccacagcccctcagcaagaggctgatgccgaagtcaacactgagactctgaacaaaagttctcagggcagctcctcttccacacaatcagcaccaagcgaaacagctagtgcatcgaaggagaaagagactagcgctgagaaatccaaggagtcgggcagtacccttgacctgtctggaagccgcgagaccccgagttcaatccttcttggtagtaatcagggatccgtcagtaagcgctgcgacaagcaaccagcctacgctccaacaactactgaccatcagccacatccaaattatcctgcgcagaagtatcattctcgtagcaataaaagtagctggtcaagctcggatgaaaagcgtggtagcactcgatccgatcacaacacatcaacgtcaactaagtctctgctgccaaaagagagccgcctagacacgttctgggactag

SEQ ID NO: 100170 - DNA, 3510 bp, Artificial Sequence
  derived and/or modified sequence
atggacatcagcaccaggagcaaggaccccggcagcgctgagaggacagcccagaagaggaagttccccagccccccccacagcagcaatggccacagcccccaggacaccagcaccagccccatcaagaagaagaagaagccaggcctgctgaacagcaacaacaaggagcagagcgagctgcggcacggccccttctactacatgaagcagcccctgaccacagatcctgtggatgtggtgccccaggacggcagaaatgacttctactgctgggtgtgccaccgggagggccaggtgctgtgctgtgagctgtgcccccgggtgtaccacgccaagtgcctgcggctgaccagcgagcctgagggggactggttctgcccagaatgtgagaagatcaccgtggctgaatgtattgagacccagagcaaggccatgaccatgctgaccatcgagcagctgagctacctgctgaagtttgccatccagaagatgaagcagcccggcacagatgccttccagaagcctgtgcccctggagcagcacccagactatgcagagtacatcttccaccccatggacctgtgcaccctggagaagaatgccaagaagaagatgtatggctgcacagaggccttcctggctgatgccaagtggatcctgcacaactgcatcatctacaacggcggcaaccacaagctgacccagatcgccaaggtggtgatcaagatctgtgaacatgagatgaatgaaattgaggtgtgcccagagtgctacctggccgcctgccagaagagggacaactggttctgtgagccctgcagcaacccccaccccctggtgtgggccaagctgaagggcttccccttctggccagccaaggccctgcgggacaaggatggccaggtggatgcccgcttcttcggccagcacgaccgggcctgggtgcccatcaacaactgctacctgatgagcaaggagatccccttctctgtgaagaagaccaagagcatcttcaacagcgccatgcaggagatggaggtgtatgtggagaacatccggaggaagtttggagtcttcaactacagccccttccgcaccccctacacccccaacagccagtaccagatgctgctggaccccaccaaccccagcgctggaacagccaagattgacaagcaggagaaggtgaagctgaactttgacatgacagccagccccaagatcctgatgagcaagcctgtgctgagcggcggcaccggccgccgcatcagcctgagtgacatgcccaggagccccatgagcaccaacagctctgtgcacacaggcagtgatgtggagcaggatgctgagaagaaggccaccagcagccacttcagcgccagcgaggagagcatggacttcctggacaagagcacagccagccctgccagcaccaagacaggccaggccggcagcctgagcggcagccccaagcccttcagcccccagctgagcgcccccatcaccaccaagacagacaagaccagcaccaccggcagcatcctgaacctgaacctgggccacaggagcaaggccgagatggacctgaaggagctgtctgagagcgtgcagcagcagagcacccctgtgcccctcatcagccccaagaggcagatccgcagccgcttccagctgaacctggacaagaccatcgagagctgcaaggcccagctgggcatcaatgagatcagtgaagatgtgtacacagctgtggagcacagcgacagtgaagattctgagaagagtgacagcagtgacagcgagtacatcagtgatgatgagcagaagagcaagaatgaacctgaggacacagaggacaaggagggctgccagatggacaaggagcccagcgctgtgaagaagaagcccaagcccaccaaccctgtggagatcaaggaggagctgaagagcaccagccctgccagcgagaaggctgaccctggagctgtgaaggacaaggccagccctgagcctgagaaggacttcagcgagaaggccaagcccagcccccaccccatcaaggacaagctgaagggcaaggatgaaacagacagccccaccgtgcacctgggcctggacagcgacagcgagagcgagctggtgattgacctgggggaggaccacagcggccgggagggcaggaagaacaagaaggagcccaaggagcccagccccaagcaggatgtggtgggcaagaccccacccagcaccaccgtgggcagccacagccccccagagacccctgtgctgaccaggagcagcgcccagaccagcgctgctggggccacagccaccaccagcaccagcagcacagtgacagtgacagccccagccccagctgccaccggcagccctgtgaagaagcagaggcccctgctgcccaaggagacagccccagctgtgcagagggtggtgtggaacagcagcacagtgcagcagaaggagatcacccagagccccagcaccagcaccatcaccctggtgaccagcacccagagcagccccctggtgaccagcagcggctccatgagcaccctggtgtcctctgtgaatgctgacctgcccatcgccacagccagcgcagatgtggccgctgacatcgccaagtacaccagcaagatgatggatgccatcaagggcaccatgacagagatctacaatgacctgagcaagaacaccaccggcagcaccatcgccgagatccggcggctgcgcatcgagattgagaagctgcagtggctgcaccagcaggagctgtctgagatgaagcacaacctggagctgaccatggccgagatgaggcagagcctggagcaggagcgggaccggctgattgctgaggtgaagaagcagctggagctggagaagcagcaggccgtggatgagaccaagaagaagcagtggtgtgccaactgcaagaaggaggccatcttctactgctgctggaacaccagctactgtgactacccctgccagcaggcccactggccagagcacatgaagagctgcacccagagcgccacagccccccagcaggaggctgatgctgaggtgaacacagagaccctgaacaagagcagccagggcagcagcagcagcacccagagcgcccccagcgagacagccagcgccagcaaggagaaggagaccagcgctgagaagagcaaggagagcggcagcaccctggacctgagcggcagccgggagacccccagcagcatcctgctgggcagcaaccagggctctgtgtccaagagatgtgacaagcagcctgcctatgcccccaccaccacagaccaccagccccaccccaactacccagcccagaagtaccacagccgcagcaacaagagctcctggagcagcagtgatgagaagaggggcagcaccaggagtgaccacaacaccagcaccagcaccaagagcctgctgcccaaggagagccggctggacaccttctgggactag

SEQ ID NO: 100171 - DNA, 3291 bp, Artificial Sequence
  derived and/or modified sequence
tgaacagatcctgtggatgtggtgccccaggatggaagaaatgacttctactgctgggtgtgccaccgggagggccaggtgctgtgctgtgagctgtgcccccgggtgtaccacgccaagtgcctgcggctgaccagcgagcctgagggggactggttctgcccagaatgtgagaagatcaccgtggccgagtgcatcgagacccagagcaaggccatgaccatgctgaccatcgagcagctgagctacctgctgaagtttgccatccagaagatgaagcagcctggaacagatgccttccagaagcctgtgcccctggagcagcacccagactatgcagagtacatcttccaccccatggacctgtgcaccctggagaagaatgccaagaagaagatgtatggctgcacagaggccttcctggctgatgccaagtggatcctgcacaactgcatcatctacaatggaggcaaccacaagctgacccagatcgccaaggtggtgatcaagatctgtgagcacgagatgaatgaaattgaggtgtgcccagagtgctacctggccgcctgccagaagagggacaactggttctgtgagccctgcagcaacccccaccccctggtgtgggccaagctgaagggcttccccttctggccagccaaggccctgcgggacaaggatggccaggtggatgcccgcttcttcggccagcacgaccgggcctgggtgcccatcaacaactgctacctgatgagcaaggagatccccttctctgtgaagaagaccaagagcatcttcaacagcgccatgcaggagatggaggtgtatgtggagaacatccggaggaagtttggagtcttcaactacagccccttccgcaccccctacacccccaacagccagtaccagatgctgctggaccccaccaaccccagcgctggaacagccaagattgacaagcaggagaaggtgaagctgaactttgacatgacagccagccccaagatcctgatgagcaagcctgtgctgagcggcggcactggaagacgcatcagcctgagtgacatgcccaggagccccatgagcaccaacagctctgtgcacactggaagtgatgtggagcaggatgctgagaagaaggccaccagcagccacttcagcgccagcgaggagagcatggacttcctggacaagagcacagccagccctgccagcaccaagacaggccaggccggcagcctgagcggcagccccaagcccttcagcccccagctgagcgcccccatcaccaccaagacagacaagaccagcaccaccggcagcatcctgaacctgaacctgggccacaggagcaaggccgagatggacctgaaggagctgtctgagagcgtgcagcagcagagcacccctgtgcccctcatcagccccaagaggcagatccgcagccgcttccagctgaacctggacaagaccatcgagagctgcaaggcccagctgggcatcaatgagatcagtgaagatgtgtacacagctgtggagcacagcgacagcgaggacagcgagaagagtgacagcagtgacagcgagtacatcagtgatgatgagcagaagagcaagaatgaacctgaggacacagaggacaaggagggctgccagatggacaaggagcccagcgctgtgaagaagaagcccaagcccaccaaccctgtggagatcaaggaggagctgaagagcaccagccctgccagcgagaaggctgaccccggggctgtgaaggacaaggccagccctgagcctgagaaggacttcagcgagaaggccaagcccagcccccaccccatcaaggacaagctgaagggcaaggatgaaacagacagccccaccgtgcacctgggcctggacagcgacagcgagagcgagctggtgattgacctgggggaggaccacagcggccgggagggcaggaagaacaagaaggagcccaaggagcccagccccaagcaggatgtggtgggcaagaccccacccagcaccaccgtgggcagccacagccccccagagacccctgtgctgaccaggagcagcgcccagaccagcgctgctggggccacagccaccaccagcaccagcagcacagtgacagtgacagccccagccccagctgccaccggcagccctgtgaagaagcagaggcccctgctgcccaaggagacagccccagctgtgcagagggtggtgtggaacagcagcacagtgcagcagaaggagatcacccagagccccagcaccagcaccatcaccctggtgaccagcacccagagcagccccctggtgaccagcagcggctccatgagcaccctggtgtcctctgtgaatgctgacctgcccatcgccacagccagcgcagatgtggccgctgacatcgccaagtacaccagcaagatgatggatgccatcaagggcaccatgacagagatctacaatgacctgagcaagaacaccaccggcagcaccatcgccgagatccggcggctgagaattgaaattgagaagctgcagtggctgcaccagcaggagctgtctgagatgaagcacaacctggagctgaccatggccgagatgaggcagagcctggagcaggagcgggaccggctgattgctgaggtgaagaagcagctggagctggagaagcagcaggccgtggatgagaccaagaagaagcagtggtgtgccaactgcaagaaggaggccatcttctactgctgctggaacaccagctactgtgactacccctgccagcaggcccactggccagagcacatgaagagctgcacccagagcgccacagccccccagcaggaggctgatgctgaggtgaacacagagaccctgaacaagagcagccagggcagcagcagcagcacccagagcgcccccagcgagacagccagcgccagcaaggagaaggagaccagcgctgagaagagcaaggagagcggcagcaccctggacctgagcggcagccgggagacccccagcagcatcctgctgggcagcaaccagggctctgtgtccaagagatgtgacaagcagcctgcctatgcccccaccaccacagaccaccagccccaccccaactacccagcccagaagtaccacagccgcagcaacaagagctcctggagcagcagtgatgagaagaggggcagcaccaggagtgaccacaacaccagcaccagcaccaagagcctgctgcccaaggagagccggctggacaccttctgggactag

SEQ ID NO: 100172 - DNA, 3510 bp, Artificial Sequence
  derived and/or modified sequence
atggacatcagcacccggagcaaggaccccggcagcgccgagcggaccgcccaaaaacgtaaattcccgtcccccccccatagcagtaacggacatagtccacaggacaccagcaccagcccgatcaagaaaaaaaagaaacctgggctgctcaatagcaataataaggaacagtctgagctgagacacggtcctttctactatatgaagcagccgctcacgacagatcccgtggacgtcgtccctcaggacggcaggaatgacttttattgctgggtgtgtcaccgcgaaggccaggtgctgtgttgcgagctctgccccagggtgtatcacgcaaagtgcctgaggctgactagtgaaccggagggcgattggttctgccctgaatgtgaaaagataactgtagctgagtgcatcgagacgcagtcaaaggctatgactatgctcaccatcgaacagctcagttacctgcttaaattcgccatccagaaaatgaagcagcctggaaccgatgctttccagaagcctgtgcccctggaacaacaccctgactacgctgagtacatctttcaccctatggacctgtgtaccctggaaaaaaatgccaagaaaaagatgtacggttgtactgaggctttcctggccgatgccaaatggattctacacaactgcatcatctacaacggcggcaatcacaagctcacacagatcgccaaagtagtcattaaaatttgcgagcacgaaatgaacgagattgaagtatgtcccgagtgctacctggccgcatgccagaagcgcgataattggttctgcgaaccttgctccaatccacaccccctggtgtgggccaaactaaagggatttccattctggcccgctaaggccctgagagacaaagacggacaagtagacgcccggttcttcggccagcatgacagagcttgggtccctatcaataattgttaccttatgagcaaggaaatccctttcagtgtcaagaaaacaaaaagcatttttaacagcgcaatgcaggagatggaggtgtacgttgaaaacatccgaagaaaattcggcgtctttaattactctccgtttaggactccttatactcctaactctcagtatcagatgttactcgaccctacgaaccccagtgcaggcactgcaaagatcgacaaacaggagaaagttaagttgaatttcgatatgaccgcctctcctaaaattttaatgtccaaaccagtactcagcggcggcacagggagacgaatctcactctctgatatgccacggtcccctatgtccaccaactccagcgttcacacggggtcagacgtcgagcaagatgccgagaagaaggccacatcatcccattttagtgctagtgaagaaagcatggatttcctcgataaatccacagcgtctcctgcttccaccaaaacggggcaagctgggtctctttctggctccccgaagcccttctctccccagttgtcagccccgataacaaccaagactgataagacaagtaccaccggctctatccttaacttaaacctcggccatcgttccaaagctgaaatggatttgaaggagttatcggaatccgttcagcagcagtctacacccgtccctctgatctcgccaaaacgccagatccgatcgcgcttccagctcaacctcgataagaccatagaatcttgcaaagcgcaactcggcatcaatgaaatttctgaggacgtctatacagcagttgaacattccgatagtgaagacagcgaaaagagcgattcttctgacagcgagtacatttccgacgatgagcagaagagcaagaatgagcctgaagacaccgaggataaggagggctgccagatggataaggagccttcagcagtgaaaaagaaacctaagccaactaatccagtcgaaatcaaagaagagcttaaaagcacatctccagcatctgagaaagcagatccaggcgccgtgaaggacaaggccagcccagaaccagaaaaagatttttccgagaaggccaaaccatccccccatcctatcaaggacaagctgaagggcaaggatgagactgattccccgaccgtgcacctcggactggactccgattcagaatccgaattagttattgacctgggagaggatcatagcggccgtgaagggcgcaagaataagaaggagccaaaagaaccaagcccaaaacaggacgtggttggcaagactccgccatccactacagtcgggtcccactcccctccggagacacctgtacttaccaggtcctcagcccagacatcagccgccggcgctaccgccactacaagcaccagcagtactgtgacagttactgcgccagctcctgcagcaacaggaagcccggtgaagaaacaacggcccctgctcccaaaggaaaccgcccctgcggttcagcgggtagtgtggaattcctccacagtccagcagaaagagattactcagtctcccagcacttctacaataacccttgttacatccacacagtcctcaccactcgtaacctccagcggtagtatgagtacgttggtgagttcggttaatgccgatctgcctatcgctactgcaagcgccgacgtggcggctgacatcgccaagtacacttcgaaaatgatggacgctattaagggtactatgactgagatctataacgacttgagtaaaaacacaacaggaagcaccattgccgagatccgacggttgcgcatagagattgagaaactccagtggctccaccagcaagaactgtctgaaatgaaacacaacctggaattgactatggcagagatgcggcagtctctggaacaggagagggacagactgatagccgaggtgaagaaacaactcgaacttgaaaagcagcaagctgtggacgaaacaaagaaaaagcagtggtgcgctaactgcaagaaggaggcgatcttttattgctgctggaatacgagctattgcgattatccctgccagcaggcccactggccggagcacatgaagagttgtacgcagtctgccacagctccccagcaggaagccgacgcggaggtcaataccgaaacccttaacaagtctagtcagggaagttctagcagtacacagagcgctccttccgaaactgcaagtgcctccaaggagaaagaaacatcagccgagaagtctaaggaaagcgggtcgaccctagacttaagcgggtcccgtgaaactcctagttccattttacttggatcgaatcagggatcagtatccaaacggtgcgataaacagcccgcctacgcaccaactacaacggatcaccagccccaccctaactaccctgctcaaaaatatcattcgcgtagcaacaaatcctcttggtcttcctccgacgaaaagcgaggcagcacacggtctgatcacaacaccagcacctccacaaaatctctgctccccaaggagagcagactggacactttctgggactag

SEQ ID NO: 100173 - DNA, 3291 bp, Artificial Sequence
  derived and/or modified sequence
tgaaccgaccccgtggacgtggtgccccaggacggccggaacgacttttattgttgggtgtgccaccgcgaagggcaggtcctctgctgcgaactgtgtcctagggtttatcacgctaaatgtctacgcctgactagcgaacctgagggggactggttctgccccgaatgcgagaaaatcaccgtggcagaatgtattgaaactcagagcaaggccatgacaatgctgaccattgagcagctctcataccttttgaaattcgcaattcagaagatgaaacagcccggaactgacgccttccagaaacccgtccccttggagcagcaccccgactatgctgaatatatctttcatcctatggatctctgcacactagaaaagaacgccaagaaaaagatgtatggatgtaccgaggcttttcttgccgacgcaaagtggatcctccacaactgcattatctacaatggaggcaaccataagctgactcagatagcgaaagtagttatcaaaatctgcgagcacgaaatgaacgagatagaggtctgtccggaatgctatcttgctgcgtgtcaaaagcgagataattggttctgtgagccatgcagcaaccctcacccccttgtctgggctaaactgaaaggtttccccttctggccggctaaggccctgcgggataaggatggtcaagtcgatgctcgattcttcggacaacatgaccgcgcatgggtccctatcaataattgctatttaatgtcgaaggagattccattcagcgtaaagaagactaagagcattttcaattctgctatgcaagaaatggaggtttacgttgagaacatccgcagaaagttcggcgtgttcaattacagtcccttccggactccatatacccccaacagtcaataccagatgctgctggacccaacgaacccctcagccggaaccgccaagatcgacaaacaggaaaaggtaaagctgaattttgatatgaccgcctcaccaaaaatcctgatgtccaaaccggtgctgtctggaggaactggcaggcgaatttcactcagtgatatgcctcgctcaccaatgtccactaactcttcagtccatactggtagcgacgtggagcaggacgccgaaaagaaagctacctccagccacttcagcgcctcagaagagagcatggacttcttggataagtctaccgcgagtcccgccagcaccaaaaccggtcaagcgggctctctaagcggtagcccaaagcctttttcacctcagctgagcgccccgattaccacaaagacggacaagacaagcaccactggtagcatcctcaatcttaacctgggtcacagaagcaaagccgagatggacctgaaggaactatcagagagcgtccagcagcagtccacacccgtgcccctcatctccccaaagagacagatccggtcgcggttccagttgaatttggacaaaaccatagaatcttgtaaagctcaacttggaatcaacgagatcagcgaggatgtgtatacagcggtagagcactccgactcagaggactccgaaaagtccgattccagtgactcagaatatataagtgacgacgaacagaagtcaaagaatgagcccgaagacacagaagataaagagggctgtcagatggataaggaacctagcgccgtgaaaaaaaaacctaaaccaaccaacccggtcgaaatcaaggaagagctcaagtctacctcccccgcaagtgaaaaggcagatccgggagctgtaaaggataaggcttcacccgagccagagaaggatttctctgaaaaggccaagccatcgccacatcctatcaaagacaaattgaaaggcaaggacgaaaccgattcccctacagtccacctggggttggactcggatagtgagagcgagctggtcattgatctgggtgaggatcactccggtagagagggtcgaaaaaataagaaggaacctaaggaaccatctcccaaacaggacgtggttggtaaaaccccccctagcactacagtgggtagccattccccgcctgaaacaccagtgctaacaagaagctccgcccagacatctgctgcaggggccaccgctacaacctcaaccagctcaaccgttacagtcacagcaccagcaccagcggccacaggtagtccagttaaaaaacagagaccactgttgcccaaagagaccgcccccgcggtccagcgtgtcgtgtggaactcatcgacagtacagcagaaggagatcactcagagcccgtccacctctacaatcacactggtgaccagcactcaatcttcgccactagtgacttctagcgggtccatgagtaccctcgtatcgtcagtcaatgctgacctccctatcgccaccgccagtgcagatgtagctgcggacatagccaaatatacttccaaaatgatggacgcaattaagggcaccatgactgagatctataatgatctgtccaaaaataccaccgggagtacgattgctgagattcgccggcttcggattgaaatcgagaaactgcagtggctgcaccagcaggaattgtctgagatgaagcacaatctggagttgacaatggccgaaatgcgacagtccctggaacaagaaagggaccgccttattgcggaagtcaagaagcaactggagctggagaaacagcaggccgtggacgagacaaagaagaagcaatggtgcgccaattgtaagaaggaagctatcttttattgttgctggaatacaagctactgcgactacccatgccaacaggcgcattggcctgaacacatgaagtcttgcacacaatccgccacagcccctcagcaggaagccgacgcggaggtgaatactgagaccctgaacaagagtagccagggaagttcttccagcacccagtcagcgccctccgaaacagcctctgcctctaaggaaaaagagacctctgccgaaaaaagcaaggagagcggatcgacgctggacctgtctggctctagagagaccccatccagcattctgctgggctcgaaccagggcagtgtttctaagaggtgcgacaaacagcccgcctacgcccccactacaaccgatcaccaacctcatcccaattatcctgcccagaagtaccactctcgcagcaacaaatccagctggagttctagcgacgagaagcgcggcagtacccggtctgaccataatacttcgacctctacaaagagcttactccctaaagaatccagattggacaccttctgggactag

SEQ ID NO: 100174 - DNA, 3510 bp, Artificial Sequence
  derived and/or modified sequence
atggacatatcaacaagaagcaaggacccaggaagcgcagagcggacagcccagaaacggaagttcccctcaccgcctcactctagtaatggccactcgccccaagacacttcaacatcaccgatcaaaaaaaagaaaaaacctggtctccttaactctaataataaagaacagtccgaactccgccacgggccattctactacatgaagcagccattgacaacagaccctgtggacgtagttccacaggacgggagaaatgacttttactgttgggtctgtcacagagaaggtcaggttttatgttgcgagctatgccccagagtgtaccacgccaagtgtcttagactgaccagcgagcctgagggcgattggttctgccctgagtgtgagaagatcacagtggccgaatgcatcgagacacagtcaaaggccatgacaatgctgactatagaacagctctcctatctacttaagtttgccatccaaaaaatgaaacaaccagggactgatgccttccagaagcccgttcccttggagcagcacccagactatgccgagtatatcttccaccctatggatctgtgcacacttgagaaaaacgcaaaaaagaagatgtacggatgcacagaggctttcctggccgatgccaaatggatactgcataactgcatcatttacaacggcggaaaccacaagctgacccagatagccaaggtggtgatcaagatatgtgagcacgagatgaatgaaatcgaagtgtgtccagaatgctatcttgccgcatgccagaaacgcgataactggttttgtgagccttgtagcaatcctcaccccctagtgtgggccaaactgaagggattcccattttggccagcgaaggcactgagagacaaggacggccaggtggacgcacgatttttcgggcaacacgatcgcgcttgggtaccaatcaacaactgttatctgatgagtaaggaaattccctttagcgttaagaaaaccaaaagtatcttcaattctgctatgcaagagatggaggtgtacgtggagaatattcgtcgaaagtttggggtcttcaattactccccctttagaacaccttacaccccaaactcacaataccagatgctcctggatcccacaaaccctagcgccggtactgccaagatagacaaacaagaaaaggtgaaattgaacttcgacatgacggcctctccgaagattctgatgtccaagcccgttctcagcggaggcaccgggcgtaggataagtctcagcgacatgccaagatcaccaatgtcaaccaacagtagcgttcatacaggatcagacgtcgagcaggacgccgaaaagaaggcaactagctcccatttctctgcctccgaggagagtatggattttcttgataagtccaccgcttcaccagctagcacgaaaaccggccaagcagggtcgctgtctggtagtccaaaaccctttagccctcagctctctgcaccaattaccacaaaaacagacaagacctctactacgggttccatactgaatctgaatctggggcatcgctccaaagctgaaatggatctgaaagagctgagcgagtcagttcagcaacagtccacgcccgttccgttgatttcccccaaacggcaaattagatcccggttccagctgaatctggacaaaaccatcgagtcatgcaaggctcaactgggcattaacgagataagcgaagatgtgtatactgctgtggaacacagcgattcggaggacagcgagaaaagtgatagcagcgactctgagtacatctccgatgacgagcagaaatcaaaaaacgaacctgaggatacagaagacaaggagggttgccagatggacaaagagcccagcgcggtgaagaagaaacccaaacccacaaacccagtggagattaaggaggaattgaaaagcaccagccccgcatcagagaaggccgatccaggcgcagtgaaggataaggctagcccagagcctgagaaagacttttccgagaaggcaaagccctccccacaccccattaaggataaattgaaaggaaaggatgaaaccgactcacctacagtccaccttggactcgattcagatagtgaatccgaactggtgattgacctgggggaggatcattcaggcagggaaggcaggaagaataagaaagagcccaaggagccttctcccaaacaagatgtggtcggaaaaacgcccccaagcacaacagtgggcagtcacagccctcccgagacaccagtacttacccgaagcagtgctcagacctcagctgctggggctacggcgactacttccacctcatcgactgtgaccgtgaccgctcccgcacctgctgccacgggtagccccgtgaagaagcagagacctcttttgcctaaggagaccgcacctgcggtgcagcgcgtggtgtggaactcatctacagttcaacagaaggagatcacccagagcccttcgacatcgaccatcacactggtcacatccacccagtcttctccgctggtcactagttcaggcagcatgagtacactggtgtccagcgtcaacgccgatctccctatagctacagccagtgccgacgtcgccgctgatatagctaagtacacttccaaaatgatggacgcaattaaagggactatgaccgaaatctataacgacctgtcgaaaaatactacgggcagcacaatcgctgagattaggaggctccggatcgaaatcgagaagttacagtggcttcaccagcaggagctaagcgaaatgaaacacaacctggagctgaccatggccgaaatgaggcagagtctggaacaagagagagaccgtctgattgccgaagtgaagaagcagttagaactcgagaagcagcaggcggtggacgaaacaaagaagaagcagtggtgcgccaactgtaagaaagaggctatcttctattgctgttggaacacctcttactgcgactatccgtgtcaacaggcacattggcccgaacatatgaagtcgtgtacccagagtgccactgccccacaacaggaagcagatgccgaggtaaacaccgagacactgaacaagtcatctcaggggtcaagctccagcacccagtctgcacctagtgagacagcctcagcatcgaaggagaaggagacgtcggcagaaaaatcgaaggaatctggatcaactttggacctgtcaggaagcagggagacgccctcttcaatacttctgggtagtaatcaaggctcggtcagcaaaagatgtgacaagcagcccgcttacgccccaaccacaactgatcatcagccccatcccaactatccagcacagaaataccatagtaggtcaaacaagtccagttggtccagctcggacgagaagcgtggctccactcggtcggatcataatacctcaaccagcaccaagagcctcctcccaaaagaatcaaggctggacaccttctgggactag

SEQ ID NO: 100175 - DNA, 3291 bp, Artificial Sequence
  derived and/or modified sequence
taaacggatcccgtcgatgtggtgcctcaggatgggaggaatgacttttactgctgggtgtgtcatagagaaggccaggtcctgtgttgtgagctctgcccgcgagtttatcacgctaaatgtttgcgcctaacctcggagcctgagggggactggttctgtccggagtgtgagaagataacggtggccgagtgcatcgagactcagtccaaggcgatgaccatgctgactattgagcagctgtcatatcttttgaaattcgccatccaaaagatgaaacagcctggtaccgatgcgtttcaaaaacccgtgcccctggagcagcaccctgactacgccgagtacatctttcaccctatggacctgtgcaccttagagaagaacgctaagaagaaaatgtacggctgcacagaggcttttttggccgacgcaaagtggattctacacaactgcatcatttacaacggcggaaatcataagctgacccagattgccaaagttgtgattaagatttgcgagcacgagatgaacgaaattgaagtgtgtcccgagtgctacctcgcagcatgccagaaacgcgataattggttctgcgagccatgttcaaacccccacccactcgtgtgggccaaattaaaggggttccctttctggcccgctaaagccctacgcgacaaagacggccaagtggatgctcggttttttggtcaacacgatcgggcttgggttccgatcaataactgctatttgatgtctaaagaaatcccattctcggttaaaaagaccaaatccattttcaacagcgccatgcaggagatggaagtatacgtggagaacatcagacggaagtttggtgtgttcaactactccccatttaggacgccctacacgcctaacagtcagtaccagatgttacttgaccctactaaccctagtgcaggcaccgctaagatagataagcaggaaaaagtgaagttaaactttgacatgacggcatctcccaagatcttgatgtcgaagcccgtcctgtccggcggtactggaagaagaataagcctcagcgatatgccgagaagtccaatgtctacgaattcctcggtccacactggctccgatgtggaacaggacgctgagaaaaaggccaccagctcccacttctccgccagtgaagaatccatggacttcctcgataagtccacagcttccccggcatccacaaagactggtcaggcagggtccttgtctggctcgccgaagcccttttcaccacagctttctgcgcctatcaccactaaaactgacaaaacctcaactaccgggtcaatcttaaatttaaatctcggacacaggagcaaggccgaaatggacttaaaagagctgtcggaaagcgtccaacaacagagtacacccgtgccactgatctcaccgaagaggcagatcaggagtcgatttcagcttaatctggacaagaccattgaatcttgtaaggcacagctcggcatcaacgagatctccgaggacgtgtatactgccgtggagcactctgactccgaggactccgagaaaagtgacagcagcgactccgagtacatcagcgacgatgagcaaaaatcgaagaacgagccggaagacaccgaagataaagaaggatgccaaatggacaaagagccaagtgcggtcaaaaaaaagccaaagcctaccaacccagtggaaatcaaggaagagctcaagagcacatcccctgccagtgaaaaagcggatcctggcgctgtgaaggataaagcatctcccgagcctgagaaggatttttcagaaaaagctaaaccaagtcctcacccaattaaggataaactcaagggaaaggatgaaaccgacagccctaccgtgcatctcgggctggactctgacagtgagtcggaattagtgattgacctgggcgaggaccattcaggcagggagggaaggaagaataaaaaggagcccaaagagcctagcccaaagcaagacgtagtcggaaaaaccccaccctccacgactgtaggctcgcacagcccccctgaaactccagtacttacgaggtcatcagctcaaacctccgctgccggtgcgacagccaccaccagtaccagctctacagttaccgtgacagcacccgcaccagcagcaacgggcagccccgtgaagaagcagcggcctctcttgcctaaggagaccgccccagccgtacaacgcgtggtctggaatagtagcaccgtccagcaaaaggaaattacgcagtcgccaagcacctccacaattacacttgtcacaagcacccaaagctctcctctggtgacctcatcaggtagcatgtccacactggttagctcggttaatgccgatctgccaatcgcaactgccagcgccgatgtggccgctgatattgctaagtatacctccaagatgatggacgctatcaaaggaacaatgacggaaatctacaatgacctctccaaaaataccacaggctcgactatcgctgaaatacggcgattgcgcatcgaaatcgagaagcttcagtggctgcaccagcaagaactaagcgagatgaaacataatctcgagcttaccatggctgaaatgcgccagtctttggagcaggagcgcgacagactgatcgcagaggtgaaaaagcaactcgagctggagaaacagcaagcagttgatgagacaaagaagaagcagtggtgcgcaaattgcaagaaagaagcaatcttctactgctgttggaataccagctactgcgattatccttgccagcaggctcattggccagaacatatgaaaagttgcacacaatcagctacagctccccagcaggaggccgacgccgaggtgaacaccgaaacgcttaataagtcctcccagggtagtagttcctcaacacagagtgcgccttctgagaccgcaagcgcatcgaaggagaaagagacctcagctgaaaagtctaaggaaagcgggagcactcttgatttgtccggctcgagggaaacacctagcagcatcctgctcgggagcaaccaaggatctgtctctaaaagatgtgataagcaaccagcctatgcacctactacaacagaccatcagccacacccgaactaccctgcacagaagtaccactctcgctccaacaagtcttcttggagcagctccgacgagaagcgcggtagtacgcggagtgatcacaacacgtcgacttcgactaaatcattactgcccaaagagtcccggcttgacactttttgggactag

SEQ ID NO: 100176 - DNA, 3637 bp, Artificial Sequence
  derived and/or modified sequence
cacagaccctgttgatgttgtaccgcaggatggacggaatgatttctactgctgggtttgtcaccgggaaggccaagtcctttgctgtgagctctgtccccgggtttatcacgctaagtgtctgagactgacatcggaaccagagggggactggttttgtcctgaatgtgagaaaattacagtagcagaatgcatcgagacccagagtaaagccatgacaatgctcaccattgaacagttatcctacctgctcaagtttgccattcagaaaatgaaacagccagggacagatgcattccagaagcccgttccattggaacagcaccctgactatgcggaatacatcttccatccaatggacctttgtacattggaaaagaatgcgaaaaagaaaatgtatggctgcacagaagccttcctggctgatgcaaagtggattttgcacaactgcatcatttataatgggggaaatcacaaattgacgcaaatagcgaaagtagtcatcaaaatctgtgaacatgagatgaatgaaatcgaagtatgtccagaatgttatctagctgcttgccaaaaacgagataactggttttgtgagccttgtagcaatccacatcctttggtctgggccaaactgaaggggtttccattctggcctgcaaaagctctaagggataaagacgggcaggtcgatgcccgattctttggacaacatgacagggcctgggttccaataaataattgctacctcatgtctaaagaaattcctttttctgtgaaaaagactaagagcatcttcaacagtgccatgcaagagatggaggtttacgtggagaacatccgcaggaagtttggggtttttaattactctccatttaggacaccctacacacccaacagccagtatcaaatgctgctcgatcccaccaaccccagcgccggcactgccaagatagacaagcaggagaaggtcaagctcaactttgacatgacggcatcccccaagatcctgatgagcaagcctgtgctgagtgggggcacaggccgccggatttccttgtcggatatgccgcgctcccccatgagcacaaactcttctgtgcacacgggctccgacgtggagcaggatgctgagaagaaggccacgtcgagccacttcagtgcgagcgaggagtccatggacttcctggataagagcacagcttcaccagcctccaccaagacgggacaagcagggagtttatccggcagcccaaagcccttctctcctcaactgtcagctcctatcacgacgaaaacggacaaaacctccaccaccggcagcatcctgaatcttaacctgggtcatcgaagcaaagctgagatggatttgaaggagctgagcgagtcggtccagcaacagtccacccctgttcctctcatctctcccaagcgccagattcgtagcaggttccagctgaatcttgacaagaccatagagagttgcaaagcacaattaggcataaatgaaatctcggaagatgtctatacggccgtagagcacagcgattcggaggattctgagaagtcagatagtagcgatagtgagtatatcagtgatgatgagcagaagtctaagaacgagccagaagacacagaggacaaagaaggttgtcagatggacaaagagccatctgctgttaaaaaaaagcccaagcctacaaacccagtggagattaaagaggagctgaaaagcacgtcaccagccagcgagaaggcagaccctggagcagtcaaggacaaggccagccctgagcctgagaaggacttttccgaaaaggcaaaaccttcacctcaccccataaaggataaactgaagggaaaagatgagacggattccccaacagtccatttgggcctggactctgattcagagagcgaacttgtcatagatttaggagaagaccattctgggcgggagggtcgaaaaaataagaaggaacccaaagaaccatctcccaaacaggatgttgtaggtaaaactccaccatccacgacggtgggcagccattctcccccggaaacaccggtgctcacccgctcttccgcccaaacttccgcggctggcgccacagccaccaccagcacgtcctccacggtcaccgtcacggccccggcccccgccgccacaggaagcccagtgaaaaagcagaggccgcttttaccgaaggagactgccccggccgtgcagcgggtcgtgtggaactcatcaactgtccagcagaaggagatcacacagagcccatccacgtccaccatcaccctggtgaccagcacacagtcatcgcccctggtcaccagctcggggtccatgagcacccttgtgtcctcagtcaacgctgacctgcccatcgccactgcctcagctgatgtcgccgctgatattgccaagtacactagcaaaatgatggatgcaataaaaggaacaatgacagaaatatacaacgatctttctaaaaacactactggaagcacaatagctgagattcgcaggctgaggatcgagatagagaagctccagtggctgcaccagcaagagctctccgaaatgaaacacaacttagagctgaccatggcggagatgcggcagagcctggagcaggagcgggaccggctcatcgccgaggtgaagaagcagctggagttggagaagcagcaggcggtggatgagaccaagaagaagcagtggtgcgccaactgcaagaaggaggccatcttttactgctgttggaacactagctactgtgactacccctgccagcaagcccactggcctgagcacatgaagtcctgcacccagtcagctactgctcctcagcaggaagcggatgctgaggtgaacacagaaacactaaataagtcctcccaggggagctcctcgagcacacaatcagcaccttcagaaacggccagcgcctccaaagagaaggagacgtcagctgagaaaagcaaggagagtggctcgacccttgacctttctggctccagagagacgccctcctccattctcttaggctccaaccaaggctctgttagcaaaaggtgtgacaagcaacctgcctatgccccaaccaccacagaccaccagccgcaccccaactaccccgcccagaagtaccattcccggagtaataaatccagttggagcagcagtgatgagaagaggggatcgacacgttccgatcacaacaccagtaccagcacgaagagcctcctcccgaaagagtctcggctggacaccttctgggactagcagtgaatcgggacacaaaccacccaccccattgggagaaaaacccagacgccaggaaaagaagaaacaacaaaggcaggagaacagccactttcagacttgaaaatgacaaaaccctcagttgagcctgagcccccggcgcgggggctgctacactacaggacacccagcatcggctttgactgcagactgttcacccacacgagccctgtgcttttggtgtaaataatgtacaatttgtggatgtcattgaatctagaggactttcccctttttatatttgtattaactttaacttattaaaaaaaaaaaaagaaaaagaaaaacgatttaaaaaaaaaaaaaaaa

SEQ ID NO: 100177 - protein, 1214 aa, Artificial Sequence
  derived and/or modified sequence
MDISTRSKDPGSAERTAQKRKFPSPPHSSNGHSPQDTSTSPIKKKKKPGLLNSNNKEQSELRHGPFYYMKQPLTTDPVDVVPQDGRNDFYCWVCHREGQVLCCELCPRVYHAKCLRLTSEPEGDWFCPECEKITVAECIETQSKAMTMLTIEQLSYLLKFAIQKMKQPGTDAFQKPVPLEQHPDYAEYIFHPMDLCTLEKNAKKKMYGCTEAFLADAKWILHNCIIYNGGNHKLTQIAKVVIKICEHEMNEIEVCPECYLAACQKRDNWFCEPCSNPHPLVWAKLKGFPFWPAKALRDKDGQVDARFFGQHDRAWVPINNCYLMSKEIPFSVKKTKSIFNSAMQEMEVYVENIRRKFGVFNYSPFRTPYTPNSQYQMLLDPTNPSAGTAKIDKQEKVKLNFDMTASPKILMSKPVLSGGTGRRISLSDMPRSPMSTNSSVHTGSDVEQDAEKKATSSHFSASEESMDFLDKSTASPASTKTGQAGSLSGSPKPFSPQLSAPITTKTDKTSTTGSILNLNLDRSKAEMDLKELSESVQQQSTPVPLISPKRQIRSRFQLNLDKTIESCKAQLGINEISEDVYTAVEHSDSEDSEKSDSSDSEYISDDEQKSKNEPEDTEDKEGCQMDKEPSAVKKKPKPTNPVEIKEELKSTSPASEKADPGAVKDKASPEPEKDFSEKAKPSPHPIKDKLKGKDETDSPTVHLGLDSDSESELVIDLGEDHSGREGRKNKKEPKEPSPKQDVVGKTPPSTTVGSHSPPETPVLTRSSAQTSAAGATATTSTSSTVTVTAPAPAATGSPVKKQRPLLPKETAPAVQRVVWNSSSKFQTSSQKWHMQKMQRQQQQQQQQNQQQQPQSSQGTRYQTRQAVKAVQQKEITQSPSTSTITLVTSTQSSPLVTSSGSMSTLVSSVNADLPIATASADVAADIAKYTSKMMDAIKGTMTEIYNDLSKNTTGSTIAEIRRLRIEIEKLQWLHQQELSEMKHNLELTMAEMRQSLEQERDRLIAEVKKQLELEKQQAVDETKKKQWCANCKKEAIFYCCWNTSYCDYPCQQAHWPEHMKSCTQSATAPQQEADAEVNTETLNKSSQGSSSSTQSAPSETASASKEKETSAEKSKESGSTLDLSGSRETPSSILLGSNQGSVSKRCDKQPAYAPTTTDHQPHPNYPAQKYHSRSNKSSWSSSDEKRGSTRSDHNTSTSTKSLLPKESRLDTFWD

SEQ ID NO: 100178 - DNA, 3645 bp, Artificial Sequence
  derived and/or modified sequence
atggacatcagcaccagaagcaaggaccccggcagcgccgagagaaccgcccagaagagaaagttccccagccccccccacagcagcaacggccacagcccccaggacaccagcaccagccccatcaagaagaagaagaagcccggcctgctgaacagcaacaacaaggagcagagcgagctgagacacggccccttctactacatgaagcagcccctgaccaccgaccccgtggacgtggtgccccaggacggcagaaacgacttctactgctgggtgtgccacagagagggccaggtgctgtgctgcgagctgtgccccagagtgtaccacgccaagtgcctgagactgaccagcgagcccgagggcgactggttctgccccgagtgcgagaagatcaccgtggccgagtgcatcgagacccagagcaaggccatgaccatgctgaccatcgagcagctgagctacctgctgaagttcgccatccagaagatgaagcagcccggcaccgacgccttccagaagcccgtgcccctggagcagcaccccgactacgccgagtacatcttccaccccatggacctgtgcaccctggagaagaacgccaagaagaagatgtacggctgcaccgaggccttcctggccgacgccaagtggatcctgcacaactgcatcatctacaacggcggcaaccacaagctgacccagatcgccaaggtggtgatcaagatctgcgagcacgagatgaacgagatcgaggtgtgccccgagtgctacctggccgcctgccagaagagagacaactggttctgcgagccctgcagcaacccccaccccctggtgtgggccaagctgaagggcttccccttctggcccgccaaggccctgagagacaaggacggccaggtggacgccagattcttcggccagcacgacagagcctgggtgcccatcaacaactgctacctgatgagcaaggagatccccttcagcgtgaagaagaccaagagcatcttcaacagcgccatgcaggagatggaggtgtacgtggagaacatcagaagaaagttcggcgtgttcaactacagccccttcagaaccccctacacccccaacagccagtaccagatgctgctggaccccaccaaccccagcgccggcaccgccaagatcgacaagcaggagaaggtgaagctgaacttcgacatgaccgccagccccaagatcctgatgagcaagcccgtgctgagcggcggcaccggcagaagaatcagcctgagcgacatgcccagaagccccatgagcaccaacagcagcgtgcacaccggcagcgacgtggagcaggacgccgagaagaaggccaccagcagccacttcagcgccagcgaggagagcatggacttcctggacaagagcaccgccagccccgccagcaccaagaccggccaggccggcagcctgagcggcagccccaagcccttcagcccccagctgagcgcccccatcaccaccaagaccgacaagaccagcaccaccggcagcatcctgaacctgaacctggacagaagcaaggccgagatggacctgaaggagctgagcgagagcgtgcagcagcagagcacccccgtgcccctgatcagccccaagagacagatcagaagcagattccagctgaacctggacaagaccatcgagagctgcaaggcccagctgggcatcaacgagatcagcgaggacgtgtacaccgccgtggagcacagcgacagcgaggacagcgagaagagcgacagcagcgacagcgagtacatcagcgacgacgagcagaagagcaagaacgagcccgaggacaccgaggacaaggagggctgccagatggacaaggagcccagcgccgtgaagaagaagcccaagcccaccaaccccgtggagatcaaggaggagctgaagagcaccagccccgccagcgagaaggccgaccccggcgccgtgaaggacaaggccagccccgagcccgagaaggacttcagcgagaaggccaagcccagcccccaccccatcaaggacaagctgaagggcaaggacgagaccgacagccccaccgtgcacctgggcctggacagcgacagcgagagcgagctggtgatcgacctgggcgaggaccacagcggcagagagggcagaaagaacaagaaggagcccaaggagcccagccccaagcaggacgtggtgggcaagaccccccccagcaccaccgtgggcagccacagcccccccgagacccccgtgctgaccagaagcagcgcccagaccagcgccgccggcgccaccgccaccaccagcaccagcagcaccgtgaccgtgaccgcccccgcccccgccgccaccggcagccccgtgaagaagcagagacccctgctgcccaaggagaccgcccccgccgtgcagagagtggtgtggaacagcagcagcaagttccagaccagcagccagaagtggcacatgcagaagatgcagagacagcagcagcagcagcagcagcagaaccagcagcagcagccccagagcagccagggcaccagataccagaccagacaggccgtgaaggccgtgcagcagaaggagatcacccagagccccagcaccagcaccatcaccctggtgaccagcacccagagcagccccctggtgaccagcagcggcagcatgagcaccctggtgagcagcgtgaacgccgacctgcccatcgccaccgccagcgccgacgtggccgccgacatcgccaagtacaccagcaagatgatggacgccatcaagggcaccatgaccgagatctacaacgacctgagcaagaacaccaccggcagcaccatcgccgagatcagaagactgagaatcgagatcgagaagctgcagtggctgcaccagcaggagctgagcgagatgaagcacaacctggagctgaccatggccgagatgagacagagcctggagcaggagagagacagactgatcgccgaggtgaagaagcagctggagctggagaagcagcaggccgtggacgagaccaagaagaagcagtggtgcgccaactgcaagaaggaggccatcttctactgctgctggaacaccagctactgcgactacccctgccagcaggcccactggcccgagcacatgaagagctgcacccagagcgccaccgccccccagcaggaggccgacgccgaggtgaacaccgagaccctgaacaagagcagccagggcagcagcagcagcacccagagcgcccccagcgagaccgccagcgccagcaaggagaaggagaccagcgccgagaagagcaaggagagcggcagcaccctggacctgagcggcagcagagagacccccagcagcatcctgctgggcagcaaccagggcagcgtgagcaagagatgcgacaagcagcccgcctacgcccccaccaccaccgaccaccagccccaccccaactaccccgcccagaagtaccacagcagaagcaacaagagcagctggagcagcagcgacgagaagagaggcagcaccagaagcgaccacaacaccagcaccagcaccaagagcctgctgcccaaggagagcagactggacaccttctgggactag

SEQ ID NO: 100179 - DNA, 3645 bp, Artificial Sequence
  derived and/or modified sequence
atggatatctccactaggagtaaggatcccggaagcgcagaacggacagctcagaagcggaagttcccttcccctccccacagcagcaatggacacagtccacaagatacctcaaccagccctatcaagaaaaaaaagaagcctggtctactgaacagcaacaacaaagagcagtctgaattgaggcacgggccattctactacatgaagcagccattaaccacggacccggtggatgtagtcccacaggatggcaggaacgatttttactgttgggtctgtcatcgagaaggccaggtgctttgttgcgagctatgccccagagtctaccacgctaaatgcttgcggctgacaagcgagcctgaaggagattggttctgccccgaatgcgagaagattaccgtggccgagtgcatcgagacacagtccaaagccatgactatgctaaccattgagcaactgagttatttactcaagttcgcaatacagaaaatgaaacagcccggaactgacgccttccagaaacccgtccctctggaacaacatcccgactacgcagagtatatttttcatccaatggacttatgcaccctggaaaagaacgcaaagaaaaaaatgtacgggtgcaccgaagccttcctcgccgacgccaagtggattctgcataactgcattatatataacgggggcaatcataaactgacacagatcgcaaaagttgtgattaaaatatgcgagcacgagatgaatgaaatcgaggtttgtcccgagtgctatcttgccgcttgccagaaaagagacaattggttctgcgaaccttgctccaatcctcacccgctcgtgtgggcgaagttgaaggggttccccttttggcccgccaaagccctgcgggacaaggacggtcaggtggatgcccggtttttcggccagcatgacagagcttgggtccctattaataattgttacctcatgtccaaggagattcccttcagtgtgaaaaaaaccaagtcaattttcaattccgccatgcaagaaatggaagtgtacgtagaaaatataagacgcaagttcggggtcttcaactactcacccttcagaaccccttacacaccaaactcgcagtatcagatgctacttgacccaaccaaccccagcgccggaactgccaagatcgacaaacaggagaaagtcaagctgaacttcgacatgaccgcatcaccaaagattctcatgtctaaaccagtgctgtccggagggaccggaaggcgaataagcctctctgatatgcctagatctccaatgagtactaatagttcagtacatactgggagtgacgtcgagcaggatgcagagaagaaggctacttcttcccacttctctgcttcggaagagtctatggatttcctggataagagcactgcatcccctgctagcactaaaactggtcaggccggatcactgtctggcagtccgaaaccattttctccccagctcagcgctcccattacaacaaaaacagataagaccagcaccacaggttccattcttaatttgaatttagacagaagtaaggccgaaatggacctgaaggaactgagcgaatccgtccagcagcagtccactcccgtgccactgatcagtcccaaacggcagatacgtagcaggttccagctgaacttggacaaaactattgagtcgtgtaaagctcagttgggaattaatgagatatctgaagatgtgtacactgccgttgagcactctgatagtgaagattccgaaaagtctgattcatcggattctgagtatatctcggacgacgagcagaagagcaaaaacgaaccagaagacacagaggataaagaaggttgccagatggacaaagagccaagcgcagtcaagaagaagcccaagcccaccaaccctgtggagatcaaggaggagctcaagtctacttcccctgctagcgagaaggccgatccaggtgccgtgaaggacaaagcttcaccggagccagaaaaggattttagcgagaaggccaagccctccccacaccccatcaaagataagctgaaaggaaaagacgagacagacagcccaaccgtgcatctggggttagattctgactctgagagcgaactggtgatcgacttgggagaagaccacagcggccgagagggccgtaaaaataaaaaagagcccaaagagcctagtcccaaacaggacgtggttggaaaaactccaccctccaccactgttgggagtcactctccgccagagacaccagtgttgacaaggtcctccgcccagacatcagcagctggcgcgaccgcaacaacttccactagtagtactgttacagtgacagcaccagccccagcggccactgggagtcctgttaagaagcagcgccctctgctcccaaaggaaacagcgccggctgttcaacgggtcgtgtggaatagttcgagtaagtttcagacatcctcgcaaaaatggcatatgcaaaaaatgcaaagacagcagcaacagcagcagcagcaaaaccagcagcagcagccccagagtagccagggcactcggtaccaaaccaggcaggccgtcaaggccgttcagcaaaaggaaattacccagtccccatcaacctcgacgatcaccctggtgaccagtacacaatcatctcctctggtcacctcttctggatcaatgagtaccctggtgtcatcggtgaacgcggatctgcctatcgccactgcaagcgctgatgtagcggccgacattgcaaaatatacttcgaagatgatggatgctatcaagggtaccatgacagagatctataacgacttaagcaaaaacaccaccggtagcactatcgccgaaatcaggaggctacggatcgaaatcgaaaagttacaatggctgcatcaacaggaattaagtgagatgaagcacaacctggagctgaccatggccgagatgcggcaatccctcgaacaggaaagggaccgcctcatcgcagaggtaaaaaagcaattagagttagaaaagcagcaagctgtggacgaaacaaaaaaaaaacaatggtgtgcgaactgcaagaaggaagccatcttctattgctgctggaatacctcctattgtgactacccttgccagcaggctcactggcctgagcacatgaagtcctgcacccagtctgcaaccgcacctcagcaggaggctgacgctgaggtgaacacagaaaccttgaacaaatcgtctcagggcagctctagttccacccaatccgcccccagtgagacggcaagtgcctccaaagaaaaggagacaagcgctgaaaagagcaaagagtccggatccaccctagatctgtccggctcccgagagacgccatcctctatccttttggggagtaatcagggtagcgtgagcaaaagatgtgacaaacaaccagcatacgcgccgaccaccacagaccatcagccccacccaaattatccagcccaaaaatatcattcacggagcaataagtcctcttggtcatccagcgatgagaaacgtggcagtacacggagcgatcacaacacaagcaccagcaccaaaagtctactacccaaagaatcacggttagacacgttctgggactag

SEQ ID NO: 100180 - DNA, 3645 bp, Artificial Sequence
  derived and/or modified sequence
atggacatcagcaccaggagcaaggaccccggcagcgctgagaggacagcccagaagaggaagttccccagccccccccacagcagcaatggccacagcccccaggacaccagcaccagccccatcaagaagaagaagaagccaggcctgctgaacagcaacaacaaggagcagagcgagctgcggcacggccccttctactacatgaagcagcccctgaccacagatcctgtggatgtggtgccccaggacggcagaaatgacttctactgctgggtgtgccaccgggagggccaggtgctgtgctgtgagctgtgcccccgggtgtaccacgccaagtgcctgcggctgaccagcgagcctgagggggactggttctgcccagaatgtgagaagatcaccgtggctgaatgtattgagacccagagcaaggccatgaccatgctgaccatcgagcagctgagctacctgctgaagtttgccatccagaagatgaagcagcccggcacagatgccttccagaagcctgtgcccctggagcagcacccagactatgcagagtacatcttccaccccatggacctgtgcaccctggagaagaatgccaagaagaagatgtatggctgcacagaggccttcctggctgatgccaagtggatcctgcacaactgcatcatctacaacggcggcaaccacaagctgacccagatcgccaaggtggtgatcaagatctgtgaacatgagatgaatgaaattgaggtgtgcccagagtgctacctggccgcctgccagaagagggacaactggttctgtgagccctgcagcaacccccaccccctggtgtgggccaagctgaagggcttccccttctggccagccaaggccctgcgggacaaggatggccaggtggatgcccgcttcttcggccagcacgaccgggcctgggtgcccatcaacaactgctacctgatgagcaaggagatccccttctctgtgaagaagaccaagagcatcttcaacagcgccatgcaggagatggaggtgtatgtggagaacatccggaggaagtttggagtcttcaactacagccccttccgcaccccctacacccccaacagccagtaccagatgctgctggaccccaccaaccccagcgctggaacagccaagattgacaagcaggagaaggtgaagctgaactttgacatgacagccagccccaagatcctgatgagcaagcctgtgctgagcggcggcaccggccgccgcatcagcctgagtgacatgcccaggagccccatgagcaccaacagctctgtgcacacaggcagtgatgtggagcaggatgctgagaagaaggccaccagcagccacttcagcgccagcgaggagagcatggacttcctggacaagagcacagccagccctgccagcaccaagacaggccaggccggcagcctgagcggcagccccaagcccttcagcccccagctgagcgcccccatcaccaccaagacagacaagaccagcaccaccggcagcatcctgaacctgaacctggacaggagcaaggccgagatggacctgaaggagctgtctgagagcgtgcagcagcagagcacccctgtgcccctcatcagccccaagaggcagatccgcagccgcttccagctgaacctggacaagaccatcgagagctgcaaggcccagctgggcatcaatgagatcagtgaagatgtgtacacagctgtggagcacagcgacagcgaggacagcgagaagagtgacagcagtgacagcgagtacatcagtgatgatgagcagaagagcaagaatgaacctgaggacacagaggacaaggagggctgccagatggacaaggagcccagcgctgtgaagaagaagcccaagcccaccaaccctgtggagatcaaggaggagctgaagagcaccagccctgccagcgagaaggctgaccccggggctgtgaaggacaaggccagccctgagcctgagaaggacttcagcgagaaggccaagcccagcccccaccccatcaaggacaagctgaagggcaaggatgaaacagacagccccaccgtgcacctgggcctggacagcgacagcgagagcgagctggtgattgacctgggggaggaccacagcggccgggagggcaggaagaacaagaaggagcccaaggagcccagccccaagcaggatgtggtgggcaagaccccacccagcaccaccgtgggcagccacagccccccagagacccctgtgctgaccaggagcagcgcccagaccagcgctgctggggccacagccaccaccagcaccagcagcacagtgacagtgacagccccagccccagctgccaccggcagccctgtgaagaagcagaggcccctgctgcccaaggagacagccccagctgtgcagagggtggtgtggaacagcagcagcaagttccagaccagcagccagaagtggcacatgcagaagatgcagaggcagcagcagcagcagcagcagcagaaccagcagcagcagccccagagcagccagggcacccgctaccagacccggcaggccgtgaaggctgtgcagcagaaggagatcacccagagccccagcaccagcaccatcaccctggtgaccagcacccagagcagccccctggtgaccagcagcggctccatgagcaccctggtgtcctctgtgaatgctgacctgcccatcgccacagccagcgcagatgtggccgctgacatcgccaagtacaccagcaagatgatggatgccatcaagggcaccatgacagagatctacaatgacctgagcaagaacaccaccggcagcaccatcgccgagatccggcggctgagaattgaaattgagaagctgcagtggctgcaccagcaggagctgtctgagatgaagcacaacctggagctgaccatggccgagatgaggcagagcctggagcaggagcgggaccggctgattgctgaggtgaagaagcagctggagctggagaagcagcaggccgtggatgagaccaagaagaagcagtggtgtgccaactgcaagaaggaggccatcttctactgctgctggaacaccagctactgtgactacccctgccagcaggcccactggccagagcacatgaagagctgcacccagagcgccacagccccccagcaggaggctgatgctgaggtgaacacagagaccctgaacaagagcagccagggcagcagcagcagcacccagagcgcccccagcgagacagccagcgccagcaaggagaaggagaccagcgctgagaagagcaaggagagcggcagcaccctggacctgagcggcagccgggagacccccagcagcatcctgctgggcagcaaccagggctctgtgtccaagagatgtgacaagcagcctgcctatgcccccaccaccacagaccaccagccccaccccaactacccagcccagaagtaccacagccgcagcaacaagagctcctggagcagcagtgatgagaagaggggcagcaccaggagtgaccacaacaccagcaccagcaccaagagcctgctgcccaaggagagccggctggacaccttctgggactag

SEQ ID NO: 100181 - DNA, 3645 bp, Artificial Sequence
  derived and/or modified sequence
atggacatcagcacccggagcaaggaccccggcagcgccgagcggaccgcccaaaagagaaagtttccgtccccaccacatagctcgaatgggcattcacctcaagacacaagcacctctccaatcaaaaagaagaagaagcctgggctgctgaacagcaacaataaggagcagagcgagctgcgccatgggcccttctattatatgaagcaacctcttaccacagaccccgttgacgtggtgccccaggatgggagaaatgatttctactgttgggtctgccatcgtgagggccaggtgctttgctgtgagctgtgtccgcgagtttaccacgctaagtgtctgcgcttgaccagcgagcccgagggggactggttctgtcctgaatgcgagaagattaccgttgctgagtgtattgagacacagagtaaggccatgacgatgctgacaattgaacagctgagctacctgctcaaatttgccatccagaagatgaagcagccaggtacagacgcttttcaaaagcccgtaccgttggaacaacatcctgactatgccgaatatatctttcacccaatggatctttgtacgctggaaaagaatgcaaaaaagaagatgtatggatgtactgaagcctttctggccgatgccaaatggattctgcataactgtatcatttataatggcggaaatcataagcttactcagattgcaaaggtggtcatcaagatctgcgagcacgagatgaatgaaatcgaagtctgtcccgaatgttacttggccgcttgtcagaagagggataattggttctgtgagccttgctccaacccccatccactcgtgtgggcaaagctcaaagggtttccattctggcccgccaaagcactcagagataaggacggacaagtggatgcgagattctttgggcaacatgatagggcttgggtgccaataaacaattgctatctgatgtcaaaggagatcccgtttagcgtgaaaaagacaaagtcaattttcaactcagctatgcaggaaatggaggtatacgtagaaaatatccgcagaaagtttggcgtgttcaactacagtccattcagaacaccttacacccccaacagccagtatcagatgttgctggatcccactaaccctagtgcaggaacagctaaaattgataaacaggagaaggtgaaacttaattttgatatgacagcttcgcccaaaatattgatgtctaaaccagtgttgtctggtggtaccgggaggaggatttccctgtcggacatgccgaggtctcccatgagcacaaattcgagtgtgcacacgggctctgacgtggaacaggatgccgaaaagaaggctacctcttcgcattttagtgcgtctgaagaatccatggatttccttgataagtccactgcatctcccgcaagtacaaagaccggccaggcaggatctctatctggaagtccaaaacccttctcaccgcagctatctgcaccaatcacaacgaaaacagacaaaacgtccacaaccggttccatcctgaatttgaatctcgacagatcgaaggccgagatggatctaaaggagcttagcgaatcagtacagcaacagtctaccccagtacctctgatctcccccaaaagacagatacgcagtcgcttccagttgaaccttgataaaacgattgagtcctgcaaagcacaactcgggattaatgagataagcgaggacgtttacaccgccgtggagcattccgatagcgaggatagcgaaaaatccgactctagcgactcagaatacatctcggacgacgagcaaaagtccaaaaacgaacctgaggacacagaagacaaagaggggtgccagatggacaaagagccctccgcagtcaaaaaaaaacctaaaccgaccaacccggtcgaaatcaaagaggaactgaagtcgacaagtcctgccagcgaaaaggccgatcctggcgcagtgaaggataaagcaagccccgaaccagaaaaagacttctcggagaaggcgaaaccttccccacacccaatcaaagataaactaaagggcaaggatgagactgactcaccaaccgtccatctgggcctggactctgactccgaatctgaactcgtgatcgacctgggggaggatcactctggcagagagggccgcaagaataaaaaggagcccaaagaaccctcacctaagcaggacgtcgtgggaaaaacacctcccagcactaccgtgggcagccattctccacccgagacccccgtgctcaccaggtcttctgcccaaacctctgcagccggagcaactgccaccacatcgacgagcagcaccgtgaccgtgaccgctcccgccccagcagcaacagggtcccccgtgaagaaacagagacccctgctgccaaaggagactgcacccgccgtgcagcgcgtggtgtggaattcctcgagcaaatttcagacatcctcacagaagtggcacatgcaaaagatgcagcgccaacaacagcagcagcagcagcagaaccagcagcagcagccccagagctctcaaggaactcggtaccagacccgccaggcggttaaggccgtacagcaaaaggagatcacgcagagcccttctacttcaacaataacactggtgacctctacacaatcaagccctctcgtgacctccagcgggagtatgtctacactagtttcaagcgtgaatgccgacctgcccattgctaccgcgtccgctgatgtggccgcggacatcgccaaatatacatccaagatgatggacgccatcaaaggcacaatgactgaaatttataatgacctgtctaagaacactacgggctcaactattgccgaaattaggagactccgcattgagattgaaaagctgcagtggctgcatcaacaggagctctccgaaatgaaacataacctcgagctgacaatggccgaaatgagacagtcattagagcaggaacgagacagactcatcgctgaagtgaaaaagcagttggaattggagaaacaacaggccgtggacgagactaaaaaaaagcagtggtgcgctaactgtaaaaaggaggctattttctattgctgctggaacacatcttactgtgattacccatgccagcaggcgcactggccagaacacatgaagagctgtacacaatcagcaactgcccctcagcaggaggcagatgcagaggtaaacaccgagaccttgaacaagtcatcacaaggttcctcttcaagtacccagtcagcaccctccgaaaccgcttctgcatccaaggagaaagaaacttctgccgagaagtctaaggagtctgggagcacactggatctgtccggaagccgggagactccatccagcatcttgctgggttctaaccagggcagcgttagcaagaggtgcgacaagcagcctgcatatgctccaacaactacggaccatcagccgcatcctaactaccctgctcaaaaataccattctcggagcaacaagtcatcttggtcgagtagcgacgaaaagcgtggaagtacccgtagcgatcacaacacatccacgtctacaaaatcactgctgccgaaggagagtaggctggacaccttctgggattag

SEQ ID NO: 100182 - DNA, 3645 bp, Artificial Sequence
  derived and/or modified sequence
atggacatctcaacccgctcaaaagatccaggcagcgctgaacgcaccgcccaaaaaaggaaattcccatccccaccccacagctccaatggccactccccccaagacacaagcacttctcccatcaagaagaaaaagaagcctgggctgttaaactcaaacaataaggagcagagcgaactcagacatggcccattttactatatgaaacagccactcacaacagacccagtcgatgtggtcccccaagacggcaggaatgacttttattgctgggtttgccatcgggaaggacaagtgctgtgttgcgagctgtgccccagagtttaccatgcaaagtgtcttcgtctcacctcggagcccgagggagactggttctgtcccgagtgtgagaagatcacggtcgcggaatgcattgaaacgcaatccaaggccatgacaatgttaaccatcgaacagctgtcatacttattgaagttcgccattcagaaaatgaagcagccagggactgatgccttccaaaaaccggtccctctggagcagcatccagattacgcggagtatatcttccaccccatggacctgtgcaccctagagaagaacgcaaagaagaaaatgtatggatgtactgaggctttcctggcagatgcaaaatggatcctacacaactgcattatctacaacggaggaaatcataagctgacccagatcgctaaggtcgtaattaaaatttgcgagcatgagatgaacgagatagaagtatgcccagaatgctatctggcggcatgtcagaaacgggacaattggttctgcgagccgtgttctaacccccatccgctggtatgggccaaactgaaagggttcccattctggccagccaaagccctgcgggacaaagatggccaggtcgatgctagatttttcggccaacatgatagagcttgggtacccataaacaattgctacctaatgagcaaagaaattccatttagtgtaaagaaaaccaagtcaattttcaattcagccatgcaggaaatggaggtttatgtggagaacattagacgcaagtttggggtgtttaattacagcccattccgcacaccctatacgcccaattcccagtatcaaatgcttctggatccgaccaacccatctgctggcacggctaagattgacaagcaggagaaagtgaagctgaactttgacatgacagcgtctcctaaaattctaatgagcaagcctgtgctatctggcggtaccggcaggcgaatctctcttagtgacatgccacggagcccaatgtctacgaatagttcagtgcatacgggcagcgacgtagagcaggatgctgagaagaaagcgacgagctcccacttttcggcgagcgaggagtccatggacttcttggataaatcaacagcgtctcctgcatcaacaaaaactggacaggccggaagtctgtccggaagccccaagcctttttcacctcagctgagcgccccaataactactaagaccgacaagacgtccacaaccggcagtatcctcaatctcaacctagataggtccaaagccgagatggatttgaaagaactaagcgaatctgtacaacagcagtctacccctgtaccactgatcagcccgaagcgtcagatcaggtctcggtttcagctgaacctggacaagactattgaatcttgtaaagcgcagctcggcatcaacgaaattagtgaggatgtgtacaccgccgtggagcatagcgatagtgaggacagtgagaaatccgactcctctgactctgagtatatcagcgatgacgagcagaaatctaaaaacgaaccggaagatactgaggacaaggagggttgtcaaatggacaaggagcctagcgccgtgaaaaagaaacccaagcctacaaacccagtagagatcaaggaggaacttaaatccacctcccctgcctccgaaaaggccgatccaggagccgttaaagacaaggcctctcccgaacccgagaaagatttctctgagaaggccaagccaagccctcatcccatcaaggacaaactgaagggaaaagatgagaccgattctccaaccgtacacctagggctcgactctgatagcgagagcgaacttgtgatcgaccttggagaggaccactccggccgtgagggtcgcaaaaacaagaaagagcccaaagagccctcgccaaagcaggatgtggtggggaaaacaccaccctccaccaccgttggtagccactctccacccgagaccccagtactgacgaggtcctctgcacagacctccgcggcaggggcaacagctaccacatccacttcaagcacagtgacggtaaccgcacctgctccagccgcaactggctcgcctgtcaagaagcagcgtccactgctcccaaaggagacagccccagccgtacagcgcgtggtgtggaatagctcaagcaagttccagaccagcagccagaagtggcacatgcagaaaatgcaaaggcaacagcaacagcagcaacagcaaaaccagcagcaacagccacagagttctcagggaactcgatatcagacccgccaggccgtcaaggccgtccagcagaaagaaatcacacagagtccaagtaccagtaccattactctggttacgtctacgcagagctcacccttggttacttcctcgggctccatgagcaccctcgtatctagtgtgaacgctgaccttcctatagcaacagcgtccgccgacgtagccgcagatattgctaaatatacttccaaaatgatggacgctataaagggaacaatgactgagatctacaacgacttgtcgaagaacaccaccgggagcacgattgcggagatccgaagacttcgcatcgaaattgagaaacttcaatggctacaccagcaggagctgagcgagatgaagcacaatctggaactcactatggctgaaatgcggcagtctttggagcaggaaagagatcgacttattgctgaggtgaagaagcagcttgaattggagaagcaacaagcggtggatgagacgaagaagaagcagtggtgcgcaaactgcaagaaagaagccatcttttactgctgttggaatacgagctattgtgattatccttgtcagcaggcccactggccagaacacatgaagtcatgtacccagagcgccaccgccccacagcaggaggctgatgccgaagtcaacactgagacactaaataagtcatcacaagggagcagctcttctactcaatcagcgccatcggagactgcaagcgcctctaaggaaaaggagactagtgcagaaaagagcaaggaatccggctctacactggacttgtccgggagccgcgagacaccctcatccatcttgttaggatctaatcaggggtcagtgagtaaacgctgcgataagcaacccgcatatgcgccaacgaccactgaccatcagccacatccaaattatccagcgcagaagtatcatagtaggtcaaacaaatcatcttggtccagctctgatgaaaagcgtggttccacaagatctgaccacaacacgtctacgagcactaagtccttgttacctaaggaatcaaggcttgacaccttttgggattag

SEQ ID NO: 100183 - DNA, 3861 bp, Artificial Sequence
  derived and/or modified sequence
ataagtattgacattacacagtgttaacaatgcatccacagagtcccaaatctgccagcctgttctctcttcctaactgtggaaaaatgagacggttgcttgaacatttgttggcttggctgaagaggaaataaaaacagaacaggaggtggtagagggcatggatatctctactcgctccaaagatcctggctctgcagagagaacagcccagaaaagaaagttccccagccctccacattcttccaatggccactcgccgcaggacacatcaacaagccccattaaaaagaaaaagaaacctggcttactgaacagtaacaataaggagcagtcagaactaagacatggtccgttttactatatgaagcagccactcaccacagaccctgttgatgttgtaccgcaggatggacggaatgatttctactgctgggtttgtcaccgggaaggccaagtcctttgctgtgagctctgtccccgggtttatcacgctaagtgtctgagactgacatcggaaccagagggggactggttttgtcctgaatgtgagaaaattacagtagcagaatgcatcgagacccagagtaaagccatgacaatgctcaccattgaacagttatcctacctgctcaagtttgccattcagaaaatgaaacagccagggacagatgcattccagaagcccgttccattggaacagcaccctgactatgcggaatacatcttccatccaatggacctttgtacattggaaaagaatgcgaaaaagaaaatgtatggctgcacagaagccttcctggctgatgcaaagtggattttgcacaactgcatcatttataatgggggaaatcacaaattgacgcaaatagcgaaagtagtcatcaaaatctgtgaacatgagatgaatgaaatcgaagtatgtccagaatgttatctagctgcttgccaaaaacgagataactggttttgtgagccttgtagcaatccacatcctttggtctgggccaaactgaaggggtttccattctggcctgcaaaagctctaagggataaagacgggcaggtcgatgcccgattctttggacaacatgacagggcctgggttccaataaataattgctacctcatgtctaaagaaattcctttttctgtgaaaaagactaagagcatcttcaacagtgccatgcaagagatggaggtttacgtggagaacatccgcaggaagtttggggtttttaattactctccatttaggacaccctacacacccaacagccagtatcaaatgctgctcgatcccaccaaccccagcgccggcactgccaagatagacaagcaggagaaggtcaagctcaactttgacatgacggcatcccccaagatcctgatgagcaagcctgtgctgagtgggggcacaggccgccggatttccttgtcggatatgccgcgctcccccatgagcacaaactcttctgtgcacacgggctccgacgtggagcaggatgctgagaagaaggccacgtcgagccacttcagtgcgagcgaggagtccatggacttcctggataagagcacagcttcaccagcctccaccaagacgggacaagcagggagtttatccggcagcccaaagcccttctctcctcaactgtcagctcctatcacgacgaaaacggacaaaacctccaccaccggcagcatcctgaatcttaacctggatcgaagcaaagctgagatggatttgaaggagctgagcgagtcggtccagcaacagtccacccctgttcctctcatctctcccaagcgccagattcgtagcaggttccagctgaatcttgacaagaccatagagagttgcaaagcacaattaggcataaatgaaatctcggaagatgtctatacggccgtagagcacagcgattcggaggattctgagaagtcagatagtagcgatagtgagtatatcagtgatgatgagcagaagtctaagaacgagccagaagacacagaggacaaagaaggttgtcagatggacaaagagccatctgctgttaaaaaaaagcccaagcctacaaacccagtggagattaaagaggagctgaaaagcacgtcaccagccagcgagaaggcagaccctggagcagtcaaggacaaggccagccctgagcctgagaaggacttttccgaaaaggcaaaaccttcacctcaccccataaaggataaactgaagggaaaagatgagacggattccccaacagtccatttgggcctggactctgattcagagagcgaacttgtcatagatttaggagaagaccattctgggcgggagggtcgaaaaaataagaaggaacccaaagaaccatctcccaaacaggatgttgtaggtaaaactccaccatccacgacggtgggcagccattctcccccggaaacaccggtgctcacccgctcttccgcccaaacttccgcggctggcgccacagccaccaccagcacgtcctccacggtcaccgtcacggccccggcccccgccgccacaggaagcccagtgaaaaagcagaggccgcttttaccgaaggagactgccccggccgtgcagcgggtcgtgtggaactcatcaagtaagtttcaaacgtcctcccaaaagtggcacatgcagaagatgcagcgtcagcagcagcagcagcagcagcaaaaccagcagcagcagcctcagtcttcccaggggacgagatatcagaccagacaggctgtgaaagctgtccagcagaaggagatcacacagagcccatccacgtccaccatcaccctggtgaccagcacacagtcatcgcccctggtcaccagctcggggtccatgagcacccttgtgtcctcagtcaacgctgacctgcccatcgccactgcctcagctgatgtcgccgctgatattgccaagtacactagcaaaatgatggatgcaataaaaggaacaatgacagaaatatacaacgatctttctaaaaacactactggaagcacaatagctgagattcgcaggctgaggatcgagatagagaagctccagtggctgcaccagcaagagctctccgaaatgaaacacaacttagagctgaccatggcggagatgcggcagagcctggagcaggagcgggaccggctcatcgccgaggtgaagaagcagctggagttggagaagcagcaggcggtggatgagaccaagaagaagcagtggtgcgccaactgcaagaaggaggccatcttttactgctgttggaacactagctactgtgactacccctgccagcaagcccactggcctgagcacatgaagtcctgcacccagtcagctactgctcctcagcaggaagcggatgctgaggtgaacacagaaacactaaataagtcctcccaggggagctcctcgagcacacaatcagcaccttcagaaacggccagcgcctccaaagagaaggagacgtcagctgagaaaagcaaggagagtggctcgacccttgacctttctggctccagagagacgccctcctccattctcttaggctccaaccaaggctctgttagcaaaaggtgtgacaagcaacctgcctatgccccaaccaccacagaccaccagccgcaccccaactaccccgcccagaagtaccattcccggagtaataaatccagttggagcagcagtgatgagaagaggggatcgacacgttccgatcacaacaccagtaccagcacgaagagcctcctcccgaaagagtctcggctggacaccttctgggactagcagtgaatcgggacacaaaccacccaccccattgggagaaaaacccagacgccagg

SEQ ID NO: 100184 - protein, 1105 aa, Artificial Sequence
  derived and/or modified sequence
MDISTRSKDPGSAERTAQKRKFPSPPHSSNGHSPQDTSTSPIKKKKKPGLLNSNNKEQDGRNDFYCWVCHREGQVLCCELCPRVYHAKCLRLTSEPEGDWFCPECETDAFQKPVPLEQHPDYAEYIFHPMDLCTLEKNAKKKMYGCTEAFLADAKWILHNCIIYNGGNHKLTQIAKVVIKICEHEMNEIEVCPECYLAACQKRDNWFCEPCSNPHPLVWAKLKGFPFWPAKALRDKDGQVDARFFGQHDRAWVPINNCYLMSKEIPFSVKKTKSIFNSAMQEMEVYVENIRRKFGVFNYSPFRTPYTPNSQYQMLLDPTNPSAGTAKIDKQEKVKLNFDMTASPKILMSKPVLSGGTGRRISLSDMPRSPMSTNSSVHTGSDVEQDAEKKATSSHFSASEESMDFLDKSTASPASTKTGQAGSLSGSPKPFSPQLSAPITTKTDKTSTTGSILNLNLDRSKAEMDLKELSESVQQQSTPVPLISPKRQIRSRFQLNLDKTIESCKAQLGINEISEDVYTAVEHSDSEDSEKSDSSDSEYISDDEQKSKNEPEDTEDKEGCQMDKEPSAVKKKPKPTNPVEIKEELKSTSPASEKADPGAVKDKASPEPEKDFSEKAKPSPHPIKDKLKGKDETDSPTVHLGLDSDSESELVIDLGEDHSGREGRKNKKEPKEPSPKQDVVGKTPPSTTVGSHSPPETPVLTRSSAQTSAAGATATTSTSSTVTVTAPAPAATGSPVKKQRPLLPKETAPAVQRVVWNSSTVQQKEITQSPSTSTITLVTSTQSSPLVTSSGSMSTLVSSVNADLPIATASADVAADIAKYTSKMMDAIKGTMTEIYNDLSKNTTGSTIAEIRRLRIEIEKLQWLHQQELSEMKHNLELTMAEMRQSLEQERDRLIAEVKKQLELEKQQAVDETKKKQWCANCKKEAIFYCCWNTSYCDYPCQQAHWPEHMKSCTQSATAPQQEADAEVNTETLNKSSQGSSSSTQSAPSETASASKEKETSAEKSKESGSTLDLSGSRETPSSILLGSNQGSVSKRCDKQPAYAPTTTDHQPHPNYPAQKYHSRSNKSSWSSSDEKRGSTRSDHNTSTSTKSLLPKESRLDTFWD

SEQ ID NO: 100185 - DNA, 3318 bp, Artificial Sequence
  derived and/or modified sequence
atggacatcagcaccagaagcaaggaccccggcagcgccgagagaaccgcccagaagagaaagttccccagccccccccacagcagcaacggccacagcccccaggacaccagcaccagccccatcaagaagaagaagaagcccggcctgctgaacagcaacaacaaggagcaggacggcagaaacgacttctactgctgggtgtgccacagagagggccaggtgctgtgctgcgagctgtgccccagagtgtaccacgccaagtgcctgagactgaccagcgagcccgagggcgactggttctgccccgagtgcgagaccgacgccttccagaagcccgtgcccctggagcagcaccccgactacgccgagtacatcttccaccccatggacctgtgcaccctggagaagaacgccaagaagaagatgtacggctgcaccgaggccttcctggccgacgccaagtggatcctgcacaactgcatcatctacaacggcggcaaccacaagctgacccagatcgccaaggtggtgatcaagatctgcgagcacgagatgaacgagatcgaggtgtgccccgagtgctacctggccgcctgccagaagagagacaactggttctgcgagccctgcagcaacccccaccccctggtgtgggccaagctgaagggcttccccttctggcccgccaaggccctgagagacaaggacggccaggtggacgccagattcttcggccagcacgacagagcctgggtgcccatcaacaactgctacctgatgagcaaggagatccccttcagcgtgaagaagaccaagagcatcttcaacagcgccatgcaggagatggaggtgtacgtggagaacatcagaagaaagttcggcgtgttcaactacagccccttcagaaccccctacacccccaacagccagtaccagatgctgctggaccccaccaaccccagcgccggcaccgccaagatcgacaagcaggagaaggtgaagctgaacttcgacatgaccgccagccccaagatcctgatgagcaagcccgtgctgagcggcggcaccggcagaagaatcagcctgagcgacatgcccagaagccccatgagcaccaacagcagcgtgcacaccggcagcgacgtggagcaggacgccgagaagaaggccaccagcagccacttcagcgccagcgaggagagcatggacttcctggacaagagcaccgccagccccgccagcaccaagaccggccaggccggcagcctgagcggcagccccaagcccttcagcccccagctgagcgcccccatcaccaccaagaccgacaagaccagcaccaccggcagcatcctgaacctgaacctggacagaagcaaggccgagatggacctgaaggagctgagcgagagcgtgcagcagcagagcacccccgtgcccctgatcagccccaagagacagatcagaagcagattccagctgaacctggacaagaccatcgagagctgcaaggcccagctgggcatcaacgagatcagcgaggacgtgtacaccgccgtggagcacagcgacagcgaggacagcgagaagagcgacagcagcgacagcgagtacatcagcgacgacgagcagaagagcaagaacgagcccgaggacaccgaggacaaggagggctgccagatggacaaggagcccagcgccgtgaagaagaagcccaagcccaccaaccccgtggagatcaaggaggagctgaagagcaccagccccgccagcgagaaggccgaccccggcgccgtgaaggacaaggccagccccgagcccgagaaggacttcagcgagaaggccaagcccagcccccaccccatcaaggacaagctgaagggcaaggacgagaccgacagccccaccgtgcacctgggcctggacagcgacagcgagagcgagctggtgatcgacctgggcgaggaccacagcggcagagagggcagaaagaacaagaaggagcccaaggagcccagccccaagcaggacgtggtgggcaagaccccccccagcaccaccgtgggcagccacagcccccccgagacccccgtgctgaccagaagcagcgcccagaccagcgccgccggcgccaccgccaccaccagcaccagcagcaccgtgaccgtgaccgcccccgcccccgccgccaccggcagccccgtgaagaagcagagacccctgctgcccaaggagaccgcccccgccgtgcagagagtggtgtggaacagcagcaccgtgcagcagaaggagatcacccagagccccagcaccagcaccatcaccctggtgaccagcacccagagcagccccctggtgaccagcagcggcagcatgagcaccctggtgagcagcgtgaacgccgacctgcccatcgccaccgccagcgccgacgtggccgccgacatcgccaagtacaccagcaagatgatggacgccatcaagggcaccatgaccgagatctacaacgacctgagcaagaacaccaccggcagcaccatcgccgagatcagaagactgagaatcgagatcgagaagctgcagtggctgcaccagcaggagctgagcgagatgaagcacaacctggagctgaccatggccgagatgagacagagcctggagcaggagagagacagactgatcgccgaggtgaagaagcagctggagctggagaagcagcaggccgtggacgagaccaagaagaagcagtggtgcgccaactgcaagaaggaggccatcttctactgctgctggaacaccagctactgcgactacccctgccagcaggcccactggcccgagcacatgaagagctgcacccagagcgccaccgccccccagcaggaggccgacgccgaggtgaacaccgagaccctgaacaagagcagccagggcagcagcagcagcacccagagcgcccccagcgagaccgccagcgccagcaaggagaaggagaccagcgccgagaagagcaaggagagcggcagcaccctggacctgagcggcagcagagagacccccagcagcatcctgctgggcagcaaccagggcagcgtgagcaagagatgcgacaagcagcccgcctacgcccccaccaccaccgaccaccagccccaccccaactaccccgcccagaagtaccacagcagaagcaacaagagcagctggagcagcagcgacgagaagagaggcagcaccagaagcgaccacaacaccagcaccagcaccaagagcctgctgcccaaggagagcagactggacaccttctgggactag

SEQ ID NO: 100186 - DNA, 3318 bp, Artificial Sequence
  derived and/or modified sequence
atggatatatccaccagaagcaaagaccctggaagtgccgagcgcactgcacagaagcggaagttcccatcaccaccccattcatccaatggtcattccccccaggatacgagcacatctcccatcaaaaagaaaaagaaaccaggcctgttaaattccaataacaaagagcaggatgggcgcaatgatttttactgttgggtgtgccatcgggagggtcaggtgctttgctgcgagctctgtcccagagtgtatcacgcaaagtgtctcaggctcacttccgagccggagggggattggttttgcccagagtgtgagacagacgcttttcagaaacccgtacctctcgagcaacaccccgactatgctgagtacatctttcatcccatggatctttgcaccctggaaaagaacgcaaaaaagaagatgtatggctgcactgaggccttcttagccgacgctaaatggattctgcacaattgtataatttataatggtggaaaccacaagctgactcagatcgccaaagtggtgattaagatctgtgaacatgaaatgaatgaaatcgaagtgtgccctgaatgctatttggcagcctgtcagaagagggataattggttttgcgaaccatgttcgaacccccatccactcgtctgggctaagcttaaggggttccccttttggcccgctaaagcgctgcgggataaggatggacaggtggacgcacgcttcttcggccaacatgacagggcatgggtcccaatcaataactgctatcttatgagcaaagagatccccttttctgttaagaagacaaagagtatcttcaacagcgctatgcaggagatggaggtctacgtagagaacattcgcagaaaatttggagtgtttaattacagtccatttaggaccccttacacgccaaatagccagtaccagatgctcctggatccaacgaacccctccgccggaaccgcaaaaatagacaagcaggaaaaggtaaagttgaactttgacatgaccgctagcccaaagattcttatgtctaagcctgtgctgtcgggcggtaccggccgcaggatttccttgtcggacatgccgaggagtccaatgtccacaaactcctctgtgcacaccggctccgatgtagaacaggatgccgaaaagaaagcaactagctctcatttcagcgcatccgaagagagtatggactttctggacaaatccacggcaagtccagcgagtactaagactggacaggcaggttccctctctggtagccctaaacccttctctccccagctctctgcccctatcacaacaaagaccgacaagacaagcacaacagggagtatcctgaacctgaatttagatagaagtaaagcagagatggatttgaaagaacttagcgagagcgtgcagcagcagtctacccctgtgcccctgattagtcctaaaagacagataaggagtcggtttcagcttaacctcgacaaaacaattgagtcatgcaaagcccaactgggaattaatgagatctctgaagacgtatataccgctgtcgaacactccgacagtgaagactccgaaaaaagtgactcaagcgactctgaatatatttcggacgacgagcagaaaagcaagaacgaacctgaggacacagaggacaaagaaggttgccagatggacaaagaaccatccgcagtcaaaaagaagccgaaaccaacaaacccagttgaaatcaaagaggagttgaagagcacttctcctgcctccgagaaagcggacccgggcgccgtaaaggataaggcttctccagaacctgaaaaggacttttctgagaaagctaagccctcaccacatcctatcaaagataagctgaagggcaaagacgagactgactcacctaccgtccacctgggactggatagtgacagtgagtccgagttagtcattgaccttggggaggaccatagcggacgggagggccgtaagaacaaaaaggagcccaaggaaccctcacccaagcaggacgtcgtgggtaagacccctccttccacaaccgtcgggtcgcattcccccccagagacgcctgtgcttactaggtcctctgctcaaacaagcgctgccggagctaccgcgacaacctccacttcctcgacagttaccgtgaccgctccggcacccgcggcgactggcagcccagtcaaaaaacagaggcctctgctccccaaggagaccgcacccgccgtacagcgcgtcgtatggaactcaagcactgtacagcagaaggaaatcacccagtctccgagtacatccactatcacattggtaacatctactcagtcatcccccctggtcaccagttccgggtccatgtctactctggtcagctctgtcaacgcagatctcccgattgccaccgccagtgctgacgtcgctgcggacattgcgaagtacaccagtaaaatgatggatgccataaagggaaccatgacagagatctacaacgacctaagcaagaataccacgggcagcactattgccgagatccgacgccttcggatcgagattgaaaagcttcaatggctccatcagcaagaactttccgagatgaagcataacctggagttaaccatggcagagatgagacagtcattggagcaggagcgagatagattgattgccgaagtaaaaaagcaactcgagcttgaaaaacaacaggccgtagatgagaccaagaaaaaacagtggtgtgcaaactgcaagaaagaagcgatcttctactgttgctggaacacttcctattgcgattacccttgccagcaagcacactggccagaacacatgaagagctgtacacaatctgccaccgctccccagcaggaagccgacgcggaggtgaacaccgaaacactaaacaagagctcccagggctcatcctccagtacacagtcagcaccaagcgaaaccgcatccgcaagcaaggaaaaagagacatctgctgagaaaagcaaagagtccggatccaccctggacctgtccgggagccgtgaaactccaagttcaatcctattaggctccaaccagggatccgtaagcaaaaggtgtgataaacagcccgcgtatgcacccactactaccgatcaccagcctcatcccaattacccagcccagaaataccactcccgcagtaacaagagctcatggtcttcttcagatgaaaagcgcggaagcaccagaagtgaccataacacttccaccagcaccaaaagcctgcttccaaaggagagtagactcgatactttctgggactag

SEQ ID NO: 100187 - DNA, 3318 bp, Artificial Sequence
  derived and/or modified sequence
atggacatcagcaccaggagcaaggaccccggcagcgctgagaggacagcccagaagaggaagttccccagccccccccacagcagcaatggccacagcccccaggacaccagcaccagccccatcaagaagaagaagaagccaggcctgctgaacagcaacaacaaggagcaggatggaagaaatgacttctactgctgggtgtgccaccgggagggccaggtgctgtgctgtgagctgtgcccccgggtgtaccacgccaagtgcctgcggctgaccagcgagcctgagggggactggttctgcccagaatgtgaaacagatgccttccagaagcctgtgcccctggagcagcacccagactatgcagagtacatcttccaccccatggacctgtgcaccctggagaagaatgccaagaagaagatgtatggctgcacagaggccttcctggctgatgccaagtggatcctgcacaactgcatcatctacaatggaggcaaccacaagctgacccagatcgccaaggtggtgatcaagatctgtgagcacgagatgaatgaaattgaggtgtgcccagagtgctacctggccgcctgccagaagagggacaactggttctgtgagccctgcagcaacccccaccccctggtgtgggccaagctgaagggcttccccttctggccagccaaggccctgcgggacaaggatggccaggtggatgcccgcttcttcggccagcacgaccgggcctgggtgcccatcaacaactgctacctgatgagcaaggagatccccttctctgtgaagaagaccaagagcatcttcaacagcgccatgcaggagatggaggtgtatgtggagaacatccggaggaagtttggagtcttcaactacagccccttccgcaccccctacacccccaacagccagtaccagatgctgctggaccccaccaaccccagcgctggaacagccaagattgacaagcaggagaaggtgaagctgaactttgacatgacagccagccccaagatcctgatgagcaagcctgtgctgagcggcggcactggaagacgcatcagcctgagtgacatgcccaggagccccatgagcaccaacagctctgtgcacactggaagtgatgtggagcaggatgctgagaagaaggccaccagcagccacttcagcgccagcgaggagagcatggacttcctggacaagagcacagccagccctgccagcaccaagacaggccaggccggcagcctgagcggcagccccaagcccttcagcccccagctgagcgcccccatcaccaccaagacagacaagaccagcaccaccggcagcatcctgaacctgaacctggacaggagcaaggccgagatggacctgaaggagctgtctgagagcgtgcagcagcagagcacccctgtgcccctcatcagccccaagaggcagatccgcagccgcttccagctgaacctggacaagaccatcgagagctgcaaggcccagctgggcatcaatgagatcagtgaagatgtgtacacagctgtggagcacagcgacagtgaagattctgagaagagtgacagcagtgacagcgagtacatcagtgatgatgagcagaagagcaagaatgaacctgaggacacagaggacaaggagggctgccagatggacaaggagcccagcgctgtgaagaagaagcccaagcccaccaaccctgtggagatcaaggaggagctgaagagcaccagccctgccagcgagaaggctgaccctggagctgtgaaggacaaggccagccctgagcctgagaaggacttcagcgagaaggccaagcccagcccccaccccatcaaggacaagctgaagggcaaggatgaaacagacagccccaccgtgcacctgggcctggacagcgacagcgagagcgagctggtgattgacctgggggaggaccacagcggccgggagggcaggaagaacaagaaggagcccaaggagcccagccccaagcaggatgtggtgggcaagaccccacccagcaccaccgtgggcagccacagccccccagagacccctgtgctgaccaggagcagcgcccagaccagcgctgctggggccacagccaccaccagcaccagcagcacagtgacagtgacagccccagccccagctgccaccggcagccctgtgaagaagcagaggcccctgctgcccaaggagacagccccagctgtgcagagggtggtgtggaacagcagcacagtgcagcagaaggagatcacccagagccccagcaccagcaccatcaccctggtgaccagcacccagagcagccccctggtgaccagcagcggctccatgagcaccctggtgtcctctgtgaatgctgacctgcccatcgccacagccagcgcagatgtggccgctgacatcgccaagtacaccagcaagatgatggatgccatcaagggcaccatgacagagatctacaatgacctgagcaagaacaccaccggcagcaccatcgccgagatccggcggctgcgcatcgagattgagaagctgcagtggctgcaccagcaggagctgtctgagatgaagcacaacctggagctgaccatggccgagatgaggcagagcctggagcaggagcgggaccggctgattgctgaggtgaagaagcagctggagctggagaagcagcaggccgtggatgagaccaagaagaagcagtggtgtgccaactgcaagaaggaggccatcttctactgctgctggaacaccagctactgtgactacccctgccagcaggcccactggccagagcacatgaagagctgcacccagagcgccacagccccccagcaggaggctgatgctgaggtgaacacagagaccctgaacaagagcagccagggcagcagcagcagcacccagagcgcccccagcgagacagccagcgccagcaaggagaaggagaccagcgctgagaagagcaaggagagcggcagcaccctggacctgagcggcagccgggagacccccagcagcatcctgctgggcagcaaccagggctctgtgtccaagagatgtgacaagcagcctgcctatgcccccaccaccacagaccaccagccccaccccaactacccagcccagaagtaccacagccgcagcaacaagagctcctggagcagcagtgatgagaagaggggcagcaccaggagtgaccacaacaccagcaccagcaccaagagcctgctgcccaaggagagccggctggacaccttctgggactag

SEQ ID NO: 100188 - DNA, 3318 bp, Artificial Sequence
  derived and/or modified sequence
atggacatcagcacccggagcaaggaccccggcagcgccgagcggacagctcagaaacgcaaattccccagcccccctcactcctcaaacggccacagtccccaggatacgtccacatcgcccataaagaagaagaaaaagcccggactcctgaacagtaataataaggaacaagatggccgcaacgacttctactgttgggtatgtcatagggaaggacaggtcctgtgctgtgagctgtgcccacgggtttaccatgctaaatgcctgcggctgacctcagaacccgagggagactggttttgtccggaatgtgaaacagacgcttttcagaaacccgtgcccttggagcagcaccccgactacgccgaatacatctttcaccccatggacctctgcactttagaaaagaatgccaagaagaaaatgtacggctgtacggaagccttcctcgcggacgctaaatggatccttcacaactgcattatatacaacggcgggaatcacaaactaacacaaatcgccaaggttgtgattaagatctgcgagcatgaaatgaatgaaatcgaggtctgccctgagtgctacctcgccgcctgccaaaagcgcgacaattggttctgtgagccctgcagcaatccccatcccctggtgtgggcgaaactaaagggctttcctttctggcctgcgaaagctttgcgggacaaagatggccaggtggatgccaggttctttgggcaacacgatcgggcttgggtgccaattaacaattgctacctcatgtcaaaagagatccccttttccgtcaagaagacaaagagtatttttaattcagcgatgcaggaaatggaggtgtacgtcgagaatatcaggcggaagtttggtgtcttcaactactcaccttttcgtacaccttacactcctaatagccagtatcagatgctgctggaccctacaaatccatcggctgggaccgcaaaaatcgataaacaggagaaggtaaagctcaacttcgacatgacagccagtcccaagatcctcatgtctaagcctgtactctctggcgggactggcaggagaatcagcttgtcggatatgcccagatctcctatgtctacgaatagctccgtgcacactgggtctgatgtggaacaggacgccgagaagaaggctacgagcagccacttctcagcctccgaagaaagcatggattttctggacaaatctaccgcatcgccagcctcaacaaagacaggacaagcgggctctcttagcggtagtcccaaaccattctcaccgcagctctccgccccaataactacgaaaacagacaaaacgtccaccaccggctccatccttaacctcaacttggacagaagtaaagcagaaatggacctcaaagagctctccgagtcggtgcagcagcagagcacacccgtgccccttatatcccccaaacggcaaatcaggagtcgattccagctgaacctggacaagactattgagtcctgtaaagctcagcttggaatcaatgaaatttccgaggacgtgtataccgcagttgaacactctgacagcgaagactctgaaaaaagcgactcaagcgattctgagtatatctccgatgatgaacaaaaatccaagaacgaaccagaggacaccgaggataaagagggctgtcaaatggataaggagccatctgctgttaagaagaagcctaagccgacaaatccagttgaaattaaagaggaactcaagagcacatcccccgcttctgagaaggcagaccctggtgctgtgaaagataaagcttcacctgaacctgagaaggattttagtgaaaaggctaagccttccccacacccaatcaaagataagctgaagggaaaggacgaaacagattctccaacagtgcatctaggcttggactcagattccgaatccgaactcgtcatagacctgggggaagaccatagcgggagagagggaagaaagaataagaaagaaccaaaagagccatctccaaaacaggacgtggtgggaaaaacccctccttcaacaaccgttggcagtcatagccctccagagacgcctgtattgacccggagtagcgcacaaacatctgccgccggggctaccgcgaccacctccaccagcagcactgtgactgtgacagccccagcacccgctgccaccggctctcctgttaaaaaacaacgaccgctgctgccgaaagaaaccgcccccgctgttcagagagtggtgtggaactcgagcacggtccagcagaaagagatcacccagtccccttcaaccagcaccataacgctggtgaccagcactcaaagctcgcctctggtgacctcctcgggttcaatgagcaccctcgtaagcagtgtgaatgccgatctgcccatcgctaccgcttccgcagacgtagcggccgatattgcaaaatatacttctaaaatgatggatgctattaagggcacaatgacagaaatttacaatgatcttagcaaaaacaccacaggatccaccattgccgagattaggcggttgagaattgagatcgagaagctgcagtggctgcaccagcaagagctctctgagatgaaacataatctggagctgaccatggcagagatgcggcaatccctcgagcaggagcgcgaccgacttatcgctgaggtaaagaagcagctggagctcgaaaaacagcaagccgttgatgagaccaaaaagaagcagtggtgcgccaactgtaaaaaggaggctatcttttattgctgctggaacacttcctactgcgactacccatgccagcaggcccattggccagaacatatgaaatcctgcacacagagcgctaccgcccctcaacaggaagctgacgcagaggtgaacacagaaacgctgaataagagctcacaggggagctccagtagcacccagtccgccccctcagaaacggcgagcgcttctaaggaaaaggaaaccagcgctgagaaaagcaaggagtcgggctcgacactagacctgagcggatcaagggaaactccctcctcaattttattaggcagtaaccagggaagtgtgtcaaagcggtgcgacaagcaacccgcgtacgcccccaccactacagaccaccagccacaccccaactaccctgcccaaaagtaccactcacggtcaaacaagtcatcttggagctctagcgatgaaaaaagaggatccacccggtcggatcataacacatccacaagtaccaagtcacttctcccaaaggagagtcggctcgatacgttctgggactag

SEQ ID NO: 100189 - DNA, 3318 bp, Artificial Sequence
  derived and/or modified sequence
atggatattagcactcgttcaaaagacccaggctctgcggagaggacggctcagaagcggaagtttccatccccaccccactcctcgaacgggcatagccctcaggatacgtctacaagccccattaaaaaaaagaaaaagcccggattgcttaattcaaataataaggagcaggatggcagaaatgacttttattgttgggtttgtcacagagaaggacaagtactgtgctgcgagctctgtccaagagtgtatcatgcaaaatgcctgcgcctgaccagcgagcccgagggcgactggttctgccccgagtgtgagactgacgcattccagaagccagtcccactggagcaacaccccgactatgcggagtatatatttcaccctatggatctgtgcactttggagaaaaatgccaagaaaaaaatgtatggttgtacagaggcttttcttgccgacgcaaagtggatccttcataactgcatcatttacaatggcggaaaccataagttaacccaaatcgcaaaagtcgtcattaagatatgcgagcatgaaatgaacgagatcgaagtctgtcccgagtgttacttagcagcctgccagaaacgcgataattggttctgtgagccctgctcaaacccccatcctttggtttgggcaaagctgaaaggatttccattttggcctgcaaaagccctgagggataaagatgggcaggtggacgccagattctttggacagcatgacagggcctgggtacctatcaacaattgctacctcatgtccaaggaaatccctttctccgtgaagaagactaagagcatcttcaattctgccatgcaagagatggaggtgtacgttgagaacatcagacgcaagtttggcgtattcaactatagtccattcaggacaccatacactccaaattcacagtaccagatgctgctggacccaacaaatcccagcgccggtactgctaaaatcgacaagcaagagaaagtaaagcttaacttcgacatgactgcctcccccaagatcctcatgtctaagcccgtgctgagtgggggaacgggcagacgaatcagcctgtcggatatgccaagaagtcctatgagtactaactcgtccgtacatacaggctccgatgttgaacaagatgcagaaaagaaggccaccagctcccacttcagtgcctccgaggagtctatggacttcctcgataaatcgacagcatctcccgcaagcacaaagactggacaagcaggcagtctgtccggaagtcctaaaccattttcgcctcagctgtcagccccaatcaccacaaagacagacaagactagcacgaccggctctatactaaatctcaatctggacagatccaaggccgagatggacttgaaggagctatccgagtctgtccagcagcagtctacgcctgttccactgatctcacccaaaaggcaaatacgctcacgctttcagctgaaccttgataagaccatcgagtcttgtaaggcacagctgggaataaacgagatcagtgaagatgtgtataccgcagtggaacatagcgattctgaggatagtgagaaatccgattcttccgatagtgaatacatatccgacgatgagcagaagagtaaaaacgaaccagaggacaccgaggacaaggagggctgtcagatggacaaagagccaagtgcagtgaagaagaaacccaagcctacgaaccccgtggaaattaaggaggagttgaagtcaacatctcccgcttcggaaaaggccgaccctggtgccgtaaaggacaaggcctccccagagcccgagaaagacttcagtgagaaagccaaaccttctccacacccaattaaagacaaactgaaagggaaggatgaaactgattctccaaccgttcacctcggattagatagcgattctgaatctgaacttgtcatcgaccttggggaggatcatagtgggagggagggtaggaaaaataagaaagagcctaaagagccttccccaaaacaggatgttgtgggaaaaaccccgccaagcaccacggttgggtcccattctcccccagagacacctgtgctgactcggtcctctgcccagacgagtgcagccggagcaacagcaacgactagcacgtcctccacggttactgttactgccccagccccagctgccactggatctccagtcaagaaacagcgcccactcctccctaaagaaacggcacctgccgtccagagggtggtctggaattcttcaactgtccagcaaaaagagatcactcagagcccatccaccagcaccataaccttagtgacttcaacgcagtcctcccccctggtcaccagctctggttctatgagtactctggtatcctctgtgaatgcagacttgccgattgcaacagcttccgcagacgttgccgctgatatcgccaagtacacctcgaagatgatggatgccatcaagggaactatgaccgagatctacaatgatctctccaagaacaccaccggctccaccatcgccgagatccgcaggctcaggatcgagatcgaaaagttgcagtggctccaccagcaggagttatccgagatgaagcacaacctagagcttaccatggccgagatgagacagtcattggaacaagaacgcgatcgtttgatagctgaggtgaaaaaacagctcgagctggagaaacagcaagcggttgatgagacaaaaaaaaagcaatggtgtgctaactgcaaaaaagaggccatcttctactgctgctggaatacctcctactgcgactacccttgtcagcaggctcactggcctgagcatatgaaaagttgcactcaatcggcaaccgcacctcagcaagaagctgacgcagaggtaaatactgaaacactcaacaagtcctcccagggatcctcaagctctactcagtccgccccatcagaaacagcttcggccagcaaggaaaaagaaacctccgcagaaaagagcaaggagagcggtagcaccttggacctgagcggcagcagagagacaccctcctctatattattagggagcaaccagggatctgtttcaaaaagatgtgacaaacaaccagcctacgctcctacaacgaccgaccaccagccacatcctaactatcctgctcagaaataccattcacgatccaacaagtcatcttggtcaagttctgacgaaaagcgcggaagcacccggtctgatcacaatacttctacgtcaactaagtctctactgcctaaagaaagccgcttagacaccttctgggactag

SEQ ID NO: 100190 - DNA, 3463 bp, Artificial Sequence
  derived and/or modified sequence
gttaattctcaggctctgttgggggtggtcagaaatctaatttcttggctgaagaggaaataaaaacagaacaggaggtggtagagggcatggatatctctactcgctccaaagatcctggctctgcagagagaacagcccagaaaagaaagttccccagccctccacattcttccaatggccactcgccgcaggacacatcaacaagccccattaaaaagaaaaagaaacctggcttactgaacagtaacaataaggagcaggatggacggaatgatttctactgctgggtttgtcaccgggaaggccaagtcctttgctgtgagctctgtccccgggtttatcacgctaagtgtctgagactgacatcggaaccagagggggactggttttgtcctgaatgtgagacagatgcattccagaagcccgttccattggaacagcaccctgactatgcggaatacatcttccatccaatggacctttgtacattggaaaagaatgcgaaaaagaaaatgtatggctgcacagaagccttcctggctgatgcaaagtggattttgcacaactgcatcatttataatgggggaaatcacaaattgacgcaaatagcgaaagtagtcatcaaaatctgtgaacatgagatgaatgaaatcgaagtatgtccagaatgttatctagctgcttgccaaaaacgagataactggttttgtgagccttgtagcaatccacatcctttggtctgggccaaactgaaggggtttccattctggcctgcaaaagctctaagggataaagacgggcaggtcgatgcccgattctttggacaacatgacagggcctgggttccaataaataattgctacctcatgtctaaagaaattcctttttctgtgaaaaagactaagagcatcttcaacagtgccatgcaagagatggaggtttacgtggagaacatccgcaggaagtttggggtttttaattactctccatttaggacaccctacacacccaacagccagtatcaaatgctgctcgatcccaccaaccccagcgccggcactgccaagatagacaagcaggagaaggtcaagctcaactttgacatgacggcatcccccaagatcctgatgagcaagcctgtgctgagtgggggcacaggccgccggatttccttgtcggatatgccgcgctcccccatgagcacaaactcttctgtgcacacgggctccgacgtggagcaggatgctgagaagaaggccacgtcgagccacttcagtgcgagcgaggagtccatggacttcctggataagagcacagcttcaccagcctccaccaagacgggacaagcagggagtttatccggcagcccaaagcccttctctcctcaactgtcagctcctatcacgacgaaaacggacaaaacctccaccaccggcagcatcctgaatcttaacctggatcgaagcaaagctgagatggatttgaaggagctgagcgagtcggtccagcaacagtccacccctgttcctctcatctctcccaagcgccagattcgtagcaggttccagctgaatcttgacaagaccatagagagttgcaaagcacaattaggcataaatgaaatctcggaagatgtctatacggccgtagagcacagcgattcggaggattctgagaagtcagatagtagcgatagtgagtatatcagtgatgatgagcagaagtctaagaacgagccagaagacacagaggacaaagaaggttgtcagatggacaaagagccatctgctgttaaaaaaaagcccaagcctacaaacccagtggagattaaagaggagctgaaaagcacgtcaccagccagcgagaaggcagaccctggagcagtcaaggacaaggccagccctgagcctgagaaggacttttccgaaaaggcaaaaccttcacctcaccccataaaggataaactgaagggaaaagatgagacggattccccaacagtccatttgggcctggactctgattcagagagcgaacttgtcatagatttaggagaagaccattctgggcgggagggtcgaaaaaataagaaggaacccaaagaaccatctcccaaacaggatgttgtaggtaaaactccaccatccacgacggtgggcagccattctcccccggaaacaccggtgctcacccgctcttccgcccaaacttccgcggctggcgccacagccaccaccagcacgtcctccacggtcaccgtcacggccccggcccccgccgccacaggaagcccagtgaaaaagcagaggccgcttttaccgaaggagactgccccggccgtgcagcgggtcgtgtggaactcatcaactgtccagcagaaggagatcacacagagcccatccacgtccaccatcaccctggtgaccagcacacagtcatcgcccctggtcaccagctcggggtccatgagcacccttgtgtcctcagtcaacgctgacctgcccatcgccactgcctcagctgatgtcgccgctgatattgccaagtacactagcaaaatgatggatgcaataaaaggaacaatgacagaaatatacaacgatctttctaaaaacactactggaagcacaatagctgagattcgcaggctgaggatcgagatagagaagctccagtggctgcaccagcaagagctctccgaaatgaaacacaacttagagctgaccatggcggagatgcggcagagcctggagcaggagcgggaccggctcatcgccgaggtgaagaagcagctggagttggagaagcagcaggcggtggatgagaccaagaagaagcagtggtgcgccaactgcaagaaggaggccatcttttactgctgttggaacactagctactgtgactacccctgccagcaagcccactggcctgagcacatgaagtcctgcacccagtcagctactgctcctcagcaggaagcggatgctgaggtgaacacagaaacactaaataagtcctcccaggggagctcctcgagcacacaatcagcaccttcagaaacggccagcgcctccaaagagaaggagacgtcagctgagaaaagcaaggagagtggctcgacccttgacctttctggctccagagagacgccctcctccattctcttaggctccaaccaaggctctgttagcaaaaggtgtgacaagcaacctgcctatgccccaaccaccacagaccaccagccgcaccccaactaccccgcccagaagtaccattcccggagtaataaatccagttggagcagcagtgatgagaagaggggatcgacacgttccgatcacaacaccagtaccagcacgaagagcctcctcccgaaagagtctcggctggacaccttctgggactagcagtgaatcgggacacaaaccacccaccccattgggagaaaaacccagacgccagg

SEQ ID NO: 100191 - protein, 24 aa, Artificial Sequence
  derived and/or modified sequence
MDISTRSKDPGSAERTAQKRKFPS

SEQ ID NO: 100192 - protein, 1136 aa, Artificial Sequence
  derived and/or modified sequence
MHPQSLAEEEIKTEQEVVEGMDISTRSKDPGSAERTAQKRKFPSPPHSSNGHSPQDTSTSPIKKKKKPGLLNSNNKEQDGRNDFYCWVCHREGQVLCCELCPRVYHAKCLRLTSEPEGDWFCPECEKITVAECIETQSKAMTMLTIEQLSYLLKFAIQKMKQPGTDAFQKPVPLEQHPDYAEYIFHPMDLCTLEKNAKKKMYGCTEAFLADAKWILHNCIIYNGGNHKLTQIAKVVIKICEHEMNEIEVCPECYLAACQKRDNWFCEPCSNPHPLVWAKLKGFPFWPAKALRDKDGQVDARFFGQHDRAWVPINNCYLMSKEIPFSVKKTKSIFNSAMQEMEVYVENIRRKFGVFNYSPFRTPYTPNSQYQMLLDPTNPSAGTAKIDKQEKVKLNFDMTASPKILMSKPVLSGGTGRRISLSDMPRSPMSTNSSVHTGSDVEQDAEKKATSSHFSASEESMDFLDKSTASPASTKTGQAGSLSGSPKPFSPQLSAPITTKTDKTSTTGSILNLNLDRSKAEMDLKELSESVQQQSTPVPLISPKRQIRSRFQLNLDKTIESCKAQLGINEISEDVYTAVEHSDSEDSEKSDSSDSEYISDDEQKSKNEPEDTEDKEGCQMDKEPSAVKKKPKPTNPVEIKEELKSTSPASEKADPGAVKDKASPEPEKDFSEKAKPSPHPIKDKLKGKDETDSPTVHLGLDSDSESELVIDLGEDHSGREGRKNKKEPKEPSPKQDVVGKTPPSTTVGSHSPPETPVLTRSSAQTSAAGATATTSTSSTVTVTAPAPAATGSPVKKQRPLLPKETAPAVQRVVWNSSTVQQKEITQSPSTSTITLVTSTQSSPLVTSSGSMSTLVSSVNADLPIATASADVAADIAKYTSKIRRLRIEIEKLQWLHQQELSEMKHNLELTMAEMRQSLEQERDRLIAEVKKQLELEKQQAVDETKKKQWCANCKKEAIFYCCWNTSYCDYPCQQAHWPEHMKSCTQSATAPQQEADAEVNTETLNKSSQGSSSSTQSAPSETASASKEKETSAEKSKESGSTLDLSGSRETPSSILLGSNQGSVSKRCDKQPAYAPTTTDHQPHPNYPAQKYHSRSNKSSWSSSDEKRGSTRSDHNTSTSTKSLLPKESRLDTFWD

SEQ ID NO: 100193 - DNA, 3411 bp, Artificial Sequence
  derived and/or modified sequence
atgcacccccagagcctggccgaggaggagatcaagaccgagcaggaggtggtggagggcatggacatcagcaccagaagcaaggaccccggcagcgccgagagaaccgcccagaagagaaagttccccagccccccccacagcagcaacggccacagcccccaggacaccagcaccagccccatcaagaagaagaagaagcccggcctgctgaacagcaacaacaaggagcaggacggcagaaacgacttctactgctgggtgtgccacagagagggccaggtgctgtgctgcgagctgtgccccagagtgtaccacgccaagtgcctgagactgaccagcgagcccgagggcgactggttctgccccgagtgcgagaagatcaccgtggccgagtgcatcgagacccagagcaaggccatgaccatgctgaccatcgagcagctgagctacctgctgaagttcgccatccagaagatgaagcagcccggcaccgacgccttccagaagcccgtgcccctggagcagcaccccgactacgccgagtacatcttccaccccatggacctgtgcaccctggagaagaacgccaagaagaagatgtacggctgcaccgaggccttcctggccgacgccaagtggatcctgcacaactgcatcatctacaacggcggcaaccacaagctgacccagatcgccaaggtggtgatcaagatctgcgagcacgagatgaacgagatcgaggtgtgccccgagtgctacctggccgcctgccagaagagagacaactggttctgcgagccctgcagcaacccccaccccctggtgtgggccaagctgaagggcttccccttctggcccgccaaggccctgagagacaaggacggccaggtggacgccagattcttcggccagcacgacagagcctgggtgcccatcaacaactgctacctgatgagcaaggagatccccttcagcgtgaagaagaccaagagcatcttcaacagcgccatgcaggagatggaggtgtacgtggagaacatcagaagaaagttcggcgtgttcaactacagccccttcagaaccccctacacccccaacagccagtaccagatgctgctggaccccaccaaccccagcgccggcaccgccaagatcgacaagcaggagaaggtgaagctgaacttcgacatgaccgccagccccaagatcctgatgagcaagcccgtgctgagcggcggcaccggcagaagaatcagcctgagcgacatgcccagaagccccatgagcaccaacagcagcgtgcacaccggcagcgacgtggagcaggacgccgagaagaaggccaccagcagccacttcagcgccagcgaggagagcatggacttcctggacaagagcaccgccagccccgccagcaccaagaccggccaggccggcagcctgagcggcagccccaagcccttcagcccccagctgagcgcccccatcaccaccaagaccgacaagaccagcaccaccggcagcatcctgaacctgaacctggacagaagcaaggccgagatggacctgaaggagctgagcgagagcgtgcagcagcagagcacccccgtgcccctgatcagccccaagagacagatcagaagcagattccagctgaacctggacaagaccatcgagagctgcaaggcccagctgggcatcaacgagatcagcgaggacgtgtacaccgccgtggagcacagcgacagcgaggacagcgagaagagcgacagcagcgacagcgagtacatcagcgacgacgagcagaagagcaagaacgagcccgaggacaccgaggacaaggagggctgccagatggacaaggagcccagcgccgtgaagaagaagcccaagcccaccaaccccgtggagatcaaggaggagctgaagagcaccagccccgccagcgagaaggccgaccccggcgccgtgaaggacaaggccagccccgagcccgagaaggacttcagcgagaaggccaagcccagcccccaccccatcaaggacaagctgaagggcaaggacgagaccgacagccccaccgtgcacctgggcctggacagcgacagcgagagcgagctggtgatcgacctgggcgaggaccacagcggcagagagggcagaaagaacaagaaggagcccaaggagcccagccccaagcaggacgtggtgggcaagaccccccccagcaccaccgtgggcagccacagcccccccgagacccccgtgctgaccagaagcagcgcccagaccagcgccgccggcgccaccgccaccaccagcaccagcagcaccgtgaccgtgaccgcccccgcccccgccgccaccggcagccccgtgaagaagcagagacccctgctgcccaaggagaccgcccccgccgtgcagagagtggtgtggaacagcagcaccgtgcagcagaaggagatcacccagagccccagcaccagcaccatcaccctggtgaccagcacccagagcagccccctggtgaccagcagcggcagcatgagcaccctggtgagcagcgtgaacgccgacctgcccatcgccaccgccagcgccgacgtggccgccgacatcgccaagtacaccagcaagatcagaagactgagaatcgagatcgagaagctgcagtggctgcaccagcaggagctgagcgagatgaagcacaacctggagctgaccatggccgagatgagacagagcctggagcaggagagagacagactgatcgccgaggtgaagaagcagctggagctggagaagcagcaggccgtggacgagaccaagaagaagcagtggtgcgccaactgcaagaaggaggccatcttctactgctgctggaacaccagctactgcgactacccctgccagcaggcccactggcccgagcacatgaagagctgcacccagagcgccaccgccccccagcaggaggccgacgccgaggtgaacaccgagaccctgaacaagagcagccagggcagcagcagcagcacccagagcgcccccagcgagaccgccagcgccagcaaggagaaggagaccagcgccgagaagagcaaggagagcggcagcaccctggacctgagcggcagcagagagacccccagcagcatcctgctgggcagcaaccagggcagcgtgagcaagagatgcgacaagcagcccgcctacgcccccaccaccaccgaccaccagccccaccccaactaccccgcccagaagtaccacagcagaagcaacaagagcagctggagcagcagcgacgagaagagaggcagcaccagaagcgaccacaacaccagcaccagcaccaagagcctgctgcccaaggagagcagactggacaccttctgggactag

SEQ ID NO: 100194 - DNA, 3411 bp, Artificial Sequence
  derived and/or modified sequence
atgcaccctcagagtctcgccgaggaagagattaaaacagaacaggaggtggtggaaggcatggatatctccactcggtctaaggacccaggctcagcagaaagaactgctcagaagcgaaagtttccctctccacctcacagcagtaatggtcactcaccccaggacacctctactagcccaattaagaagaaaaaaaaaccaggtttgttaaactccaacaacaaggaacaggacggccgcaacgatttttattgctgggtctgccacagagaaggacaggtgctgtgctgcgagttgtgcccacgcgtctatcacgccaaatgcttgagactcacttccgagcccgaaggagattggttctgtcccgagtgcgagaagattactgtcgccgagtgcattgagacacagagcaaggcaatgacaatgttgacaatagagcagctgtcctatctcctgaaatttgcaatccagaagatgaagcagccgggcacagacgcttttcaaaagcctgtcccactggagcagcaccccgactacgccgaatacatcttccatcccatggacctttgcacgctcgagaagaacgcaaagaagaagatgtacgggtgtacagaggcctttcttgccgatgccaaatggatacttcacaattgcatcatctacaatggggggaatcacaagcttactcagatcgccaaggtagtgatcaagatttgcgaacacgagatgaacgagatagaggtttgtcctgaatgctatctggctgcgtgccagaaacgtgataactggttctgtgagccatgttcgaatccgcacccattggtgtgggccaagctgaaaggcttcccgttctggcccgcgaaagctctgcgagacaaggacgggcaagtcgatgcccgattttttgggcagcacgatcgggcatgggtgcccattaacaactgctacctcatgtctaaagaaattcccttcagcgttaaaaagaccaaaagcatatttaactcagctatgcaggaaatggaggtctacgtcgagaatatcaggagaaagttcggcgtgttcaattatagccctttcaggaccccatatacgccaaattcccagtaccagatgctgctcgaccctactaaccccagcgcgggaactgccaagatcgataagcaggagaaagtgaagttgaatttcgacatgacagcctctcccaagatcctgatgtcgaagcccgttctctctggtgggacagggagaaggatcagtttgagtgacatgccccgctcacccatgtctactaacagctcagttcacaccggatccgatgtagaacaggacgccgagaagaaagccacaagctcacacttctccgcctcagaggaatcaatggactttcttgataagagtacagccagccctgcctctacgaagacaggacaggccggcagcctctcgggctcacctaagcccttctccccacagctctctgccccgatcaccacaaagaccgacaagacatctacaaccgggagcatcttgaatcttaatctggaccgcagtaaagccgagatggacctaaaggaactctctgaaagcgtgcagcagcaaagcacaccggtgccacttataagcccaaaacgtcagattcgttctcgctttcagctgaatttagataaaaccattgagtcatgcaaagcccagctgggaatcaatgaaatttctgaagatgtctatacagcagtcgaacacagcgactctgaagactccgaaaagtctgacagttccgattcagaatacatctcagatgacgagcagaagagtaagaatgagcctgaagacaccgaggacaaggaagggtgccagatggacaaagaaccctccgctgtaaaaaagaaacctaagcccactaatcccgtggaaatcaaggaagagttgaagtccacttcccctgcttcagaaaaggcagatcccggcgctgttaaggataaggcatctccggaacctgagaaagacttcagtgaaaaggcgaaaccctcgccgcatcctattaaggataaacttaaaggaaaggatgaaactgactcacccaccgtgcacctgggcctcgatagcgatagtgaatctgagctggtgattgatctaggagaggaccactctggccgcgagggccgcaagaacaagaaggagcctaaggaaccttcccccaaacaggacgtggtgggaaaaacaccaccgtccaccactgtgggttcccatagcccaccagaaactccagttctcacaagatcttcggctcagacaagcgccgccggtgccaccgcaacaacatcaacgagttccacggtaacggtgactgcacctgcccccgcagctacaggctcccctgtcaagaagcagcgacccctgctcccaaaggaaacagctcccgcagtccagagggtagtgtggaattcatctacggtgcagcagaaggaaataacgcaaagtccatccactagtacgatcactttggtcaccagcacccagagctcccctctagtgacaagctcagggtcaatgtccaccttagtgtcaagcgttaatgctgacctccccatcgccacagcctctgccgacgttgctgcagacattgcaaaatacacatccaagattcggcggctgagaattgaaattgagaagctccagtggttacatcagcaggaactcagcgaaatgaagcacaacctggaattaactatggccgaaatgagacaaagcctggagcaggagcgtgatcgcctcatagctgaggtaaagaagcagctcgagctggagaagcagcaggccgtggacgaaactaaaaaaaaacagtggtgcgcaaactgtaagaaagaagcgatcttctactgttgttggaatacgtcttactgtgattacccctgtcagcaggctcattggccagagcatatgaaaagttgtacccagagtgctacggcaccacagcaggaagccgacgctgaggttaacacagagactttgaacaaatcatcacagggctcctcttccagtacgcagtcagcgccatctgagactgcctctgctagcaaagagaaggagacaagcgctgagaagtccaaagaatcggggagcactctggatttatcaggcagcagagagacaccaagctctattctgttggggtcaaatcaggggtcagtgagtaaacgctgcgacaagcagcctgcctacgctcctaccacaaccgatcaccagccacaccctaactaccccgcacaaaagtatcatagcagatccaataagtcaagttggtctagttctgacgaaaagcgcgggtcaaccagatccgaccacaatacctccacaagtactaaatcgctgctgcctaaagagtctaggctggataccttttgggattag

SEQ ID NO: 100195 - DNA, 3411 bp, Artificial Sequence
  derived and/or modified sequence
atgcacccccagagcctggccgaggaggagatcaagacagagcaggaggtggtggagggcatggacatcagcaccaggagcaaggaccccggcagcgctgagaggacagcccagaagaggaagttccccagccccccccacagcagcaatggccacagcccccaggacaccagcaccagccccatcaagaagaagaagaagccaggcctgctgaacagcaacaacaaggagcaggatggaagaaatgacttctactgctgggtgtgccaccgggagggccaggtgctgtgctgtgagctgtgcccccgggtgtaccacgccaagtgcctgcggctgaccagcgagcctgagggggactggttctgcccagaatgtgagaagatcaccgtggccgagtgcatcgagacccagagcaaggccatgaccatgctgaccatcgagcagctgagctacctgctgaagtttgccatccagaagatgaagcagcctggaacagatgccttccagaagcctgtgcccctggagcagcacccagactatgcagagtacatcttccaccccatggacctgtgcaccctggagaagaatgccaagaagaagatgtatggctgcacagaggccttcctggctgatgccaagtggatcctgcacaactgcatcatctacaatggaggcaaccacaagctgacccagatcgccaaggtggtgatcaagatctgtgagcacgagatgaatgaaattgaggtgtgcccagagtgctacctggccgcctgccagaagagggacaactggttctgtgagccctgcagcaacccccaccccctggtgtgggccaagctgaagggcttccccttctggccagccaaggccctgcgggacaaggatggccaggtggatgcccgcttcttcggccagcacgaccgggcctgggtgcccatcaacaactgctacctgatgagcaaggagatccccttctctgtgaagaagaccaagagcatcttcaacagcgccatgcaggagatggaggtgtatgtggagaacatccggaggaagtttggagtcttcaactacagccccttccgcaccccctacacccccaacagccagtaccagatgctgctggaccccaccaaccccagcgctggaacagccaagattgacaagcaggagaaggtgaagctgaactttgacatgacagccagccccaagatcctgatgagcaagcctgtgctgagcggcggcactggaagacgcatcagcctgagtgacatgcccaggagccccatgagcaccaacagctctgtgcacactggaagtgatgtggagcaggatgctgagaagaaggccaccagcagccacttcagcgccagcgaggagagcatggacttcctggacaagagcacagccagccctgccagcaccaagacaggccaggccggcagcctgagcggcagccccaagcccttcagcccccagctgagcgcccccatcaccaccaagacagacaagaccagcaccaccggcagcatcctgaacctgaacctggacaggagcaaggccgagatggacctgaaggagctgtctgagagcgtgcagcagcagagcacccctgtgcccctcatcagccccaagaggcagatccgcagccgcttccagctgaacctggacaagaccatcgagagctgcaaggcccagctgggcatcaatgagatcagtgaagatgtgtacacagctgtggagcacagcgacagtgaagattctgagaagagtgacagcagtgacagcgagtacatcagtgatgatgagcagaagagcaagaatgaacctgaggacacagaggacaaggagggctgccagatggacaaggagcccagcgctgtgaagaagaagcccaagcccaccaaccctgtggagatcaaggaggagctgaagagcaccagccctgccagcgagaaggctgaccctggagctgtgaaggacaaggccagccctgagcctgagaaggacttcagcgagaaggccaagcccagcccccaccccatcaaggacaagctgaagggcaaggatgaaacagacagccccaccgtgcacctgggcctggacagcgacagcgagagcgagctggtgattgacctgggggaggaccacagcggccgggagggcaggaagaacaagaaggagcccaaggagcccagccccaagcaggatgtggtgggcaagaccccacccagcaccaccgtgggcagccacagccccccagagacccctgtgctgaccaggagcagcgcccagaccagcgctgctggggccacagccaccaccagcaccagcagcacagtgacagtgacagccccagccccagctgccaccggcagccctgtgaagaagcagaggcccctgctgcccaaggagacagccccagctgtgcagagggtggtgtggaacagcagcacagtgcagcagaaggagatcacccagagccccagcaccagcaccatcaccctggtgaccagcacccagagcagccccctggtgaccagcagcggctccatgagcaccctggtgtcctctgtgaatgctgacctgcccatcgccacagccagcgcagatgtggccgctgacatcgccaagtacaccagcaagatccggcggctgagaattgaaattgagaagctgcagtggctgcaccagcaggagctgtctgagatgaagcacaacctggagctgaccatggccgagatgaggcagagcctggagcaggagcgggaccggctgattgctgaggtgaagaagcagctggagctggagaagcagcaggccgtggatgagaccaagaagaagcagtggtgtgccaactgcaagaaggaggccatcttctactgctgctggaacaccagctactgtgactacccctgccagcaggcccactggccagagcacatgaagagctgcacccagagcgccacagccccccagcaggaggctgatgctgaggtgaacacagagaccctgaacaagagcagccagggcagcagcagcagcacccagagcgcccccagcgagacagccagcgccagcaaggagaaggagaccagcgctgagaagagcaaggagagcggcagcaccctggacctgagcggcagccgggagacccccagcagcatcctgctgggcagcaaccagggctctgtgtccaagagatgtgacaagcagcctgcctatgcccccaccaccacagaccaccagccccaccccaactacccagcccagaagtaccacagccgcagcaacaagagctcctggagcagcagtgatgagaagaggggcagcaccaggagtgaccacaacaccagcaccagcaccaagagcctgctgcccaaggagagccggctggacaccttctgggactag

SEQ ID NO: 100196 - DNA, 3411 bp, Artificial Sequence
  derived and/or modified sequence
atgcacccccagagcctggccgaggaggagatcaagaccgagcaggaggtggtggaggggatggacatctccacgagaagtaaagatccaggtagcgccgagaggacagcgcagaaacgcaaatttccttcgccaccacattcttctaacggccatagtccacaagacacctcaacatcaccgattaagaaaaaaaagaagcccggcctgcttaacagcaacaacaaagagcaagacggaaggaatgacttttattgctgggtttgtcaccgggagggacaggtactctgttgcgaactgtgcccgagagtgtaccatgctaaatgcctgagactgacctctgaaccagagggtgactggttttgtccggaatgtgagaagatcactgttgcagagtgcatcgaaacacagtcaaaggcaatgactatgcttacaatcgagcagttgtcatatcttctgaagtttgcaattcagaagatgaagcagcctggaaccgatgctttccagaagcccgtcccgttggaacagcatcccgattatgctgagtacatctttcaccccatggatctttgcactttagaaaaaaacgccaaaaagaaaatgtatgggtgcacagaagctttcctcgctgacgcgaaatggattctccacaactgcattatatacaatggtggcaatcacaaattaactcagattgctaaggtggtcatcaagatatgcgagcatgaaatgaacgagatcgaggtctgtcccgaatgttaccttgcagcctgtcagaaacgggacaattggttttgtgaaccgtgctccaacccccaccctttggtctgggcgaaactgaaggggttcccgttttggccagctaaagctcttcgggataaggatggccaggtggacgcgagattcttcgggcagcatgaccgggcctgggttccaataaacaattgctacctcatgtccaaggagattccgttctctgtgaagaaaaccaagagtatttttaatagtgctatgcaggagatggaagtttatgtcgaaaacatccggcgcaagttcggtgtgtttaattattctccatttaggactccctatacaccaaactcgcaatatcaaatgctcttagatcctaccaatccctcagcgggcacagcaaaaatcgataagcaggagaaggtcaagctgaacttcgacatgaccgcatcaccgaagatcctgatgagcaagcccgtgcttagcggaggtaccggcaggaggatttccctgagcgatatgccaaggtctcctatgagcactaattcttccgtccacaccggcagcgacgtggagcaagatgctgagaaaaaagcgacgtcctcacacttcagcgcatcagaggagtctatggacttcctggacaagagcaccgcatctccggcgtcaaccaagaccgggcaggctggctctctgtcaggttctccaaagccattctccccccagctgtccgcacccattaccacaaagaccgacaaaacctctaccactgggagcattctgaatctgaacctggatagatcaaaagcggagatggacttgaaagaactatctgaaagtgtacagcagcagtcaacgcctgtgccacttatctcaccgaagcggcagattcgatctcgatttcagctcaacctcgataagacaatcgagtcttgtaaggcgcagctcgggataaatgagatcagcgaggatgtatacaccgccgtggagcatagcgacagcgaggatagcgaaaagagtgactcctcagattccgagtacatatctgatgatgaacagaagtccaaaaacgaaccagaggacacagaagacaaggaggggtgtcagatggacaaggagccaagcgccgtcaaaaagaaaccaaagcctaccaatcccgtagagattaaagaggagctaaaaagcacctctccagcttccgaaaaggcagatccaggtgcagtgaaggacaaggcctcaccagaacctgaaaaggacttctcggagaaggcaaagccatcccctcatcccatcaaggataaactgaaaggcaaagacgagaccgactctcccacagtccacctgggcttagactccgatagcgaatctgaactggtcatcgacctcggagaggatcacagcggcagggagggtaggaagaataaaaaagagcctaaagaacctagccccaaacaagatgtagtcgggaaaacgccaccttccactaccgtgggctcacatagtcctcctgagacccctgttctgactcggtctagtgcacagacatcagctgcgggggcgactgctactacctccacctcttctacagtcacggtaaccgcccctgcccccgccgccacaggatcccccgtgaagaagcagagaccacttctcccaaaagagaccgccccagcagtgcagcgcgtggtgtggaactccagtactgtgcaacagaaggagatcacccaaagtcctagtactagcacaatcacgctcgtgacgtcaacccaatccagccctctcgtcactagtagcggctctatgtctactttggtaagttcagtcaatgctgacttgcccatcgccaccgcatcggccgatgtagccgcagacatcgcgaagtatacaagtaaaatacggaggctcagaatcgaaatcgaaaagctgcagtggctgcaccagcaagagctctctgagatgaagcacaacctcgagctcacaatggcggagatgagacagtctctggagcaggagagggatcgcctgatcgcggaagtcaaaaagcagctcgagctggagaaacagcaggctgtggacgagaccaaaaaaaagcagtggtgtgccaattgcaagaaagaggccatattttactgctgctggaacacctcctactgtgactatccctgccagcaggcccattggcccgagcacatgaaatcctgcacgcagtcagctaccgcaccacagcaggaagccgacgctgaggtgaacaccgagactcttaataaaagcagccaaggctcaagcagcagcacacaatcagccccgagtgaaaccgcgtcagcctccaaggaaaaggagacctcagcagaaaaatccaaggagtctgggtctactctggatctctccggctcacgcgagacgccctcttctatcctcctaggaagcaaccagggcagcgtgtccaagcgatgcgataagcagcccgcttacgcacctaccactacagatcaccagccacaccctaactaccctgctcaaaaatatcatagccgatcaaataaatcctcctggagttctagcgatgaaaagcgagggtcaacccggagcgatcataacactagtacctctaccaaaagcctcctccccaaagaatcacggcttgacaccttctgggattag

SEQ ID NO: 100197 - DNA, 3411 bp, Artificial Sequence
  derived and/or modified sequence
atgcacccacagagtctcgccgaggaggaaataaagaccgaacaggaggtagtcgaaggcatggacatttccacacgctccaaagaccccggatcggccgagagaacggcacagaaaaggaagtttcctagtcccccacactcctccaatgggcactctccacaagatacatccacatctcccattaagaagaaaaagaagcccggactgctcaacagcaacaacaaggaacaggatggtagaaatgacttctactgctgggtgtgtcatagggaagggcaagtgctgtgctgtgaactgtgcccgagagtttaccacgcgaaatgtctgaggctgacatctgagcccgagggggactggttctgtcccgagtgcgaaaaaatcacagtcgccgagtgcattgagacgcagtctaaagcaatgaccatgctgaccatagaacagctgagctatctccttaagtttgccatacagaaaatgaaacagcccggaacagacgccttccagaagccagtcccacttgaacagcatccagattacgcagaatatattttccatcccatggacctgtgtaccctcgagaaaaacgccaagaaaaagatgtatggctgcacagaagcctttctggcagatgcaaagtggatactgcataattgtattatatataacgggggtaaccataagctcacacaaatcgccaaagtagtaattaagatctgtgagcacgagatgaatgaaatagaggtgtgccctgaatgttacctagccgcttgccaaaagagagacaattggttctgtgaaccatgctccaatccccatcctcttgtgtgggccaaattgaaaggatttcccttctggccggctaaggctctgcgggacaaagatgggcaggtcgatgctagattctttggccagcacgacagggcctgggtcccgattaacaactgctacttaatgagcaaagaaatcccattttcagtgaaaaaaactaaatctatttttaactctgcaatgcaggagatggaagtgtacgttgagaatatccgtcggaagtttggcgttttcaactatagcccattccgtactccatacactcctaattcacaataccagatgctgctggaccctaccaatccatctgccggaaccgctaaaattgacaaacaagagaaagtaaagctgaacttcgatatgacggcctctccaaaaatactcatgagtaaacccgtcttgtcgggcggaactggacggcgtatttccttgtcagatatgcccagaagccccatgagcaccaatagctccgtgcatactggctcagatgtggaacaggacgccgaaaaaaaggcaacgagctcacacttttctgcctcagaggagtccatggatttcctcgacaaatccactgccagccccgcatcaactaagacaggacaggctggatccctgagcggcagccctaaaccttttagccctcagttgagcgccccaattactaccaagacggacaaaaccagcacaaccggctccattctcaatttgaatctcgatagaagcaaagccgagatggatctgaaggaattatccgagtctgtgcagcaacaatcaacaccagtgccactgatttcccctaagcggcagatccgatcccggtttcagcttaatcttgataagacaatagagtcatgtaaagctcagctgggcatcaacgaaatttcagaagatgtttacacagctgtggaacattctgattccgaagactcggaaaaatccgactcttccgactcggaatacatctctgatgacgaacagaaaagcaaaaacgaacccgaggatacagaagataaggagggctgccagatggataaggagccttccgccgtaaagaaaaagccaaagcccactaatccagtcgagattaaggaggagctgaaatcgacaagccccgcttccgagaaggccgatcctggcgcagtgaaagacaaagctagcccagagccggagaaagacttttccgagaaggcaaaaccatcacctcatccaattaaagacaaacttaagggaaaagacgaaactgattctccgactgtgcatctgggactggattctgatagtgagtccgagcttgttattgatctcggggaagatcattctgggagggaaggcagaaaaaacaaaaaggaacccaaagagcctagccccaaacaggacgtggtgggaaaaaccccacctagcacaaccgtaggcagccacagcccaccagaaacccccgtcctgacaaggtccagcgcgcagacatcagcggcaggcgctaccgccactaccagcacctcctcaaccgtcactgtgaccgccccagcacccgcagccactggcagccccgtgaagaagcagcggcctcttctacccaaggagacagccccagctgtgcaaagagtagtctggaattcaagtactgtgcagcagaaagagatcacgcagtcgccgtctacctccacaatcacactggtgaccagcacccagtcaagtccattagtcacttcttctggaagcatgtccaccttggtcagtagcgttaatgcggacctgcccattgcgactgcttcagccgacgttgccgctgacatcgcaaagtacacatctaagatccggagactccgtatagagattgagaagttgcaatggctgcatcagcaggaactgtctgagatgaagcacaacctcgagttgaccatggccgaaatgcggcagtctttagaacaggaaagggacaggctcattgcagaagtaaagaaacagctagagctagagaaacagcaggcggtggacgaaactaaaaaaaaacaatggtgcgccaattgtaaaaaggaggccattttctactgctgctggaacacatcttattgcgattatccctgccagcaggcacattggccagagcacatgaagtcatgtactcagtccgccactgctccacagcaagaggctgatgccgaagtcaataccgagactttaaacaagtcatctcagggctccagcagcagcacgcagtctgcgccaagtgaaactgcaagtgcttcgaaggagaaagaaacaagcgctgagaagtcgaaagagagtggctctaccctggatctgagtggttcacgcgaaaccccaagtagtatcttgctgggctcgaaccagggatccgtgtcgaaacgctgtgataagcaacccgcatacgcaccaacaacaaccgaccatcagccgcacccaaactaccctgcccagaaataccactccaggtcaaataaaagttcatggagcagctcggacgaaaagcgaggttcaactcggtctgatcataatacatctacctcaacaaagtctctcctgcctaaagaatcacgtttggacactttttgggattag

SEQ ID NO: 100198 - DNA, 3411 bp, Artificial Sequence
  derived and/or modified sequence
atgcatccacagagcttggctgaagaggaaataaaaacagaacaggaggtggtagagggcatggatatctctactcgctccaaagatcctggctctgcagagagaacagcccagaaaagaaagttccccagccctccacattcttccaatggccactcgccgcaggacacatcaacaagccccattaaaaagaaaaagaaacctggcttactgaacagtaacaataaggagcaggatggacggaatgatttctactgctgggtttgtcaccgggaaggccaagtcctttgctgtgagctctgtccccgggtttatcacgctaagtgtctgagactgacatcggaaccagagggggactggttttgtcctgaatgtgagaaaattacagtagcagaatgcatcgagacccagagtaaagccatgacaatgctcaccattgaacagttatcctacctgctcaagtttgccattcagaaaatgaaacagccagggacagatgcattccagaagcccgttccattggaacagcaccctgactatgcggaatacatcttccatccaatggacctttgtacattggaaaagaatgcgaaaaagaaaatgtatggctgcacagaagccttcctggctgatgcaaagtggattttgcacaactgcatcatttataatgggggaaatcacaaattgacgcaaatagcgaaagtagtcatcaaaatctgtgaacatgagatgaatgaaatcgaagtatgtccagaatgttatctagctgcttgccaaaaacgagataactggttttgtgagccttgtagcaatccacatcctttggtctgggccaaactgaaggggtttccattctggcctgcaaaagctctaagggataaagacgggcaggtcgatgcccgattctttggacaacatgacagggcctgggttccaataaataattgctacctcatgtctaaagaaattcctttttctgtgaaaaagactaagagcatcttcaacagtgccatgcaagagatggaggtttacgtggagaacatccgcaggaagtttggggtttttaattactctccatttaggacaccctacacacccaacagccagtatcaaatgctgctcgatcccaccaaccccagcgccggcactgccaagatagacaagcaggagaaggtcaagctcaactttgacatgacggcatcccccaagatcctgatgagcaagcctgtgctgagtgggggcacaggccgccggatttccttgtcggatatgccgcgctcccccatgagcacaaactcttctgtgcacacgggctccgacgtggagcaggatgctgagaagaaggccacgtcgagccacttcagtgcgagcgaggagtccatggacttcctggataagagcacagcttcaccagcctccaccaagacgggacaagcagggagtttatccggcagcccaaagcccttctctcctcaactgtcagctcctatcacgacgaaaacggacaaaacctccaccaccggcagcatcctgaatcttaacctggatcgaagcaaagctgagatggatttgaaggagctgagcgagtcggtccagcaacagtccacccctgttcctctcatctctcccaagcgccagattcgtagcaggttccagctgaatcttgacaagaccatagagagttgcaaagcacaattaggcataaatgaaatctcggaagatgtctatacggccgtagagcacagcgattcggaggattctgagaagtcagatagtagcgatagtgagtatatcagtgatgatgagcagaagtctaagaacgagccagaagacacagaggacaaagaaggttgtcagatggacaaagagccatctgctgttaaaaaaaagcccaagcctacaaacccagtggagattaaagaggagctgaaaagcacgtcaccagccagcgagaaggcagaccctggagcagtcaaggacaaggccagccctgagcctgagaaggacttttccgaaaaggcaaaaccttcacctcaccccataaaggataaactgaagggaaaagatgagacggattccccaacagtccatttgggcctggactctgattcagagagcgaacttgtcatagatttaggagaagaccattctgggcgggagggtcgaaaaaataagaaggaacccaaagaaccatctcccaaacaggatgttgtaggtaaaactccaccatccacgacggtgggcagccattctcccccggaaacaccggtgctcacccgctcttccgcccaaacttccgcggctggcgccacagccaccaccagcacgtcctccacggtcaccgtcacggccccggcccccgccgccacaggaagcccagtgaaaaagcagaggccgcttttaccgaaggagactgccccggccgtgcagcgggtcgtgtggaactcatcaactgtccagcagaaggagatcacacagagcccatccacgtccaccatcaccctggtgaccagcacacagtcatcgcccctggtcaccagctcggggtccatgagcacccttgtgtcctcagtcaacgctgacctgcccatcgccactgcctcagctgatgtcgccgctgatattgccaagtacactagcaaaattcgcaggctgaggatcgagatagagaagctccagtggctgcaccagcaagagctctccgaaatgaaacacaacttagagctgaccatggcggagatgcggcagagcctggagcaggagcgggaccggctcatcgccgaggtgaagaagcagctggagttggagaagcagcaggcggtggatgagaccaagaagaagcagtggtgcgccaactgcaagaaggaggccatcttttactgctgttggaacactagctactgtgactacccctgccagcaagcccactggcctgagcacatgaagtcctgcacccagtcagctactgctcctcagcaggaagcggatgctgaggtgaacacagaaacactaaataagtcctcccaggggagctcctcgagcacacaatcagcaccttcagaaacggccagcgcctccaaagagaaggagacgtcagctgagaaaagcaaggagagtggctcgacccttgacctttctggctccagagagacgccctcctccattctcttaggctccaaccaaggctctgttagcaaaaggtgtgacaagcaacctgcctatgccccaaccaccacagaccaccagccgcaccccaactaccccgcccagaagtaccattcccggagtaataaatccagttggagcagcagtgatgagaagaggggatcgacacgttccgatcacaacaccagtaccagcacgaagagcctcctcccgaaagagtctcggctggacaccttctgggactag

SEQ ID NO: 100199 - DNA, 3561 bp, Artificial Sequence
  derived and/or modified sequence
atggacatcagcaccagaagcaaggaccccggcagcgccgagagaaccgcccagaagagaaagttccccagccccccccacagcagcaacggccacagcccccaggacaccagcaccagccccatcaagaagaagaagaagcccggcctgctgaacagcaacaacaaggagcagagcgagctgagacacggccccttctactacatgaagcagcccctgaccaccgaccccgtggacgtggtgccccaggacggcagaaacgacttctactgctgggtgtgccacagagagggccaggtgctgtgctgcgagctgtgccccagagtgtaccacgccaagtgcctgagactgaccagcgagcccgagggcgactggttctgccccgagtgcgagaagatcaccgtggccgagtgcatcgagacccagagcaaggccatgaccatgctgaccatcgagcagctgagctacctgctgaagttcgccatccagaagatgaagcagcccggcaccgacgccttccagaagcccgtgcccctggagcagcaccccgactacgccgagtacatcttccaccccatggacctgtgcaccctggagaagaacgccaagaagaagatgtacggctgcaccgaggccttcctggccgacgccaagtggatcctgcacaactgcatcatctacaacggcggcaaccacaagctgacccagatcgccaaggtggtgatcaagatctgcgagcacgagatgaacgagatcgaggtgtgccccgagtgctacctggccgcctgccagaagagagacaactggttctgcgagccctgcagcaacccccaccccctggtgtgggccaagctgaagggcttccccttctggcccgccaaggccctgagagacaaggacggccaggtggacgccagattcttcggccagcacgacagagcctgggtgcccatcaacaactgctacctgatgagcaaggagatccccttcagcgtgaagaagaccaagagcatcttcaacagcgccatgcaggagatggaggtgtacgtggagaacatcagaagaaagttcggcgtgttcaactacagccccttcagaaccccctacacccccaacagccagtaccagatgctgctggaccccaccaaccccagcgccggcaccgccaagatcgacaagcaggagaaggtgaagctgaacttcgacatgaccgccagccccaagatcctgatgagcaagcccgtgctgagcggcggcaccggcagaagaatcagcctgagcgacatgcccagaagccccatgagcaccaacagcagcgtgcacaccggcagcgacgtggagcaggacgccgagaagaaggccaccagcagccacttcagcgccagcgaggagagcatggacttcctggacaagagcaccgccagccccgccagcaccaagaccggccaggccggcagcctgagcggcagccccaagcccttcagcccccagctgagcgcccccatcaccaccaagaccgacaagaccagcaccaccggcagcatcctgaacctgaacctggacagaagcaaggccgagatggacctgaaggagctgagcgagagcgtgcagcagcagagcacccccgtgcccctgatcagccccaagagacagatcagaagcagattccagctgaacctggacaagaccatcgagagctgcaaggcccagctgggcatcaacgagatcagcgaggacgtgtacaccgccgtggagcacagcgacagcgaggacagcgagaagagcgacagcagcgacagcgagtacatcagcgacgacgagcagaagagcaagaacgagcccgaggacaccgaggacaaggagggctgccagatggacaaggagcccagcgccgtgaagaagaagcccaagcccaccaaccccgtggagatcaaggaggagctgaagagcaccagccccgccagcgagaaggccgaccccggcgccgtgaaggacaaggccagccccgagcccgagaaggacttcagcgagaaggccaagcccagcccccaccccatcaaggacaagctgaagggcaaggacgagaccgacagccccaccgtgcacctgggcctggacagcgacagcgagagcgagctggtgatcgacctgggcgaggaccacagcggcagagagggcagaaagaacaagaaggagcccaaggagcccagccccaagcaggacgtggtgggcaagaccccccccagcaccaccgtgggcagccacagcccccccgagacccccgtgctgaccagaagcagcgcccagaccagcgccgccggcgccaccgccaccaccagcaccagcagcaccgtgaccgtgaccgcccccgcccccgccgccaccggcagccccgtgaagaagcagagacccctgctgcccaaggagaccgcccccgccgtgcagagagtggtgtggaacagcagcagcaagttccagaccagcagccagaagtggcacatgcagaagatgcagagacagcagcagcagcagcagcagcagaaccagcagcagcagccccagagcagccagggcaccagataccagaccagacaggccgtgaaggccgtgcagcagaaggagatcacccagagccccagcaccagcaccatcaccctggtgaccagcacccagagcagccccctggtgaccagcagcggcagcatgagcaccctggtgagcagcgtgaacgccgacctgcccatcgccaccgccagcgccgacgtggccgccgacatcgccaagtacaccagcaagatgatggacgccatcaagggcaccatgaccgagatctacaacgacctgagcaagaacaccaccggcagcaccatcgccgagatcagaagactgagaatcgagatcgagaagctgcagtggctgcaccagcaggagctgagcgagatgaagcacaacctggagctgaccatggccgagatgagacagagcctggagcaggagagagacagactgatcgccgaggtgaagaagcagctggagctggagaagcagcaggccgtggacgagaccaagaagaagcagtggtgcgccaactgcaagaaggaggccatcttctactgctgctggaacaccagctactgcgactacccctgccagcaggcccactggcccgagcacatgaagagctgcacccagagcgccaccgccccccagcaggaggccgacgccgaggtgaacaccgagaccctgaacaagagcagccagggcagcagcagcagcacccagagcgcccccagcgagaccgccagcgccagcaaggagaaggagaccagcgccgagaagagcaaggagagcggcagcaccctggacctgagcggcagcagagagacccccagcagcatcctgctgggcagcaaccagggcagcgaccacagcagaagcaacaagagcagctggagcagcagcgacgagaagagaggcagcaccagaagcgaccacaacaccagcaccagcaccaagagcctgctgcccaaggagagcagactggacaccttctgggactag

SEQ ID NO: 100200 - DNA, 3561 bp, Artificial Sequence
  derived and/or modified sequence
atggacatttcgacaagaagtaaggacccaggaagcgcagagcggactgcccagaaacggaagttcccctccccaccccattccagtaatggccacagcccacaggacactagcaccagtcccattaaaaagaagaagaaaccaggactgcttaattcaaataataaagagcagtccgaattaagacacggtccattttattatatgaagcaacccctgaccaccgatccggtggacgtggttccccaggatggccggaatgacttctattgttgggtatgccaccgggaaggacaagtcctgtgctgtgaattatgccctagggtatatcatgccaaatgtttgagactgacttcagagccagagggcgactggttttgccccgagtgcgagaaaattactgtggcagagtgtatagagacccagtctaaagccatgacgatgctgactatcgagcaactttcatacttgctcaagtttgcgatccagaaaatgaaacagccaggcaccgacgcctttcaaaagccagtgcccctcgaacagcaccctgactacgccgaatacatttttcaccccatggatctctgcacactggaaaagaacgcaaagaagaagatgtacggatgtacagaggcgtttttggccgatgctaagtggatcctgcacaattgcatcatctataacggaggtaaccacaaactgactcagattgccaaggttgtcatcaagatatgtgagcacgaaatgaacgaaattgaggtctgccctgagtgttacctagccgcatgtcagaagagagataactggttttgtgagccatgttccaatcctcatcctttagtatgggcaaaactcaagggctttccattctggcccgccaaggcactccgggacaaggacggccaggtcgatgcaagattctttgggcagcacgacagagcatgggtgcctataaacaattgctacttgatgtctaaggagatcccattcagtgttaagaaaactaagagcatcttcaacagcgcaatgcaggagatggaggtatacgtcgagaacatacggcggaagttcggggttttcaactacagccctttcaggactccctacactccgaactcacaataccagatgctgcttgatcctacaaacccctccgcaggcacggccaaaatcgacaaacaggagaaggtgaagttgaacttcgatatgaccgctagtccaaaaattcttatgagtaaaccggtgctgtccggagggaccggcagacggataagtctgtccgatatgccgcggtccccaatgagtaccaattcttctgtccatactggatctgacgtggaacaggacgccgagaagaaagccacctctagtcacttctccgcctcagaggagtctatggactttctcgataaaagcactgcttcccccgcctccaccaagacaggtcaagccggatccttgtcagggtcccccaagcctttctctccccagctgtccgccccaattacgaccaagacagacaagacctctacaaccggaagcattctgaacctcaatctcgacaggtcaaaggcagaaatggatttaaaagaactcagcgaatccgtccaacaacaaagcacccccgttccacttatatcgcccaagagacagattaggtcaagatttcaactgaacttggataaaaccattgaaagctgtaaggcgcagcttgggatcaatgagattagtgaggacgtgtatactgccgtggaacactcagactctgaggacagcgagaagagcgattctagtgattcggagtacatcagcgacgacgaacagaagtctaaaaatgaacccgaggacactgaggataaggagggatgccagatggataaagagccaagtgccgttaaaaaaaagcccaaaccgacaaacccagtggagataaaagaggagcttaagtcgacaagtcccgccagtgagaaagcagacccgggcgctgttaaagataaggcctctcccgagcccgagaaggatttcagcgagaaagccaagccttctccacatccaatcaaggacaaacttaaaggtaaggacgagaccgattcacctaccgtccacctgggtctggattccgactctgaaagcgagctggtgatcgacctgggagaggatcactcaggtcgtgaggggagaaaaaacaagaaggagccaaaggagccttcccctaaacaggacgttgtaggcaaaacgcctccgagcaccactgtgggaagccactcaccgcctgagacccctgtgctcacacggtccagcgcccagacaagcgccgctggggcaacagccaccacaagcacatcgagcacagttactgtgacagcaccagcccctgctgccaccggaagcccagtgaaaaagcagcggccattactcccaaaggagacagccccagccgtgcagagagtggtctggaactcgagctccaaattccagacctcctcacagaagtggcatatgcagaagatgcaaagacagcaacagcagcagcagcagcaaaaccagcagcagcagccacaaagctcacagggcacgaggtaccaaactcggcaggcagtcaaggccgtgcaacagaaagaaatcacgcaaagcccaagtacctccacgataacccttgtgacttcaactcagtcctctcctcttgtcacttccagtggatccatgagcactctcgtaagcagcgtgaatgccgacctcccaattgccactgcgtcggctgacgtagcagctgacatcgccaaatacaccagcaagatgatggacgcgatcaaaggtactatgacagaaatctataacgaccttagcaagaataccactggaagcacaatagccgagatacggcgtttgaggatagagattgaaaaactacagtggctacaccaacaggaactcagcgaaatgaaacacaacttggagttgacaatggctgagatgcggcaatctctggaacaggaaagagaccggttgatagccgaggtgaaaaagcaattggaactcgaaaaacaacaggccgtagatgaaaccaagaagaaacagtggtgcgcgaattgcaagaaagaagccatcttttactgttgctggaacacttcttactgtgactatccctgtcagcaggcacattggcctgagcacatgaagagttgtactcagtcggctactgccccccagcaagaggcagatgccgaggttaatacagaaactctcaataagagttcacagggcagctccagctctacccagagcgctccttcagaaacagcatccgcttccaaagagaaggaaacgagcgctgaaaaaagcaaagagagcgggagtacactggacctgtctggctcgagggagaccccgagcagtattctcctaggcagcaatcaggggtccgatcatagccgcagtaacaagtcatcatggagcagctccgacgaaaaacgcggatctaccagaagcgaccataacacctctacatccaccaagagcttgctcccaaaagaatctcgcctggatacattctgggactag

SEQ ID NO: 100201 - DNA, 3561 bp, Artificial Sequence
  derived and/or modified sequence
atggacatcagcaccaggagcaaggaccccggcagcgctgagaggacagcccagaagaggaagttccccagccccccccacagcagcaatggccacagcccccaggacaccagcaccagccccatcaagaagaagaagaagccaggcctgctgaacagcaacaacaaggagcagagcgagctgcggcacggccccttctactacatgaagcagcccctgaccacagatcctgtggatgtggtgccccaggacggcagaaatgacttctactgctgggtgtgccaccgggagggccaggtgctgtgctgtgagctgtgcccccgggtgtaccacgccaagtgcctgcggctgaccagcgagcctgagggggactggttctgcccagaatgtgagaagatcaccgtggctgaatgtattgagacccagagcaaggccatgaccatgctgaccatcgagcagctgagctacctgctgaagtttgccatccagaagatgaagcagcccggcacagatgccttccagaagcctgtgcccctggagcagcacccagactatgcagagtacatcttccaccccatggacctgtgcaccctggagaagaatgccaagaagaagatgtatggctgcacagaggccttcctggctgatgccaagtggatcctgcacaactgcatcatctacaacggcggcaaccacaagctgacccagatcgccaaggtggtgatcaagatctgtgaacatgagatgaatgaaattgaggtgtgcccagagtgctacctggccgcctgccagaagagggacaactggttctgtgagccctgcagcaacccccaccccctggtgtgggccaagctgaagggcttccccttctggccagccaaggccctgcgggacaaggatggccaggtggatgcccgcttcttcggccagcacgaccgggcctgggtgcccatcaacaactgctacctgatgagcaaggagatccccttctctgtgaagaagaccaagagcatcttcaacagcgccatgcaggagatggaggtgtatgtggagaacatccggaggaagtttggagtcttcaactacagccccttccgcaccccctacacccccaacagccagtaccagatgctgctggaccccaccaaccccagcgctggaacagccaagattgacaagcaggagaaggtgaagctgaactttgacatgacagccagccccaagatcctgatgagcaagcctgtgctgagcggcggcaccggccgccgcatcagcctgagtgacatgcccaggagccccatgagcaccaacagctctgtgcacacaggcagtgatgtggagcaggatgctgagaagaaggccaccagcagccacttcagcgccagcgaggagagcatggacttcctggacaagagcacagccagccctgccagcaccaagacaggccaggccggcagcctgagcggcagccccaagcccttcagcccccagctgagcgcccccatcaccaccaagacagacaagaccagcaccaccggcagcatcctgaacctgaacctggacaggagcaaggccgagatggacctgaaggagctgtctgagagcgtgcagcagcagagcacccctgtgcccctcatcagccccaagaggcagatccgcagccgcttccagctgaacctggacaagaccatcgagagctgcaaggcccagctgggcatcaatgagatcagtgaagatgtgtacacagctgtggagcacagcgacagcgaggacagcgagaagagtgacagcagtgacagcgagtacatcagtgatgatgagcagaagagcaagaatgaacctgaggacacagaggacaaggagggctgccagatggacaaggagcccagcgctgtgaagaagaagcccaagcccaccaaccctgtggagatcaaggaggagctgaagagcaccagccctgccagcgagaaggctgaccccggggctgtgaaggacaaggccagccctgagcctgagaaggacttcagcgagaaggccaagcccagcccccaccccatcaaggacaagctgaagggcaaggatgaaacagacagccccaccgtgcacctgggcctggacagcgacagcgagagcgagctggtgattgacctgggggaggaccacagcggccgggagggcaggaagaacaagaaggagcccaaggagcccagccccaagcaggatgtggtgggcaagaccccacccagcaccaccgtgggcagccacagccccccagagacccctgtgctgaccaggagcagcgcccagaccagcgctgctggggccacagccaccaccagcaccagcagcacagtgacagtgacagccccagccccagctgccaccggcagccctgtgaagaagcagaggcccctgctgcccaaggagacagccccagctgtgcagagggtggtgtggaacagcagcagcaagttccagaccagcagccagaagtggcacatgcagaagatgcagaggcagcagcagcagcagcagcagcagaaccagcagcagcagccccagagcagccagggcacccgctaccagacccggcaggccgtgaaggctgtgcagcagaaggagatcacccagagccccagcaccagcaccatcaccctggtgaccagcacccagagcagccccctggtgaccagcagcggctccatgagcaccctggtgtcctctgtgaatgctgacctgcccatcgccacagccagcgcagatgtggccgctgacatcgccaagtacaccagcaagatgatggatgccatcaagggcaccatgacagagatctacaatgacctgagcaagaacaccaccggcagcaccatcgccgagatccggcggctgagaattgaaattgagaagctgcagtggctgcaccagcaggagctgtctgagatgaagcacaacctggagctgaccatggccgagatgaggcagagcctggagcaggagcgggaccggctgattgctgaggtgaagaagcagctggagctggagaagcagcaggccgtggatgagaccaagaagaagcagtggtgtgccaactgcaagaaggaggccatcttctactgctgctggaacaccagctactgtgactacccctgccagcaggcccactggccagagcacatgaagagctgcacccagagcgccacagccccccagcaggaggctgatgctgaggtgaacacagagaccctgaacaagagcagccagggcagcagcagcagcacccagagcgcccccagcgagacagccagcgccagcaaggagaaggagaccagcgctgagaagagcaaggagagcggcagcaccctggacctgagcggcagccgggagacccccagcagcatcctgctgggcagcaaccagggcagtgaccacagccgcagcaacaagagctcctggagcagcagtgatgagaagaggggcagcaccaggagtgaccacaacaccagcaccagcaccaagagcctgctgcccaaggagagccggctggacaccttctgggactag

SEQ ID NO: 100202 - DNA, 3561 bp, Artificial Sequence
  derived and/or modified sequence
atggacatcagcacccggagcaaggaccccggcagcgccgagcggaccgcccaaaagaggaagttccccagcccgccccacagctccaacggacacagtcctcaagacaccagcacctccccaatcaagaaaaagaaaaaaccgggtctcctgaattcaaacaacaaagagcagagtgaattgagacacgggccgttttactacatgaagcaaccactgactacggaccctgtggacgttgtgccccaggacggacgaaatgacttctattgctgggtgtgccaccgggaaggtcaagttctctgttgcgaactgtgcccacgagtgtaccatgctaaatgcctaagactaaccagcgaacccgagggggactggttttgcccagagtgcgagaagatcacagtggcagagtgtattgagacacagagcaaagcaatgaccatgttgactatcgagcagctgtcctatctactcaagtttgccatccaaaaaatgaaacagcccggaactgatgcttttcagaagccagtgccactggaacagcatccggactacgcagaatacatattccacccgatggacctgtgtacactggagaagaatgccaaaaagaagatgtacggctgtaccgaggcgtttctggcagatgccaaatggatccttcacaattgcataatctacaacggaggcaatcacaaactgacacagattgctaaagtggtgatcaagatctgcgaacacgaaatgaacgaaattgaggtatgtcctgagtgttatcttgctgcctgccaaaaaagagataactggttctgtgaaccgtgctccaaccctcacccccttgtgtgggccaaactcaagggatttcccttttggcctgctaaagctcttcgagacaaagacggacaggtcgacgcccggttctttgggcagcatgatagagcctgggtgcccattaacaattgttatttgatgtccaaggaaatccctttcagcgtcaaaaagaccaagtctatattcaattcagccatgcaagaaatggaggtttatgtggagaatattcggcgtaaattcggggtgttcaactattctccttttcgcactccctacacaccgaattcccagtatcaaatgctcttagatcccacgaatccatctgcaggcacagcaaaaatcgacaagcaggagaaggtaaaactcaattttgatatgactgcctcacccaagatcctgatgagtaagccagtgctgagtggaggcacagggcggcgaatttcactgtccgatatgcctcggtcacctatgtccaccaattccagcgtacacacaggaagcgacgtggagcaggacgctgagaaaaaagctacttcttcgcatttctccgccagcgaggaatctatggactttctggacaagtcaaccgcttctcctgcgtccacgaaaactgggcaggctggtagcctttcaggatcaccgaagcccttttccccgcagttatccgctcccatcactactaaaactgataagacctctacgacaggctcgatacttaacctcaacctggaccgctccaaggcagaaatggacctgaaagagctgtctgagtcggtgcagcaacagtctacaccggtccccttgatcagccccaaacgacagatcagatctcgcttccagcttaatttggacaagacgattgagagctgcaaggcacaattgggaatcaacgaaatctctgaggatgtgtatacagcagtcgagcattctgactctgaggattccgaaaaatcagactcctctgatagcgaatatataagtgacgatgaacagaagtcaaagaacgagcctgaggacactgaagataaggaaggatgccaaatggataaggagccttccgctgtgaaaaagaaaccaaagccgacaaacccggttgagatcaaagaggagctgaagagtacttcccccgcctccgagaaggcggaccccggagcagtgaaggataaagcgagtcccgaaccggagaaggacttctccgaaaaggcgaaaccttcccctcacccaatcaaagataagctgaaagggaaggacgagacagattctccgaccgtacacctgggcctggatagcgattccgagagcgagttggtcattgatctaggcgaagatcactcaggacgggagggaaggaaaaataagaaggagcctaaggaaccaagccccaagcaggatgtcgtgggcaaaaccccaccgtccaccaccgtcggaagtcattcgcccccggagacacccgtactgaccagatcatctgctcagactagtgccgctggcgctacggccacgacctctacttccagtaccgttacagtcactgccccagcaccggccgccactggctcacctgtgaagaagcaacgtcctttactgcctaaggagaccgccccagccgtgcagagggtcgtatggaattcctcaagcaagttccaaaccagctcccagaaatggcacatgcagaagatgcagcggcagcagcaacaacaacagcagcagaaccagcagcagcagcctcagagttctcagggtacccgataccagacccgccaggcagtgaaggccgtccagcaaaaggagatcacgcagtctccatccaccagtactattaccctggttacatcaacacagtcgagcccattggtgacttccagcggctcaatgtccaccctggtgtcctccgtaaacgccgaccttcctatcgccacggcctccgcagacgtggctgcagacattgcaaaatataccagtaaaatgatggatgcaattaaaggcacgatgaccgagatttataatgacctgtccaagaataccactggtagtacaatcgctgagattagaagactgcgcattgagatcgaaaaattgcagtggctacaccagcaggagctgagcgaaatgaagcataatttagaactgaccatggccgagatgcggcaaagtcttgaacaggagagggaccgcttgattgccgaggtcaaaaaacaattggagcttgagaagcaacaagcggtagatgagaccaaaaaaaaacagtggtgtgcgaactgcaaaaaggaggctatcttttattgctgttggaataccagctattgtgactatccatgccagcaggctcattggccagagcacatgaagagttgcacacagagcgctaccgcacctcagcaggaggctgacgccgaagtaaacacagagacactcaataagagtagccagggttcttctagctccacccagagtgccccttctgaaaccgcttctgcaagcaaagagaaggaaacctctgcagaaaagtcaaaagagtcagggtccaccttggatctgtccggaagtcgtgaaacaccctcctcgatcctgctagggtcaaatcagggaagcgaccattcccgcagcaacaagtcgagttggagcagctccgatgaaaagcgcggaagcacaaggtcagaccataacacttcgacaagcacgaaaagtttgctccctaaggagtctaggctggacaccttctgggactag

SEQ ID NO: 100203 - DNA, 3561 bp, Artificial Sequence
  derived and/or modified sequence
atggacatcagtacacgatccaaggaccctggatctgcagagcgcactgctcagaagcgtaaattccccagcccccctcattctagtaatggacatagcccccaggatacctccacctctcccattaagaagaagaagaagcctgggttactcaatagtaataacaaggaacagtcggaacttagacacgggccattctattacatgaaacaacccctgaccacagaccccgttgatgtagtgccgcaggatggcaggaatgatttttattgctgggtgtgccaccgagaggggcaagttctttgttgcgaactctgtcccagggtgtatcacgcgaaatgcctgagactgacctctgaacccgaaggggattggttctgtcccgagtgtgaaaaaattacagttgccgagtgcatcgagacacaatccaaagcgatgaccatgctgacaatcgaacaactgtcatacctgttgaagttcgccatacaaaagatgaaacaacccggtactgatgcttttcagaagcccgtgccactggagcagcatccagattacgccgaatatatttttcatccaatggatttatgtaccctggaaaagaatgcgaaaaagaagatgtacggctgtacagaggcgtttctcgctgatgctaagtggattttacataattgcattatctataatggcggaaaccacaaacttactcagatcgccaaagtggttattaagatctgcgaacacgagatgaacgaaattgaagtctgccctgaatgttacttggccgcttgtcagaagcgggacaactggttttgtgaaccttgctccaaccctcaccctctggtttgggccaaactcaagggattcccattctggcccgcaaaggcccttagagataaggatggtcaagtggacgccagattcttcggccagcacgaccgcgcatgggtgccaattaacaattgctatctgatgtctaaggagatcccattctctgtgaagaaaaccaagtcaatcttcaacagtgctatgcaggagatggaagtttatgttgaaaacattcgcaggaagtttggcgtgttcaattatagcccctttcgcacaccctacacccctaattctcagtaccagatgcttctcgacccgacaaacccgtctgcgggtactgccaagattgacaaacaagagaaagtcaaactaaatttcgatatgactgctagtcccaaaatcctgatgtccaagcctgtcctgagcgggggtacaggcaggaggatctctctcagcgacatgcccagatcaccaatgtctaccaacagcagcgtgcacacggggtcagatgtggaacaggatgccgaaaaaaaggcaactagtagtcatttcagcgcctcagaagagtccatggacttcctggacaagtctaccgcttcgccagcttccactaaaaccggacaggcaggcagtctcagcggctcccccaagccattttcacctcaattatctgcgccaataaccactaaaactgacaagacgagcaccacgggctctatcctaaatcttaatctggacagatccaaggccgaaatggatttgaaagaattgagcgaatccgttcagcagcaaagcacacctgtcccactgatttcccccaagcgccaaatccgatctcgattccagctgaatctcgacaagactatcgagagttgtaaagcacagctgggcatcaatgaaatctcagaagatgtgtataccgccgtggagcacagcgactccgaggactccgagaaatctgactctagtgacagtgagtacatatcagatgatgaacaaaaatcgaaaaacgaaccagaagacacagaagacaaggaggggtgccagatggataaggagccatctgcagtaaagaaaaagccgaagccaaccaaccccgttgagatcaaagaggagttgaagagcacgtcacccgcaagcgagaaagccgatcctggagctgtgaaagacaaagccagccccgagcccgagaaggatttcagcgagaaggcaaagccttctcctcatcctataaaagataagctgaaaggcaaggatgaaaccgactctcccacggttcatctgggactggattcggactctgaatctgagctcgttatcgatcttggagaggaccacagtggcagggaggggaggaagaacaagaaggagcctaaagagccatcccccaagcaagatgttgtgggcaagacgcctccctctacgactgtgggaagccactcccccccagaaacgccagtgcttactcggtcctcagcccaaacttcagctgcaggtgctaccgcgactacaagcacttcctccactgtgacggtgaccgcccctgcccctgccgcaacaggcagtcccgtcaaaaaacagcgccctcttctgcccaaggaaaccgctccagccgtacagcgggttgtttggaactccagcagcaagttccagacaagctcccagaaatggcacatgcagaagatgcagaggcagcaacagcagcagcagcagcagaatcaacagcagcagcctcagagcagtcagggtacaagataccaaacaaggcaggctgtgaaggcggtccagcagaaggagattacccagtcacccagtacgtctacaattacacttgtcacttctacgcagtcaagcccccttgtcacaagttccggttcgatgtcaactctggtgtcatcagtaaacgccgacctccctatcgctacagccagtgccgacgtcgccgctgacattgcaaagtacactagtaagatgatggatgcaattaaggggacaatgaccgaaatttataacgacctctctaaaaatactactggaagtacgatagcagagattcgccgtctgcgcatcgaaatcgagaagcttcaatggctccaccagcaggaattgagtgaaatgaagcacaacctggaactgactatggccgagatgaggcagtcactagaacaggaaagagaccgcctgatagctgaagtaaagaaacagcttgaactggagaaacagcaggcagtggatgaaactaagaagaagcagtggtgtgcaaattgtaagaaagaggcaatattttactgctgctggaacacctcttattgcgactacccatgtcagcaagctcattggcccgagcacatgaagtcctgcacccaaagcgcgacagccccacagcaggaagccgacgcagaggtgaacacagagacgttgaacaagtcctcccaaggcagtagttctagcacccagtccgcacctagcgagacggccagcgccagtaaagaaaaagagacctctgcagaaaagagcaaagaatcgggttctacccttgaccttagcggctccagggaaactccatcaagcatcctcctgggatcaaaccaggggtctgatcacagtaggtccaacaagagctcttggagctccagtgatgaaaagagaggctcaacacgcagcgatcacaacacatccacttctactaaatcgctgcttcctaaggagtcgcgtttagacaccttttgggactag

SEQ ID NO: 100204 - DNA, 5362 bp, Artificial Sequence
  derived and/or modified sequence
ggagtgtagaggaaataaaatcatgtctgtggctcatgacagcattccatattcagttgttgggttgtgttgttgttgttgtgtgtgtttttaataataccatgtaactgtttaaaaaaatttcctttttgatcaagtcccaaatctgccagcctgttctctcttcctaactgtggaaaaatgagacggttgcttgaacatttgttggcttggctgaagaggaaataaaaacagaacaggaggtggtagagggcatggatatctctactcgctccaaagatcctggctctgcagagagaacagcccagaaaagaaagttccccagccctccacattcttccaatggccactcgccgcaggacacatcaacaagccccattaaaaagaaaaagaaacctggcttactgaacagtaacaataaggagcagtcagaactaagacatggtccgttttactatatgaagcagccactcaccacagaccctgttgatgttgtaccgcaggatggacggaatgatttctactgctgggtttgtcaccgggaaggccaagtcctttgctgtgagctctgtccccgggtttatcacgctaagtgtctgagactgacatcggaaccagagggggactggttttgtcctgaatgtgagaaaattacagtagcagaatgcatcgagacccagagtaaagccatgacaatgctcaccattgaacagttatcctacctgctcaagtttgccattcagaaaatgaaacagccagggacagatgcattccagaagcccgttccattggaacagcaccctgactatgcggaatacatcttccatccaatggacctttgtacattggaaaagaatgcgaaaaagaaaatgtatggctgcacagaagccttcctggctgatgcaaagtggattttgcacaactgcatcatttataatgggggaaatcacaaattgacgcaaatagcgaaagtagtcatcaaaatctgtgaacatgagatgaatgaaatcgaagtatgtccagaatgttatctagctgcttgccaaaaacgagataactggttttgtgagccttgtagcaatccacatcctttggtctgggccaaactgaaggggtttccattctggcctgcaaaagctctaagggataaagacgggcaggtcgatgcccgattctttggacaacatgacagggcctgggttccaataaataattgctacctcatgtctaaagaaattcctttttctgtgaaaaagactaagagcatcttcaacagtgccatgcaagagatggaggtttacgtggagaacatccgcaggaagtttggggtttttaattactctccatttaggacaccctacacacccaacagccagtatcaaatgctgctcgatcccaccaaccccagcgccggcactgccaagatagacaagcaggagaaggtcaagctcaactttgacatgacggcatcccccaagatcctgatgagcaagcctgtgctgagtgggggcacaggccgccggatttccttgtcggatatgccgcgctcccccatgagcacaaactcttctgtgcacacgggctccgacgtggagcaggatgctgagaagaaggccacgtcgagccacttcagtgcgagcgaggagtccatggacttcctggataagagcacagcttcaccagcctccaccaagacgggacaagcagggagtttatccggcagcccaaagcccttctctcctcaactgtcagctcctatcacgacgaaaacggacaaaacctccaccaccggcagcatcctgaatcttaacctggatcgaagcaaagctgagatggatttgaaggagctgagcgagtcggtccagcaacagtccacccctgttcctctcatctctcccaagcgccagattcgtagcaggttccagctgaatcttgacaagaccatagagagttgcaaagcacaattaggcataaatgaaatctcggaagatgtctatacggccgtagagcacagcgattcggaggattctgagaagtcagatagtagcgatagtgagtatatcagtgatgatgagcagaagtctaagaacgagccagaagacacagaggacaaagaaggttgtcagatggacaaagagccatctgctgttaaaaaaaagcccaagcctacaaacccagtggagattaaagaggagctgaaaagcacgtcaccagccagcgagaaggcagaccctggagcagtcaaggacaaggccagccctgagcctgagaaggacttttccgaaaaggcaaaaccttcacctcaccccataaaggataaactgaagggaaaagatgagacggattccccaacagtccatttgggcctggactctgattcagagagcgaacttgtcatagatttaggagaagaccattctgggcgggagggtcgaaaaaataagaaggaacccaaagaaccatctcccaaacaggatgttgtaggtaaaactccaccatccacgacggtgggcagccattctcccccggaaacaccggtgctcacccgctcttccgcccaaacttccgcggctggcgccacagccaccaccagcacgtcctccacggtcaccgtcacggccccggcccccgccgccacaggaagcccagtgaaaaagcagaggccgcttttaccgaaggagactgccccggccgtgcagcgggtcgtgtggaactcatcaagtaagtttcaaacgtcctcccaaaagtggcacatgcagaagatgcagcgtcagcagcagcagcagcagcagcaaaaccagcagcagcagcctcagtcttcccaggggacgagatatcagaccagacaggctgtgaaagctgtccagcagaaggagatcacacagagcccatccacgtccaccatcaccctggtgaccagcacacagtcatcgcccctggtcaccagctcggggtccatgagcacccttgtgtcctcagtcaacgctgacctgcccatcgccactgcctcagctgatgtcgccgctgatattgccaagtacactagcaaaatgatggatgcaataaaaggaacaatgacagaaatatacaacgatctttctaaaaacactactggaagcacaatagctgagattcgcaggctgaggatcgagatagagaagctccagtggctgcaccagcaagagctctccgaaatgaaacacaacttagagctgaccatggcggagatgcggcagagcctggagcaggagcgggaccggctcatcgccgaggtgaagaagcagctggagttggagaagcagcaggcggtggatgagaccaagaagaagcagtggtgcgccaactgcaagaaggaggccatcttttactgctgttggaacactagctactgtgactacccctgccagcaagcccactggcctgagcacatgaagtcctgcacccagtcagctactgctcctcagcaggaagcggatgctgaggtgaacacagaaacactaaataagtcctcccaggggagctcctcgagcacacaatcagcaccttcagaaacggccagcgcctccaaagagaaggagacgtcagctgagaaaagcaaggagagtggctcgacccttgacctttctggctccagagagacgccctcctccattctcttaggctccaaccaaggctctgaccattcccggagtaataaatccagttggagcagcagtgatgagaagaggggatcgacacgttccgatcacaacaccagtaccagcacgaagagcctcctcccgaaagagtctcggctggacaccttctgggactagcagtgaatcgggacacaaaccacccaccccattgggagaaaaacccagacgccaggaaaagaagaaacaacaaaggcaggagaacagccactttcagacttgaaaatgacaaaaccctcagttgagcctgagcccccggcgcgggggctgctacactacaggacacccagcatcggctttgactgcagactgttcacccacacgagccctgtgcttttggtgtaaataatgtacaatttgtggatgtcattgaatctagaggactttcccctttttatatttgtattaactttaacttattaaaaaaaaaaaaagaaaaagaaaaacgatttaaaaaaaaaaaaaaaagcaaccaaccccaacaacaaaaaagaatgttttggtattggagaagggatggtcagttagcctgtctgtcacacgacggaatggatactgggcccggggaccactttcatactcacgtcctcatccttggatacccaggggagggcgaaccgttttcgctcgtgtgtctgtacgcagcatgttgggatcgggagtttcggcacagactatcccatcaagccgttggctcctttcagctactacgttaccacgttcctaaaacgcaagctctccggaccagacggacacagggagaagctagtttctttcatgtgattgaaatgatgactctactcctaaaagggaaaaaacaatatccttgtttacagaagagaaacaaacaagccccactcagctcagtcacaggagagaacacagaaagtcttaggatcatgaactctgaaaaaaagagaaaccttatctttgctttgtggttcctttaaacacactcacacacacttggtcagagatgctgtgcttcttggaagcaaggactcaaaggcaaggtgcacgcagaggacgtttgagtctgggatgaagcatgtacgtattatttatatgatggaatttcacgtttttatgtaagcatgaaacacaggcagtatgagagaaagcaaggcccgtcatgctgtccgtacactacgtatgctgtagagccattttgtatgttgtgtaaaacaaaaagcattgatgaaaaagcaaaaggtgatgtatgtatatgagaaaattaattgtacgatatcattccagtacgttttgttgtacattttagtcttgtttactttctcttcattgttaagaggatgcgaactgtacagtttccagctagttacccatattagagaagaaataagagagtattagaagaaaacaggagagaaagaacatttgtgaattgcagttgtcaaaaaaaaaaaatagcctagctggccttatttgtgaagcataattgcttttagcatatggaagtattttttcacattttctttgtataaaatttgtattaaacttaaatatctttttgatggtggtgtttctttgtgactgagccagtagactcacactatatgcttttttgggtttgcccgttccttcccccacccccccagttttttcagatttctttacctttttttaattaaactgttttggaaaaatgc

SEQ ID NO: 100205 - protein, 1134 aa, Artificial Sequence
  derived and/or modified sequence
MHPQSLAEEEIKTEQEVVEGMDISTRSKDPGSAERTAQKRKFPSPPHSSNGHSPQDTSTSPIKKKKKPGLLNSNNKEQDGRNDFYCWVCHREGQVLCCELCPRVYHAKCLRLTSEPEGDWFCPECEKITVAECIETQSKAMTMLTIEQLSYLLKFAIQKMKQPGTDAFQKPVPLEQHPDYAEYIFHPMDLCTLEKNAKKKMYGCTEAFLADAKWILHNCIIYNGGNHKLTQIAKVVIKICEHEMNEIEVCPECYLAACQKRDNWFCEPCSNPHPLVWAKLKGFPFWPAKALRDKDGQVDARFFGQHDRAWVPINNCYLMSKEIPFSVKKTKSIFNSAMQEMEVYVENIRRKFGVFNYSPFRTPYTPNSQYQMLLDPTNPSAGTAKIDKQEKVKLNFDMTASPKILMSKPVLSGGTGRRISLSDMPRSPMSTNSSVHTGSDVEQDAEKKATSSHFSASEESMDFLDKSTDRSKAEMDLKELSESVQQQSTPVPLISPKRQIRSRFQLNLDKTIESCKAQLGINEISEDVYTAVEHSDSEDSEKSDSSDSEYISDDEQKSKNEPEDTEDKEGCQMDKEPSAVKKKPKPTNPVEIKEELKSTSPASEKADPGAVKDKASPEPEKDFSEKAKPSPHPIKDKLKGKDETDSPTVHLGLDSDSESELVIDLGEDHSGREGRKNKKEPKEPSPKQDVVGKTPPSTTVGSHSPPETPVLTRSSAQTSAAGATATTSTSSTVTVTAPAPAATGSPVKKQRPLLPKETAPAVQRVVWNSSSKFQTSSQKWHMQKMQRQQQQQQQQNQQQQPQSSQGTRYQTRQAVKAVQQKEITQSPSTSTITLVTSTQSSPLVTSSGSMSTLVSSVNADLPIATASADVAADIAKYTSKMMDAIKGTMTEIYNDLSKNTTGSTIAEIRRLRIEIEKLQWLHQQELSEMKHNLELTMAEMRQSLEQERDRLIAEVKKQLELEKQQAVDETKKKQWCANCKKEAIFYCCWNTSYCDYPCQQAHWPEHMKSCTQSATAPQQEADAEVNTETLNKSSQGSSSSTQSAPSETASASKEKETSAEKSKESGSTLDLSGSRETPSSILLGSNQGSDHSRSNKSSWSSSDEKRGSTRSDHNTSTSTKSLLPKESRLDTFWD

SEQ ID NO: 100206 - DNA, 3405 bp, Artificial Sequence
  derived and/or modified sequence
atgcacccccagagcctggccgaggaggagatcaagaccgagcaggaggtggtggagggcatggacatcagcaccagaagcaaggaccccggcagcgccgagagaaccgcccagaagagaaagttccccagccccccccacagcagcaacggccacagcccccaggacaccagcaccagccccatcaagaagaagaagaagcccggcctgctgaacagcaacaacaaggagcaggacggcagaaacgacttctactgctgggtgtgccacagagagggccaggtgctgtgctgcgagctgtgccccagagtgtaccacgccaagtgcctgagactgaccagcgagcccgagggcgactggttctgccccgagtgcgagaagatcaccgtggccgagtgcatcgagacccagagcaaggccatgaccatgctgaccatcgagcagctgagctacctgctgaagttcgccatccagaagatgaagcagcccggcaccgacgccttccagaagcccgtgcccctggagcagcaccccgactacgccgagtacatcttccaccccatggacctgtgcaccctggagaagaacgccaagaagaagatgtacggctgcaccgaggccttcctggccgacgccaagtggatcctgcacaactgcatcatctacaacggcggcaaccacaagctgacccagatcgccaaggtggtgatcaagatctgcgagcacgagatgaacgagatcgaggtgtgccccgagtgctacctggccgcctgccagaagagagacaactggttctgcgagccctgcagcaacccccaccccctggtgtgggccaagctgaagggcttccccttctggcccgccaaggccctgagagacaaggacggccaggtggacgccagattcttcggccagcacgacagagcctgggtgcccatcaacaactgctacctgatgagcaaggagatccccttcagcgtgaagaagaccaagagcatcttcaacagcgccatgcaggagatggaggtgtacgtggagaacatcagaagaaagttcggcgtgttcaactacagccccttcagaaccccctacacccccaacagccagtaccagatgctgctggaccccaccaaccccagcgccggcaccgccaagatcgacaagcaggagaaggtgaagctgaacttcgacatgaccgccagccccaagatcctgatgagcaagcccgtgctgagcggcggcaccggcagaagaatcagcctgagcgacatgcccagaagccccatgagcaccaacagcagcgtgcacaccggcagcgacgtggagcaggacgccgagaagaaggccaccagcagccacttcagcgccagcgaggagagcatggacttcctggacaagagcaccgacagaagcaaggccgagatggacctgaaggagctgagcgagagcgtgcagcagcagagcacccccgtgcccctgatcagccccaagagacagatcagaagcagattccagctgaacctggacaagaccatcgagagctgcaaggcccagctgggcatcaacgagatcagcgaggacgtgtacaccgccgtggagcacagcgacagcgaggacagcgagaagagcgacagcagcgacagcgagtacatcagcgacgacgagcagaagagcaagaacgagcccgaggacaccgaggacaaggagggctgccagatggacaaggagcccagcgccgtgaagaagaagcccaagcccaccaaccccgtggagatcaaggaggagctgaagagcaccagccccgccagcgagaaggccgaccccggcgccgtgaaggacaaggccagccccgagcccgagaaggacttcagcgagaaggccaagcccagcccccaccccatcaaggacaagctgaagggcaaggacgagaccgacagccccaccgtgcacctgggcctggacagcgacagcgagagcgagctggtgatcgacctgggcgaggaccacagcggcagagagggcagaaagaacaagaaggagcccaaggagcccagccccaagcaggacgtggtgggcaagaccccccccagcaccaccgtgggcagccacagcccccccgagacccccgtgctgaccagaagcagcgcccagaccagcgccgccggcgccaccgccaccaccagcaccagcagcaccgtgaccgtgaccgcccccgcccccgccgccaccggcagccccgtgaagaagcagagacccctgctgcccaaggagaccgcccccgccgtgcagagagtggtgtggaacagcagcagcaagttccagaccagcagccagaagtggcacatgcagaagatgcagagacagcagcagcagcagcagcagcagaaccagcagcagcagccccagagcagccagggcaccagataccagaccagacaggccgtgaaggccgtgcagcagaaggagatcacccagagccccagcaccagcaccatcaccctggtgaccagcacccagagcagccccctggtgaccagcagcggcagcatgagcaccctggtgagcagcgtgaacgccgacctgcccatcgccaccgccagcgccgacgtggccgccgacatcgccaagtacaccagcaagatgatggacgccatcaagggcaccatgaccgagatctacaacgacctgagcaagaacaccaccggcagcaccatcgccgagatcagaagactgagaatcgagatcgagaagctgcagtggctgcaccagcaggagctgagcgagatgaagcacaacctggagctgaccatggccgagatgagacagagcctggagcaggagagagacagactgatcgccgaggtgaagaagcagctggagctggagaagcagcaggccgtggacgagaccaagaagaagcagtggtgcgccaactgcaagaaggaggccatcttctactgctgctggaacaccagctactgcgactacccctgccagcaggcccactggcccgagcacatgaagagctgcacccagagcgccaccgccccccagcaggaggccgacgccgaggtgaacaccgagaccctgaacaagagcagccagggcagcagcagcagcacccagagcgcccccagcgagaccgccagcgccagcaaggagaaggagaccagcgccgagaagagcaaggagagcggcagcaccctggacctgagcggcagcagagagacccccagcagcatcctgctgggcagcaaccagggcagcgaccacagcagaagcaacaagagcagctggagcagcagcgacgagaagagaggcagcaccagaagcgaccacaacaccagcaccagcaccaagagcctgctgcccaaggagagcagactggacaccttctgggactag

SEQ ID NO: 100207 - DNA, 3405 bp, Artificial Sequence
  derived and/or modified sequence
atgcatccccaaagcctggccgaggaagaaatcaaaactgagcaggaggtggtagagggaatggacatctctactcgttccaaggaccctggatccgccgaaagaaccgctcagaaacgtaagttccccagtcccccgcacagctccaacggacacagcccccaagacacatctacttctcccatcaagaaaaagaagaagcctggactgctcaatagtaacaacaaggaacaggacggccgaaatgatttttactgttgggtttgccatcgcgaaggccaggtcctctgttgcgaactatgccctcgagtctaccacgccaagtgcctacggctcaccagcgagcctgagggggattggttttgtcccgagtgtgaaaagattacggtagctgaatgcattgaaacgcagtctaaggccatgactatgctgacgatcgaacagctgagctatctcctcaagttcgccatccagaagatgaaacagcctggaaccgacgcctttcagaagcctgtgcctctagaacagcacccggattacgcagaatatatctttcacccaatggacttatgcacattagagaagaacgccaagaagaaaatgtatggttgcaccgaggcttttcttgctgatgcaaagtggatcctccacaattgcataatctataacggaggaaatcacaagcttactcagatcgccaaggtggtgattaagatctgcgaacacgagatgaacgagatcgaggtttgtcccgagtgttacctggccgcctgccagaagcgcgacaactggttttgtgagccttgtagtaatccccacccattggtctgggccaagctcaagggattccctttctggcccgctaaagcacttagagataaggatggacaggtcgacgcgcgtttttttggacagcatgatagggcctgggtgccaattaataattgttatctgatgagcaaagagatccctttcagcgttaaaaagaccaagagtatatttaactctgcaatgcaggagatggaggtgtatgtggagaacatcaggcgaaaatttggtgtttttaactactcaccattcaggacgccgtacactcccaactctcagtaccagatgttgctagatcccacaaatccctcagccggtactgccaagatcgacaagcaggagaaggtgaaactcaactttgacatgacggcttcccccaagatcttaatgtccaaaccagttctgagcggaggaacaggaaggcgaatcagcctgagcgatatgcctcgatcacccatgtcaaccaattccagtgtccataccggctctgatgtggagcaggacgctgagaagaaagccacttctagccatttcagtgcgagcgaagaaagcatggacttcctcgacaagagtacagatagatctaaggcagagatggatcttaaggaattgtcggagagtgtgcagcagcagtccaccccggttcccctgatttctccaaagcggcaaatccggagtagattccaacttaacctggataagaccatcgagagctgcaaagcacagctcggcatcaacgagatctctgaggacgtgtacacagcagtcgagcactctgactctgaggatagcgagaaatccgattcctctgatagcgaatacatctctgacgatgaacagaagtcaaagaatgaaccagaggatactgaagacaaggaagggtgtcagatggataaggagccttcagccgtcaagaagaagcctaagcccactaaccctgtggaaataaaggaggaactgaagtccacgagccccgcctcagagaaagccgacccaggcgcggtgaaggacaaggccagccctgagccagagaaggattttagcgagaaagctaagccatctccccatccaataaaggataagttgaaaggcaaagacgagactgactcccctaccgtgcatcttggcttggactccgatagcgagtccgaactggtgatcgatctgggcgaggaccatagtggaagggaaggaagaaagaataaaaaagagccgaaagaaccgagccccaagcaagacgtggttggcaagactcctccatcaaccacagtgggaagccacagcccccccgagacacctgtcttaacacgtagctctgctcaaacttccgctgctggagctaccgctacaaccagcactagcagtacggtcacagtgactgctccggctcccgctgccactggcagcccagtcaaaaagcaacgccctttgctgccaaaagaaacagctcccgctgtgcagagagtcgtgtggaacagcagtagtaaatttcaaacaagtagccaaaagtggcatatgcagaagatgcagagacagcagcaacagcagcagcagcagaaccagcaacagcagccacagtcaagccagggcacccggtaccagacccgccaggcagtgaaggcagtgcagcagaaagagatcacccagtctccctccactagtacaatcaccctcgttacttcaacccagagttccccgctagtgaccagttcagggagtatgtcaacattggtttcaagcgttaacgccgacttgcccattgctacagcctccgccgatgtggccgctgatatagccaaatacacctctaagatgatggatgctatcaagggtacaatgaccgagatctataatgatctcagcaagaacacaaccggaagcacaattgcagaaatccgccgccttcggattgagatagagaagctgcagtggctgcaccagcaagagctgagcgagatgaagcacaaccttgaactcactatggcggagatgagacagtcactggagcaggaaagagatcgcttaatcgcggaggttaagaaacagttggagctcgagaaacagcaggccgtagatgagacaaagaaaaaacaatggtgcgctaattgtaagaaggaagccattttctattgctgttggaacacttcctattgtgactatccctgtcagcaagctcattggccagagcacatgaaatcttgcacacaatctgctactgcaccacagcaagaggccgacgccgaggttaacaccgaaactttgaataagtccagtcagggctcctcatcttcaacacagagcgctccgagcgagacggcttcagcgtctaaagagaaggagactagtgccgagaaatctaaggaaagcgggtctactttagacctcagcgggtcgcgggagactccaagtagtattctgttaggctccaaccaaggaagcgatcacagccgcagcaacaagtcgagttggtcaagctctgacgagaaacgtggctcaacccggagcgaccataataccagcacttctactaagtcactgctgccaaaagaaagccggctcgacaccttctgggattag

SEQ ID NO: 100208 - DNA, 3405 bp, Artificial Sequence
  derived and/or modified sequence
atgcacccccagagcctggccgaggaggagatcaagacagagcaggaggtggtggagggcatggacatcagcaccaggagcaaggaccccggcagcgctgagaggacagcccagaagaggaagttccccagccccccccacagcagcaatggccacagcccccaggacaccagcaccagccccatcaagaagaagaagaagccaggcctgctgaacagcaacaacaaggagcaggatggaagaaatgacttctactgctgggtgtgccaccgggagggccaggtgctgtgctgtgagctgtgcccccgggtgtaccacgccaagtgcctgcggctgaccagcgagcctgagggggactggttctgcccagaatgtgagaagatcaccgtggccgagtgcatcgagacccagagcaaggccatgaccatgctgaccatcgagcagctgagctacctgctgaagtttgccatccagaagatgaagcagcctggaacagatgccttccagaagcctgtgcccctggagcagcacccagactatgcagagtacatcttccaccccatggacctgtgcaccctggagaagaatgccaagaagaagatgtatggctgcacagaggccttcctggctgatgccaagtggatcctgcacaactgcatcatctacaatggaggcaaccacaagctgacccagatcgccaaggtggtgatcaagatctgtgagcacgagatgaatgaaattgaggtgtgcccagagtgctacctggccgcctgccagaagagggacaactggttctgtgagccctgcagcaacccccaccccctggtgtgggccaagctgaagggcttccccttctggccagccaaggccctgcgggacaaggatggccaggtggatgcccgcttcttcggccagcacgaccgggcctgggtgcccatcaacaactgctacctgatgagcaaggagatccccttctctgtgaagaagaccaagagcatcttcaacagcgccatgcaggagatggaggtgtatgtggagaacatccggaggaagtttggagtcttcaactacagccccttccgcaccccctacacccccaacagccagtaccagatgctgctggaccccaccaaccccagcgctggaacagccaagattgacaagcaggagaaggtgaagctgaactttgacatgacagccagccccaagatcctgatgagcaagcctgtgctgagcggcggcactggaagacgcatcagcctgagtgacatgcccaggagccccatgagcaccaacagctctgtgcacactggaagtgatgtggagcaggatgctgagaagaaggccaccagcagccacttcagcgccagcgaggagagcatggacttcctggacaagagcacagacaggagcaaggccgagatggacctgaaggagctgtctgagagcgtgcagcagcagagcacccctgtgcccctcatcagccccaagaggcagatccgcagccgcttccagctgaacctggacaagaccatcgagagctgcaaggcccagctgggcatcaatgagatcagtgaagatgtgtacacagctgtggagcacagcgacagcgaggacagcgagaagagtgacagcagtgacagcgagtacatcagtgatgatgagcagaagagcaagaatgaacctgaggacacagaggacaaggagggctgccagatggacaaggagcccagcgctgtgaagaagaagcccaagcccaccaaccctgtggagatcaaggaggagctgaagagcaccagccctgccagcgagaaggctgaccccggggctgtgaaggacaaggccagccctgagcctgagaaggacttcagcgagaaggccaagcccagcccccaccccatcaaggacaagctgaagggcaaggatgaaacagacagccccaccgtgcacctgggcctggacagcgacagcgagagcgagctggtgattgacctgggggaggaccacagcggccgggagggcaggaagaacaagaaggagcccaaggagcccagccccaagcaggatgtggtgggcaagaccccacccagcaccaccgtgggcagccacagccccccagagacccctgtgctgaccaggagcagcgcccagaccagcgctgctggggccacagccaccaccagcaccagcagcacagtgacagtgacagccccagccccagctgccaccggcagccctgtgaagaagcagaggcccctgctgcccaaggagacagccccagctgtgcagagggtggtgtggaacagcagcagcaagttccagaccagcagccagaagtggcacatgcagaagatgcagaggcagcagcagcagcagcagcagcagaaccagcagcagcagccccagagcagccagggcacccgctaccagacccggcaggccgtgaaggctgtgcagcagaaggagatcacccagagccccagcaccagcaccatcaccctggtgaccagcacccagagcagccccctggtgaccagcagcggctccatgagcaccctggtgtcctctgtgaatgctgacctgcccatcgccacagccagcgcagatgtggccgctgacatcgccaagtacaccagcaagatgatggatgccatcaagggcaccatgacagagatctacaatgacctgagcaagaacaccaccggcagcaccatcgccgagatccggcggctgagaattgaaattgagaagctgcagtggctgcaccagcaggagctgtctgagatgaagcacaacctggagctgaccatggccgagatgaggcagagcctggagcaggagcgggaccggctgattgctgaggtgaagaagcagctggagctggagaagcagcaggccgtggatgagaccaagaagaagcagtggtgtgccaactgcaagaaggaggccatcttctactgctgctggaacaccagctactgtgactacccctgccagcaggcccactggccagagcacatgaagagctgcacccagagcgccacagccccccagcaggaggctgatgctgaggtgaacacagagaccctgaacaagagcagccagggcagcagcagcagcacccagagcgcccccagcgagacagccagcgccagcaaggagaaggagaccagcgctgagaagagcaaggagagcggcagcaccctggacctgagcggcagccgggagacccccagcagcatcctgctgggcagcaaccagggcagtgaccacagccgcagcaacaagagctcctggagcagcagtgatgagaagaggggcagcaccaggagtgaccacaacaccagcaccagcaccaagagcctgctgcccaaggagagccggctggacaccttctgggactag

SEQ ID NO: 100209 - DNA, 3405 bp, Artificial Sequence
  derived and/or modified sequence
atgcacccccagagcctggccgaggaggagatcaagaccgagcaggaggtggtcgagggaatggacatttcgacacgcagtaaggaccccggaagtgccgaacgtactgcccaaaagcgtaagtttccatcacctccgcacagttctaacggccactcaccccaggacacttctacatccccaatcaaaaagaagaagaagccagggcttcttaattccaacaataaggagcaggatggtaggaacgacttctactgttgggtgtgccacagagaagggcaggtgctctgctgtgagttatgccccagagtgtaccatgccaagtgcctccgccttacttccgaacccgagggcgattggttttgccccgaatgtgagaaaatcacggttgctgaatgcatagagactcagtcgaaagccatgaccatgctcacgattgagcagttaagctatctgctgaagttcgccatccagaagatgaaacagcccggcacagatgcattccagaagcccgttcccctcgaacagcaccctgattatgccgagtatatatttcatcccatggacttgtgtaccctggagaaaaacgcaaaaaagaaaatgtacggctgtacggaggcttttctggccgacgcaaagtggatactgcataattgcatcatctataatggaggaaaccacaagctgacccaaattgcaaaagtggttatcaaaatttgcgagcacgagatgaacgagatcgaggtctgccccgaatgctaccttgccgcctgccaaaagcgcgataactggttctgcgagccttgcagcaatccccacccgctggtttgggcaaaactgaaaggctttcctttctggcccgctaaggcgctgagagacaaagacggacaggtcgacgctcgcttctttgggcaacacgatcgggcgtgggtccctattaataattgctatctcatgtcaaaggagattccttttagcgtgaagaagactaagagcatctttaactccgccatgcaggagatggaggtctatgttgagaatatacgtcgaaagtttggcgttttcaactattcgccattccgcactccctacacaccgaattcccagtaccaaatgctgcttgacccgaccaatccctctgcggggactgccaagatagataagcaagagaaggtgaagctgaactttgacatgacagctagccctaagatcctcatgtccaaacccgtgcttagtggcgggaccggccggcggatatccctgtcagatatgcccaggagccctatgtcgacgaattcaagcgtccacacggggtccgacgtggaacaggacgccgaaaaaaaggcgaccagttctcatttctccgccagtgaggagtctatggattttctggacaagtccacggacaggagcaaggctgagatggacctgaaagaattaagtgaaagtgtacagcaacagtcaacaccggtgccattaatctcgcccaagcgtcagattaggagtcgatttcagctgaaccttgataagactattgagagttgcaaagcccagctcgggataaacgaaatttcagaagatgtttacactgctgttgaacattcagacagtgaagattccgagaaatctgacagctcagactcagagtatatctcggacgatgaacagaagtccaaaaatgagcccgaggatacagaagacaaggagggttgccagatggacaaagaaccatcggctgttaagaagaaacccaagcccaccaatcccgtcgagattaaagaggagctcaaatccacgagtcctgcatccgagaaggcagaccccggtgctgtaaaagacaaagcctctccggaacccgagaaagactttagcgagaaggcgaagccttctccacaccctattaaagacaaactgaaaggaaaggatgagacagattcccccaccgtgcacctgggccttgatagcgactccgagtcggagctggttatcgatttaggggaagaccactccggccgagaggggcgcaaaaataagaaagaacctaaggagccttcacccaaacaagacgtggtggggaagaccccccctagtactacagttggatcccactccccccccgagacccccgttcttacgaggtcatccgcccagacaagcgccgccggtgcaaccgctacaacatcgactagctccacagtgactgtaaccgcacctgccccggcagccaccggctcccccgtcaagaagcagaggcctctactgccaaaggagaccgcccccgccgtccaaagagtggtgtggaatagtagtagcaaattccaaacgagctctcagaaatggcacatgcagaagatgcaacgccagcaacagcaacagcagcaacagaaccagcagcagcagccccagtcctctcaaggaaccagataccagactcgccaggcagtcaaggcagtacagcagaaggaaatcacacagtctccatccacatccactattactctggtcacatccacgcagagctccccactggtgacctcaagcggctccatgtctaccctggtgagttcagttaatgccgatctgcctatcgctaccgccagtgcggatgtcgcagctgacatcgcgaaatacacatcaaagatgatggatgcaataaaagggaccatgactgagatctacaacgatctgagcaagaataccaccgggagcacaatcgccgaaatacggagactcagaatcgagatcgagaagctgcaatggttgcatcagcaggagctcagtgagatgaagcataatttggagctgacaatggccgaaatgcgacaaagtctcgagcaagaaagggacagacttatcgccgaggttaaaaaacagctggaactagaaaaacagcaggccgtggatgagacaaagaaaaaacagtggtgtgcaaattgcaagaaagaagccatcttctactgttgctggaacacaagctactgtgactatccgtgtcagcaggcccactggccagagcatatgaagagctgtacgcagagcgccaccgctccccaacaagaggcagacgcagaggttaatactgagacgctgaacaaaagttcccaggggtcaagcagctccactcaatccgccccttctgaaaccgctagtgcttcaaaggagaaagagacttcggccgagaaaagcaaggaatctggctcgacgctcgatctgagcgggtcccgggagaccccatcatcgattctgctgggcagcaatcaggggtcagaccatagtcggagtaacaagtcatcctggtctagtagtgacgagaaacggggctcaactaggtctgaccataacacctccaccagcaccaagtctctgctcccgaaagaatcaagattggacaccttctgggattag

SEQ ID NO: 100210 - DNA, 3405 bp, Artificial Sequence
  derived and/or modified sequence
atgcacccccagtcgctggctgaagaggaaatcaagaccgaacaagaagtggtagaggggatggatatctctacgcgctctaaggaccccggaagtgctgaacgtaccgcacagaagagaaaattcccgtcacctccgcatagtagtaacggccacagcccccaggacacgtctacttcaccaattaaaaaaaagaagaagcctggcctactgaacagtaataacaaagaacaagacggacgtaacgacttttactgttgggtctgtcatagggaagggcaggtgctgtgttgcgagttatgccccagggtgtatcatgcaaagtgtctgagactgacgagcgagcctgagggggattggttctgccccgagtgtgaaaaaatcaccgtggccgaatgcattgagacccagtctaaagctatgacgatgctgaccattgagcagctgtcataccttctgaaattcgctatccagaaaatgaagcaaccgggtactgacgcctttcagaaacctgtccccctcgaacagcaccctgactatgcagaatacatctttcaccccatggatctctgcacccttgagaaaaacgcgaagaagaaaatgtacgggtgtaccgaggcattcttagctgatgccaaatggatcctgcataattgcatcatttacaacgggggaaaccataaactgacccagatcgccaaagtggtgatcaagatatgtgagcatgaaatgaatgagattgaagtctgccccgagtgttatctagctgcatgtcaaaagagggacaattggttttgtgaaccctgtagcaatccacaccccctggtatgggcaaaactgaaggggttcccgttttggccggctaaggcattacgcgacaaggatggccaggtggatgcacggtttttcggtcagcatgacagagcatgggtgccaattaacaattgttacttgatgagcaaggaaatcccctttagcgtaaagaaaactaagtctatcttcaactcagcaatgcaggagatggaggtctatgtggaaaacattcggagaaagttcggtgtcttcaactactccccctttaggaccccatatacacccaattctcagtatcagatgcttctggatcccactaatccatccgcgggaaccgccaaaatcgacaaacaagaaaaggttaagcttaacttcgatatgaccgccagccccaaaattctgatgtccaagccagttctctccggaggaactggtcgcaggatctccctgtctgatatgccaaggtcaccaatgagtaccaacagtagtgttcacacaggctctgacgtcgaacaggacgctgagaaaaaggccacgtcatcacactttagtgcatctgaggagagcatggatttcttagacaaaagcactgacagaagtaaggctgaaatggacctcaaagagttgagcgaatctgtccaacaacaatcaacccctgtcccgttgatctcccctaaaaggcaaatacggtcccgtttccaattgaacctggacaagactattgaatcctgcaaggcccagctgggcatcaacgaaatttccgaggatgtttatacggctgtggagcactcagactctgaggactctgagaaatctgatagctcagatagcgagtatatctcggacgacgaacagaaaagcaaaaacgaaccggaagataccgaggataaagaaggctgccagatggataaagagcctagtgctgtaaagaagaagcccaaacctaccaatcctgtggagattaaggaagaactgaagtcaacctcccctgcctctgaaaaggccgatcccggagccgtcaaggataaggcgagcccagagccagagaaggacttttctgaaaaagcaaagccgtctcctcacccaatcaaagacaagctcaagggcaaagacgagacggacagccccaccgtacacctgggccttgactccgatagcgagagtgaactcgttatcgatttgggagaagatcactccggaagggagggaagaaagaacaaaaaagagcctaaagagccttccccgaagcaggacgtcgtgggaaagactccgccatcaacaacagtgggctcccactctcccccagaaactccagtgcttacccggagtagtgcccagacatccgccgctggagccacagctaccacctcaacaagcagtacagtaactgtgaccgctcccgctcctgctgccactgggtcacccgtgaagaaacagaggcccttgctccctaaagagaccgcccctgccgtgcaacgggtagtttggaactcctcatcaaaatttcagacgtccagtcagaaatggcatatgcagaagatgcagcgtcaacagcaacagcagcaacaacagaatcagcaacagcaaccacaatcctcccaaggaaccaggtaccagactaggcaggctgtgaaagctgtgcaacaaaaggagattacccagtccccttctaccagtactattaccctggtcacgtctacgcaatcaagtcccctcgtcacgtcatcaggcagtatgtccacgctcgtttcgtccgtcaacgcggacctgcccatcgcaacggcaagcgctgacgtagctgcagacatagccaagtacacgagcaaaatgatggatgcgatcaaggggacaatgaccgaaatatacaatgatctgagtaaaaatacaaccgggtccaccatagccgaaatccgacggctccggatagaaattgaaaaactgcagtggctgcaccagcaggaactctctgaaatgaagcacaacctggagttaaccatggccgagatgcgccaaagcctggaacaagagcgcgatcgcctcatcgccgaagtgaagaaacagttagagcttgagaagcagcaagctgtagatgaaaccaaaaaaaagcaatggtgcgctaactgcaaaaaagaggcgatcttctactgttgttggaacacaagctactgcgactacccctgtcagcaggcccactggccggagcacatgaaatcttgcacccagtccgccacggcccctcagcaagaggctgatgctgaagtgaacacagagacactgaataaaagctcgcagggatcatccagttcgactcaaagcgcaccttccgagaccgcctccgctagcaaagagaaggaaacatctgcggaaaaaagcaaggagtctggctctactcttgacttatcaggtagcagggaaacccccagcagcatcctccttggttccaatcaaggcagtgaccatagccgtagtaacaagtcatcatggtcttccagcgacgaaaagaggggatctacgcggtctgatcacaatacttccacttccactaaatccttattgccgaaagagtcgcgattggacaccttctgggactag

SEQ ID NO: 100211 - DNA, 3405 bp, Artificial Sequence
  derived and/or modified sequence
atgcatccacagagcttggctgaagaggaaataaaaacagaacaggaggtggtagagggcatggatatctctactcgctccaaagatcctggctctgcagagagaacagcccagaaaagaaagttccccagccctccacattcttccaatggccactcgccgcaggacacatcaacaagccccattaaaaagaaaaagaaacctggcttactgaacagtaacaataaggagcaggatggacggaatgatttctactgctgggtttgtcaccgggaaggccaagtcctttgctgtgagctctgtccccgggtttatcacgctaagtgtctgagactgacatcggaaccagagggggactggttttgtcctgaatgtgagaaaattacagtagcagaatgcatcgagacccagagtaaagccatgacaatgctcaccattgaacagttatcctacctgctcaagtttgccattcagaaaatgaaacagccagggacagatgcattccagaagcccgttccattggaacagcaccctgactatgcggaatacatcttccatccaatggacctttgtacattggaaaagaatgcgaaaaagaaaatgtatggctgcacagaagccttcctggctgatgcaaagtggattttgcacaactgcatcatttataatgggggaaatcacaaattgacgcaaatagcgaaagtagtcatcaaaatctgtgaacatgagatgaatgaaatcgaagtatgtccagaatgttatctagctgcttgccaaaaacgagataactggttttgtgagccttgtagcaatccacatcctttggtctgggccaaactgaaggggtttccattctggcctgcaaaagctctaagggataaagacgggcaggtcgatgcccgattctttggacaacatgacagggcctgggttccaataaataattgctacctcatgtctaaagaaattcctttttctgtgaaaaagactaagagcatcttcaacagtgccatgcaagagatggaggtttacgtggagaacatccgcaggaagtttggggtttttaattactctccatttaggacaccctacacacccaacagccagtatcaaatgctgctcgatcccaccaaccccagcgccggcactgccaagatagacaagcaggagaaggtcaagctcaactttgacatgacggcatcccccaagatcctgatgagcaagcctgtgctgagtgggggcacaggccgccggatttccttgtcggatatgccgcgctcccccatgagcacaaactcttctgtgcacacgggctccgacgtggagcaggatgctgagaagaaggccacgtcgagccacttcagtgcgagcgaggagtccatggacttcctggataagagcacagatcgaagcaaagctgagatggatttgaaggagctgagcgagtcggtccagcaacagtccacccctgttcctctcatctctcccaagcgccagattcgtagcaggttccagctgaatcttgacaagaccatagagagttgcaaagcacaattaggcataaatgaaatctcggaagatgtctatacggccgtagagcacagcgattcggaggattctgagaagtcagatagtagcgatagtgagtatatcagtgatgatgagcagaagtctaagaacgagccagaagacacagaggacaaagaaggttgtcagatggacaaagagccatctgctgttaaaaaaaagcccaagcctacaaacccagtggagattaaagaggagctgaaaagcacgtcaccagccagcgagaaggcagaccctggagcagtcaaggacaaggccagccctgagcctgagaaggacttttccgaaaaggcaaaaccttcacctcaccccataaaggataaactgaagggaaaagatgagacggattccccaacagtccatttgggcctggactctgattcagagagcgaacttgtcatagatttaggagaagaccattctgggcgggagggtcgaaaaaataagaaggaacccaaagaaccatctcccaaacaggatgttgtaggtaaaactccaccatccacgacggtgggcagccattctcccccggaaacaccggtgctcacccgctcttccgcccaaacttccgcggctggcgccacagccaccaccagcacgtcctccacggtcaccgtcacggccccggcccccgccgccacaggaagcccagtgaaaaagcagaggccgcttttaccgaaggagactgccccggccgtgcagcgggtcgtgtggaactcatcaagtaagtttcaaacgtcctcccaaaagtggcacatgcagaagatgcagcgtcagcagcagcagcagcagcagcaaaaccagcagcagcagcctcagtcttcccaggggacgagatatcagaccagacaggctgtgaaagctgtccagcagaaggagatcacacagagcccatccacgtccaccatcaccctggtgaccagcacacagtcatcgcccctggtcaccagctcggggtccatgagcacccttgtgtcctcagtcaacgctgacctgcccatcgccactgcctcagctgatgtcgccgctgatattgccaagtacactagcaaaatgatggatgcaataaaaggaacaatgacagaaatatacaacgatctttctaaaaacactactggaagcacaatagctgagattcgcaggctgaggatcgagatagagaagctccagtggctgcaccagcaagagctctccgaaatgaaacacaacttagagctgaccatggcggagatgcggcagagcctggagcaggagcgggaccggctcatcgccgaggtgaagaagcagctggagttggagaagcagcaggcggtggatgagaccaagaagaagcagtggtgcgccaactgcaagaaggaggccatcttttactgctgttggaacactagctactgtgactacccctgccagcaagcccactggcctgagcacatgaagtcctgcacccagtcagctactgctcctcagcaggaagcggatgctgaggtgaacacagaaacactaaataagtcctcccaggggagctcctcgagcacacaatcagcaccttcagaaacggccagcgcctccaaagagaaggagacgtcagctgagaaaagcaaggagagtggctcgacccttgacctttctggctccagagagacgccctcctccattctcttaggctccaaccaaggctctgaccattcccggagtaataaatccagttggagcagcagtgatgagaagaggggatcgacacgttccgatcacaacaccagtaccagcacgaagagcctcctcccgaaagagtctcggctggacaccttctgggactag

SEQ ID NO: 100212 - DNA, 777 bp, Artificial Sequence
  derived and/or modified sequence
atggctgatatggcccatatcagcggtcttgtggctgcaggcgtggtgccgtcgccctttgaacactgccacgtagtcaccacaaccacacataaaactttaaggggatgtcgggctgggatgatattttaccgcaagggcgtcaaatctgtggacccaaagaccgggaaggagatcctgtataatctggaatcccttattaattccgccgttttccccggacttcaaggtgggcctcataatcatgccatcgccggcgtggccgtggccctgaaacaggccatgacactcgagtttaaggtttatcagcatcaggttgtagccaactgcagagcactgagcgaggctttgacagagctgggctataaaatcgtgacaggcggttctgataatcacttgatactggttgaccttcggagcaaaggaaccgacggagggagggctgaaaaagtgctggaagcctgctccatcgcttgcaataagaatacctgtccgggcgaccgctcggcgctccggccttcaggtctcagactcgggactccagccctgacaagtcgaggcctgctggagaaggactttcagaaagttgcccattttattcatagaggaattgagttaacacttcagattcaaagcgacaccggggtgcgcgctacactgaaggagtttaaagaaaggctggccggggataagtatcaggctgccgtgcaagctctgcgggaagaggtcgaatcattcgccagcctatttcctttgcccggcctgcccgatttctag

SEQ ID NO: 100213 - DNA, 1038 bp, Artificial Sequence
  derived and/or modified sequence
atggggctggatctgcctgatgggggacacctaacccacggattcatgacagacaagaaaaagatttctgccacatctattttctttgagtccatgccatacaaagttaatccggatactggctacatcaattatgatcagctggaggagaatgcacgcctgttccaccccaagttgatcattgctgggaccagttgttatagtaggaatctggagtacgccagactgagaaaaatagctgacgagaacggtgcttacctcatggccgatatggctcacatttccgggcttgtggctgccggagttgtgccatcaccctttgaacactgccacgtcgtgaccacaacaactcacaagacgctgcgaggctgcagggcaggaatgattttctacagaaaaggcgttaaaagcgttgacccaaagacagggaaagaaattctctataatctggagagcctcatcaattcggcagtcttcccaggactgcaaggcggaccccacaaccacgccattgccggagtcgctgttgcactcaaacaggctatgacgctggagttcaaggtgtatcaacaccaggtggtcgcaaactgtcgagcccttagtgaagccctcaccgagctcggctataagattgtgacaggcggttcggataatcatttaattcttgtcgacctcagaagtaaaggcacggatggcggccgggccgagaaggttctggaagcatgctctattgcctgtaacaaaaacacctgccctggagatcggtccgccctgcggccatcaggcctgagactggggacgcccgcattgacttcgaggggacttctagaaaaggactttcaaaaggtggcccacttcatccacagaggaatagaactcaccctccaaattcagagcgacactggggtaagagccaccctgaaagaatttaaggaacggctggcgggcgataaataccaagccgcggtgcaggccctgcgagaggaggtggagtcttttgccagcctgttccccttgcccggattacctgacttctag

SEQ ID NO: 100214 - DNA, 777 bp, Artificial Sequence
  derived and/or modified sequence
atggctgacatggcccacatcagcggcctggtggccgccggcgtggtgcccagcccctttgagcactgccacgtggtgaccaccaccacccacaagaccctgcggggctgcagagctggcatgatcttctacaggaagggcgtgaagtctgtggaccccaagacaggcaaggagatcctgtacaacctggagagcctcatcaacagcgctgtgtttcctggcctgcagggcggcccccacaaccacgccatcgccggcgtggccgtggccctgaagcaggccatgaccctggagttcaaggtgtaccagcaccaggtggtggccaactgccgggccctgtctgaggccctgacagagctgggctacaagatcgtgactggaggcagtgacaaccacctgatcctggtggacctgcggagcaaaggaacagatggcggccgggcagagaaggtgctggaggcctgcagcatcgcctgcaacaagaacacctgccctggggacagaagtgccctgcggcccagcggcctgcggctgggcaccccagccctgaccagccggggcctgctggagaaggacttccagaaggtggcccacttcatccaccggggcatcgagctgaccctgcagatccagagcgacaccggggtgcgggccaccctgaaggagttcaaggagcggctggccggggacaagtaccaggccgctgtgcaggccctgcgggaggaggtggagagctttgccagcctcttccccctgcccggcctgcctgacttctag

SEQ ID NO: 100215 - DNA, 1038 bp, Artificial Sequence
  derived and/or modified sequence
atgggcctggacctgcctgatggcggccacctgacccacggcttcatgacagacaagaagaagatcagcgccaccagcatcttctttgagagcatgccctacaaggtgaacccagacaccggctacatcaactatgaccagctggaggagaatgcccggctcttccaccccaagctgatcatcgccggcaccagctgctacagcaggaacctggagtatgcccggctgaggaagattgctgatgaaaatggagcctacctgatggctgacatggcccacatcagcggcctggtggccgccggcgtggtgcccagcccctttgagcactgccacgtggtgaccaccaccacccacaagaccctgcggggctgccgggccggcatgatcttctacagaaaaggagtgaagtctgtggaccccaagacaggcaaggagatcctgtacaacctggagagcctcatcaacagcgctgtgtttcctggcctgcagggcggcccccacaaccacgccatcgccggcgtggccgtggccctgaagcaggccatgaccctggagttcaaggtgtaccagcaccaggtggtggccaactgccgggccctgtctgaggccctgacagagctgggctacaagatcgtgactggaggcagtgacaaccacctgatcctggtggacctgcggagcaagggcacagatggcggccgggcagagaaggtgctggaggcctgcagcatcgcctgcaacaagaacacctgccctggggacagaagtgccctgcggcccagcggcctgcggctgggcaccccagccctgaccagccggggcctgctggagaaggacttccagaaggtggcccacttcatccaccggggcatcgagctgaccctgcagatccagagcgacacaggagtgcgggccaccctgaaggagttcaaggagcggctggccggggacaagtaccaggccgctgtgcaggccctgcgggaggaggtggagagctttgccagcctcttccccctgcccggcctgcctgacttctag

SEQ ID NO: 100216 - DNA, 777 bp, Artificial Sequence
  derived and/or modified sequence
atggccgacatggcccacatcagcggcctggtggccgccggcgtggtacctagccctttcgaacactgtcacgttgtgacaaccacaacacataagactctccgggggtgccgggccggcatgattttctatcgaaaaggagtgaaatccgtagaccctaaaacaggaaaggaaattctttataatctcgagtcccttattaatagcgcagtgtttcccggtctgcaagggggtccgcacaatcatgcgatcgctggggttgccgttgctctgaaacaggccatgacactggagttcaaagtgtatcaacatcaggtggtcgccaactgccgggcacttagcgaggccctgaccgaattgggatataaaatagtgacaggtgggagcgacaaccacctcatcctggtggacctgaggtccaagggtacggatggtgggagggccgaaaaagtcctggaggcttgtagtattgcatgcaataagaatacctgccccggggaccgctctgccctgcggccaagcggcctgcggctgggaacccctgctttgacttccagggggctgcttgagaaggatttccaaaaagtggcccacttcatccaccgagggatcgaattgaccctacaaatccagagtgatactggggtgagagcaactcttaaggagtttaaggagcgattggcgggagataagtaccaggccgccgttcaagccctaagagaagaagtggaatcctttgcttcactgttccctttacctggcttgcccgatttctag

SEQ ID NO: 100217 - DNA, 1038 bp, Artificial Sequence
  derived and/or modified sequence
atgggcctggacctgcccgacggcggccacctgacccacggcttcatgaccgacaaaaaaaaaatctctgccaccagcatcttcttcgaaagcatgccttataaggttaatcccgatactgggtatatcaattacgaccagctggaggagaacgccagactgttccatcccaaactgatcattgctggtacaagttgttactcgagaaacttagaatacgcaaggctgcgaaagatagcggacgagaacggagcatatctgatggcagatatggctcacattagtgggctggttgccgccggagtagtcccatcacctttcgaacactgccacgtcgtgacaactactacccacaagactcttagaggctgccgcgccgggatgatcttctatcgcaagggagttaagtccgtggacccgaagaccggtaaggagattctctacaacctggaaagcctgattaactcagccgtatttcctggcctccaaggcggcccacacaatcacgctattgccggcgtcgccgttgctctgaaacaggctatgaccctggagtttaaggtgtatcaacaccaggtggtggcaaattgtagagcgttatccgaggcgttgacggagctgggctataagatcgtgacggggggaagcgacaaccaccttatcctggtggatctaaggtcaaaaggaacagatggggggagggccgagaaagttcttgaggcatgttctattgcgtgcaacaaaaatacctgtccaggggaccgatccgctctccgtccctctggcctgcgcctgggcactcctgccctgaccagcagaggattgcttgagaaggattttcagaaagtcgctcactttatccacagaggaattgagctcactctacaaatccaaagcgatactggcgtccgcgctacacttaaggagttcaaagagagactggctggcgataagtaccaagccgcagtccaggctctgagagaggaagttgaatcttttgctagcctgtttccactgccagggctgcccgacttctag

SEQ ID NO: 100218 - DNA, 777 bp, Artificial Sequence
  derived and/or modified sequence
atggcggacatggcacatatctctggactcgtggcagccggtgtcgtgccatccccttttgagcactgccacgtggtgacaacgaccacgcataagacgctgcggggttgtagggccggtatgatcttctatcggaagggggtcaagagcgtcgacccaaagactggaaaggagatcctatataacctggaaagcctgatcaattccgccgtcttcccaggactgcaagggggacctcacaaccacgcaatcgcgggagtggccgtagccctgaagcaagcgatgacactcgagtttaaggtgtaccagcaccaggtcgttgctaattgccgggcactctccgaagcgctaacggagcttggatataagatcgttacgggcggatcagataaccacctgatattagtggacctgcggagcaaggggactgatggaggacgcgctgaaaaggtactcgaggcgtgctctatcgcctgcaataaaaacacatgccctggcgaccggtccgccctgagacctagcgggcttagattgggaactcccgctctcacgtctaggggcctccttgagaaggacttccagaaagtggctcacttcatccatcgcggtatcgagttaaccctgcagatacaatccgatacgggcgttagagcgacactcaaggagttcaaggagcgtcttgcaggcgataagtaccaggctgcagtccaggctctaagggaagaggtggagtccttcgcgtcactgttccctctcccgggattgccagacttctag

SEQ ID NO: 100219 - DNA, 1038 bp, Artificial Sequence
  derived and/or modified sequence
atgggccttgacctgcctgacggcggacatctgacccacggttttatgacggataagaagaagatttcagcaacctcaatattctttgaaagcatgccgtataaagtcaaccctgataccggttacataaactatgaccagttggaggagaatgccagactcttccaccccaagttaataattgccggaacttcctgttacagtcgcaacctggaatatgccagattaaggaagattgctgacgagaacggcgcttaccttatggccgatatggctcatatttccgggctggttgccgcaggcgtcgtaccctcaccttttgaacactgccatgtggtcacaaccaccacacacaaaacgctccggggttgcagagccggaatgatcttctaccgaaagggtgtcaaatccgtggaccctaaaaccggcaaggaaatcttgtataatttggagtccttaataaattcagccgtgtttcccggattacaaggaggaccacataatcatgccattgccggagtcgcagtggccttgaaacaagctatgacacttgagttcaaggtttatcagcaccaggtggtggccaactgtagggctctgtccgaggctttgacggaattgggctacaaaatcgttactggcggaagcgacaatcatctcatcttggtggacctgcgaagcaaagggacggacgggggacgggcagagaaggtgctagaggcctgttctattgcctgtaataagaatacttgtcctggggacagatctgccctgcggcctagcggcctgaggctgggcacacccgctttaactagcaggggccttctagagaaagatttccagaaggtcgcacactttatacacagggggatcgagctgacacttcagattcagtccgacacaggggtacgggcaaccctcaaggaatttaaggagagattggccggagacaagtatcaggctgccgtgcaggcactccgagaggaagtggaaagctttgcttctttatttcctttaccaggactgccggatttctag

SEQ ID NO: 100220 - DNA, 2652 bp, Artificial Sequence
  derived and/or modified sequence
ttttttttcagatggagtctcgctctgttgcccaggctggagtgctggagtgcagtggcacaatctcggctcactgcaagctccacctcccgggttcacgccattctcctgcctcagcctcccaagtagctgggattacaggcgcccgccaccatatctggctaattttttgcatttttagtagagacggggtttcaccgtgttagccaggatggtctcgatctcctgacctcatgatctgcccgtctcagcctcccaaagtgctgggattacaggtgtgagccaccgcgcccagcccctacttcttgtttttcaatgttgtatccagtgaccttgctaaatttgcttattctaacagttggcccctagcatcttgattttctaggtatattgtgttgtctgtgtgtaatgtcagtttttaaatttcttctttcctaatcgttatgccttttgtttctttttcttgcctcattatacttggaatagaagtagtattagcaggcattttggtcttgttcctgaaggtaaccattttggtttccattgtgtggtcccgtcacatttgtttcattctgcaggtgctttttggttccttctcagcaggtagtgccccagcagcagggctcactacaaccctgggactcctcagggactcctgggtctgtgagccatacttggttgagcaggctgaacacaccagtatccatcctgtctcaccctcaagtcctcatctaggacatcattcctcttgtcatggtgggtggagccagttcaagtgggaggacaggaggcaggtgtggttggaggaagcagcctgaacctgcctccctgacattccacaggtgaacccagatactggctacatcaactatgaccagctggaggagaacgcacgcctcttccacccgaagctgatcatcgcaggaaccagctgctactcccgaaacctggaatatgcccggctacggaagattgcagatgagaacggggcgtatctcatggcggacatggctcacatcagcgggctggtggcggctggcgtggtgccctccccatttgaacactgccatgtggtgaccaccaccactcacaagaccctgcgaggctgccgagctggcatgatcttctacaggaaaggagtgaaaagtgtggatcccaagactggcaaagagattctgtacaacctggagtctcttatcaattctgctgtgttccctggcctgcagggaggtccccacaaccacgccattgctggggttgctgtggcactgaagcaagctatgactctggaatttaaagtttatcaacaccaggtggtggccaactgcagggctctgtctgaggccctgacggagctgggctacaaaatagtcacaggtggttctgacaaccatttgatccttgtggatctccgttccaaaggcacagatggtggaagggctgagaaggtgctagaagcctgttctattgcctgcaacaagaacacctgtccaggtgacagaagcgctctgcggcccagtggactgcggctggggaccccagcactgacgtcccgtggacttttggaaaaagacttccaaaaagtagcccactttattcacagagggatagagctgaccctgcagatccagagcgacactggtgtcagagccaccctgaaagagttcaaggagagactggcaggggataagtaccaggcggccgtgcaggctctccgggaggaggttgagagcttcgcctctctcttccctctgcctggcctgcctgacttctaaaggagcgggcccactctggacccacctggcgccacagaggaagctgcctgccggaggacccccacctgagagatggatgagctgctccaaaggggaactgttgacactcgggccctttgagggggtttcttttggacttttttcatgttttcttcacaaatcaaaatttgtttaagtctcattgttagtaattctgggacaggttattaaaggatttaaatttgaacctggctttctcacagctggacataattctaggaaaataaaatactatgtcgccacttggtcataatcatttagatggtggtgtagggcaaagctgttagaaagattgtagcgttttactctccctgggctttcctccgccttgctgcaacagagaggaaatgcccatgtccacagcttgtacacactgccccctcactatcttgttatccagtggcatgccaaaggagaactgaattagcttctgaggcttctgctgtaaatcagaagtgtatgttagtcaagagtaaacaagatgcacccagtatggtgggagggttttgctgtcagtagctcaaagtatggtgtagaaatggcctcctccctccatcctgggaagtcccagtcccatcctggtgtgagaatcaaccaggctttcctgctccacctgagataaccaactccctcccgtaatcaggaagccaaatgtcaccttcccaaagaaattttattttcacgtagctgaagtgcaaaacatagatgaccatttttaataagcacaatcaaatttttaaccacagaatgtctacaagaattatagctttaaaaaatacaaccaatttttatatttcaaaaatatttgaactcaaataaattaatttcttaaaaagta

SEQ ID NO: 100221 - DNA, 777 bp, Artificial Sequence
  derived and/or modified sequence
atggccgacatggcccacatcagcggcctggtggccgccggcgtggtgcccagccccttcgagcactgccacgtggtgaccaccaccacccacaagaccctgagaggctgcagagccggcatgatcttctacagaaagggcgtgaagagcgtggaccccaagaccggcaaggagatcctgtacaacctggagagcctgatcaacagcgccgtgttccccggcctgcagggcggcccccacaaccacgccatcgccggcgtggccgtggccctgaagcaggccatgaccctggagttcaaggtgtaccagcaccaggtggtggccaactgcagagccctgagcgaggccctgaccgagctgggctacaagatcgtgaccggcggcagcgacaaccacctgatcctggtggacctgagaagcaagggcaccgacggcggcagagccgagaaggtgctggaggcctgcagcatcgcctgcaacaagaacacctgccccggcgacagaagcgccctgagacccagcggcctgagactgggcacccccgccctgaccagcagaggcctgctggagaaggacttccagaaggtggcccacttcatccacagaggcatcgagctgaccctgcagatccagagcgacaccggcgtgagagccaccctgaaggagttcaaggagagactggccggcgacaagtaccaggccgccgtgcaggccctgagagaggaggtggagagcttcgccagcctgttccccctgcccggcctgcccgacttctag

SEQ ID NO: 100222 - DNA, 1038 bp, Artificial Sequence
  derived and/or modified sequence
atgggcctggacctgcccgacggcggccacctgacccacggcttcatgaccgacaagaagaagatcagcgccaccagcatcttcttcgagagcatgccctacaaggtgaaccccgacaccggctacatcaactacgaccagctggaggagaacgccagactgttccaccccaagctgatcatcgccggcaccagctgctacagcagaaacctggagtacgccagactgagaaagatcgccgacgagaacggcgcctacctgatggccgacatggcccacatcagcggcctggtggccgccggcgtggtgcccagccccttcgagcactgccacgtggtgaccaccaccacccacaagaccctgagaggctgcagagccggcatgatcttctacagaaagggcgtgaagagcgtggaccccaagaccggcaaggagatcctgtacaacctggagagcctgatcaacagcgccgtgttccccggcctgcagggcggcccccacaaccacgccatcgccggcgtggccgtggccctgaagcaggccatgaccctggagttcaaggtgtaccagcaccaggtggtggccaactgcagagccctgagcgaggccctgaccgagctgggctacaagatcgtgaccggcggcagcgacaaccacctgatcctggtggacctgagaagcaagggcaccgacggcggcagagccgagaaggtgctggaggcctgcagcatcgcctgcaacaagaacacctgccccggcgacagaagcgccctgagacccagcggcctgagactgggcacccccgccctgaccagcagaggcctgctggagaaggacttccagaaggtggcccacttcatccacagaggcatcgagctgaccctgcagatccagagcgacaccggcgtgagagccaccctgaaggagttcaaggagagactggccggcgacaagtaccaggccgccgtgcaggccctgagagaggaggtggagagcttcgccagcctgttccccctgcccggcctgcccgacttctag

SEQ ID NO: 100223 - protein, 115 aa, Artificial Sequence
  derived and/or modified sequence
MGNYLLRKLRQEMTTFERKLQDQDKKSQEVSSTSNQENENGSGSEEVCYTVINHIPHQRSSLSSNDDGYENIDSLTRKVRQFRERSETEYALLRTSVSRPCSCTHEHDYEVVFPH

SEQ ID NO: 100224 - DNA, 348 bp, Artificial Sequence
  derived and/or modified sequence
atgggcaactacctgctgagaaagctgagacaggagatgaccaccttcgagagaaagctgcaggaccaggacaagaagagccaggaggtgagcagcaccagcaaccaggagaacgagaacggcagcggcagcgaggaggtgtgctacaccgtgatcaaccacatcccccaccagagaagcagcctgagcagcaacgacgacggctacgagaacatcgacagcctgaccagaaaggtgagacagttcagagagagaagcgagaccgagtacgccctgctgagaaccagcgtgagcagaccctgcagctgcacccacgagcacgactacgaggtggtgttcccccactag

SEQ ID NO: 100225 - DNA, 348 bp, Artificial Sequence
  derived and/or modified sequence
atgggcaattatctgttgcgaaagctcagacaagagatgacgactttcgagcgaaagcttcaggaccaagacaagaaatctcaagaagtgtctagcacctccaatcaggagaacgaaaacggctccggctcagaggaagtctgctataccgtcataaatcacatccctcaccagcgctcctcgctatcatctaatgatgatggctacgagaatatcgattcgctcacccgcaaagtccgccagtttagggagagatcggaaaccgagtatgcactcctgagaacgagcgttagtcgcccctgctcctgtacacacgagcacgactatgaagtggtcttcccccattag

SEQ ID NO: 100226 - DNA, 348 bp, Artificial Sequence
  derived and/or modified sequence
atgggtaactatcttctgaggaaactaagacaggaaatgactacctttgagagaaagttacaggatcaggataagaagtctcaggaggtatcttcaacaagcaaccaggaaaacgagaatgggtccggctcagaggaagtgtgttacaccgtgataaaccacattccccatcagagaagctccctcagctcaaacgacgatggctatgagaatatcgacagtctcactcgaaaggtaagacaatttcgtgaacgtagcgagaccgagtatgccctgctgaggacctcagtatctagaccgtgttcttgcacccatgagcacgattacgaggtggtgtttccacactag

SEQ ID NO: 100227 - DNA, 348 bp, Artificial Sequence
  derived and/or modified sequence
atgggaaattacctcttacggaagcttcggcaggaaatgaccaccttcgaaagaaagctccaggaccaggataagaagtctcaggaggtctcgtccacaagcaatcaggagaatgaaaatgggtctggaagcgaggaagtgtgttacactgtgattaaccatattccccatcagaggtccagcctcagctctaatgacgacggatatgaaaacatcgactctctgacacggaaggttcgtcagttcagggagcgttctgaaactgagtacgccctacttagaacgtcagtctcccgaccttgcagttgcactcatgagcacgactacgaggtggtctttccccattag

SEQ ID NO: 100228 - DNA, 348 bp, Artificial Sequence
  derived and/or modified sequence
atgggcaactacctgctgaggaagctgcggcaggagatgaccacctttgagaggaagctgcaggaccaggacaagaagagccaggaggtgagcagcaccagcaaccaggagaatgaaaatggcagcggcagcgaggaggtgtgctacaccgtcatcaaccacatcccccaccagaggagcagcctgagcagcaatgatgatggctatgagaacatcgacagcctgaccaggaaggtgcggcagttccgggagaggagtgaaacagaatatgccctgctgcggacctctgtgtcccggccctgcagctgcacccatgaacatgactatgaggtggtgttcccccactag

SEQ ID NO: 100229 - DNA, 348 bp, Artificial Sequence
  derived and/or modified sequence
atgggcaactacctgctgcggaagctgcggcaggagatgaccacctttgaacgaaagctgcaggatcaggataagaaaagtcaagaagtcagttcaaccagcaaccaagagaatgagaacggttcgggtagcgaggaagtgtgttacactgtaatcaaccacatccctcaccagaggtcttccttgtcttccaacgacgatgggtatgagaatatcgacagcctgactcggaaagtgaggcagtttagagagcgaagcgagactgaatatgccctgctgcgtacatcagtgagtagaccgtgttcctgcacccacgaacatgattatgaagtggtcttcccacactag

SEQ ID NO: 100230 - DNA, 348 bp, Artificial Sequence
  derived and/or modified sequence
atgggcaactacctgctgcggaagctgcggcaggagatgaccacctttgagcgcaagctgcaggaccaagacaagaagagccaggaggtgagctctaccagcaaccaggaaaatgagaatgggtctggaagtgaggaagtctgctatacggttattaaccatatccctcatcagcggtccagcttaagctccaatgatgatggctacgaaaatatcgattccctgaccaggaaagtgcgccagtttagggagcgcagtgaaaccgaatacgccctcctgcgcacgtcagtaagtaggccctgttcatgtacacacgagcatgattatgaagtagtgttcccacactag

SEQ ID NO: 100231 - DNA, 348 bp, Artificial Sequence
  derived and/or modified sequence
atgggcaactacctgctgcggaagctgcggcaggagatgaccaccttcgagcggaagctgcaggatcaggacaagaagtctcaggaggtatcgtccacatccaaccaggagaatgaaaacggctcagggagcgaagaagtgtgctacacagtcatcaatcacatcccacatcagagatcgtccctctccagtaatgacgacggttacgaaaacatagattcactcacccgaaaggtacgccagttccgagagagaagtgaaacagagtacgcactgcttcggacaagcgtttcaagaccctgtagctgtactcatgaacacgactacgaagtggtctttcctcattag

SEQ ID NO: 100232 - DNA, 348 bp, Artificial Sequence
  derived and/or modified sequence
atgggcaattaccttctacgcaagctgcgccaggaaatgaccactttcgagagaaagcttcaggaccaggataaaaaatctcaggaagtatctagcacgagtaaccaggaaaatgaaaatggcagtggctctgaggaggtttgctatactgtgattaatcacattccccatcaaagaagtagcttgtcctcaaacgacgatggctacgagaacatcgactctttgacacgaaaggtccgccaatttagggagcggagcgaaacagaatacgcactcctcagaacatctgtctcgcggccttgttcctgcactcacgaacatgactatgaggttgtctttcctcattag

SEQ ID NO: 100233 - DNA, 348 bp, Artificial Sequence
  derived and/or modified sequence
atgggcaactacctgctgcgaaagctccgccaggaaatgactacctttgagcgcaagctgcaagaccaagataaaaaatcccaggaagtttccagtacgtccaatcaggagaacgagaatggttcgggatcggaggaggtatgttatacggtaatcaatcatattccccatcagcggagcagtttgtcaagtaacgatgatggctacgaaaacatagatagtctgactcggaaagtccgacagttccgagagcgctcagaaaccgaatatgccctccttcggactagcgtgtcccgcccttgctcttgtacacacgagcacgattacgaagttgtgtttcctcattag

SEQ ID NO: 100234 - DNA, 348 bp, Artificial Sequence
  derived and/or modified sequence
atgggaaattatctgctgcgcaaactcagacaggagatgaccacctttgaacgcaagctccaggatcaggacaaaaaaagccaggaggtgtcgtcgacgtcaaaccaggaaaacgagaacggatccggaagtgaggaagtttgctacaccgtgatcaatcatatccctcaccagcgcagcagcctctcctcaaatgatgatggttacgagaatattgattctttgaccaggaaggttagacaatttagagaaaggtccgagaccgagtatgctttgctgcgtacctcagtctccagaccttgtagctgcacccacgaacacgactatgaagttgtgttcccccactag

SEQ ID NO: 100235 - DNA, 4030 bp, Artificial Sequence
  derived and/or modified sequence
agacaatgacaaatatgagcctgaaggaagatgagctgatggcattcccagcttattaccactccttgggggccttatcttacatacatggattcaattcgtagattcagctgggatttactgcctcaagatggttatgttggaggattccaatagttctactggatgtggagccagaaattgtgtggaatgcctggtgtttctttcagttcttggatgccaatctgaggcccctggcagctcgtggttggcaagagcacgaacccgtggtcagatgcaacgtcctgcctcatgcattttcctcttggtgctttggtcagaacttccccaagtggagtgaaactcaggagctgagaaaccgagtcactgtgaaaagatgggaaattatctcctgcgaaaactcaggcaggaaatgactacatttgaaagaaaacttcaagatcaagataagaaaagccaagaagtttcatccacttctaatcaggaaaacgagaatggcagtggttctgaagaagtgtgctacactgtcattaatcacatcccccatcagagatcctccctgagctccaatgatgatggctatgagaacattgactccctcacaaggaaagtgagacagtttagagaaaggtcagagacagaatatgcccttcttaggacttctgttagtaggccttgttcctgcacccatgagcatgattatgaagttgtgtttccacactaaaatcctcaagctgctttatcaccttccagcaatgaagacaatgcagaatagcagactctggcgaagttgttcaccctgagcagtgcatgaaacattcctttctggctaaagtttagaaatattatcttattatatatccttaggcaactctgatatgtggcatctctgtggcttaggtgaaatcatagaaattgacacaatgacctaaaatattctatgtgtttttgcttgtaaagtttgaggacatggaggtgataaaaaaaactttcttaggacaataatgtaaaatgaaaataaatttctaatccccctgactaactgaatggaccctcttctaggccaaagagacctcagatgaacctgaaagactgaattctggccatgataggaagggaggtgagacacaccttgttataccccttcccttttggagtttatgcacaagtgaccaggatgagtcataagactgatgaaatagactgattgtggcaataagagtcccaattccaacctgactctggtgtagatcacacactgtctgagggattccatctatgagactttgtctacataacagagaccttggtttccacaacccctttattttagctaaagcattcttttctactgacttcttaagtctttagacaaagcttaactctttcaaccaattgccaatcagacaaactttgaatctacctatgacctgtaagctctctcctgcttcaagatcttgcctctttaagctgaaccgatgtgcactttccatttaatgatttatgtctttgcttgtaactcctgtctccctaaaatgtataaaagtaaacggtgacctgaccacctcaggcacactttctcaggacctcctgagagtgtatcccaggccatggtaagtcatgttggctcagaatcaacctctttaaatattttacagaatttgggttttggttaccaataagtctccacaaatatatgtccaagaatcttcaattccaagcctgctcaccaaatttcaaatgccaacatctccccatccaattacctatttcatctttgaggtgtaatctactcaataaactgtgtaagaccagtgaccagaccctttgctaacctgacatttacttcaatttttctttttctatgtactggatatttttgcatataaacttgcagtaatagttcaaaaattaatagtttttgacattggcttttctgagaagagaaattgaaagtgtcacaaaataaaaaaagatgaaatgaagcatatataattgtcaattttttcaattttctagccaacagagaatcgaaggattctgttcaaatattagtaaaaattgaaaataaacttgtgcttatattttgtttgcaacacactagttaatttaacctgtgactagttatctctaccgaaggtggatgtgtagtttctggttttaaaattcaagcaaactggaaaataatccatctaattatgctttctttcccaagaagttttttaatgatatgccagcttcctaatttggagacaaaagccttaattgacaatgcattcattatatatttttttgtatagttacagtatacgagttgagtatcccttagatgagatgcttgggaccagaagtgttttggatttcagatttatttttggattttggaatatttccatacatataatgagagagttggaaaatgggattcaagtctaatcataaaattcacttatgtttgatatacaccttatctgaatagcctgaaggtaattttatacaatattttaaataattttatgcctgaaacagagtttgcgcacattggaccatcagaaagcagaagtgtcactatttcaagtcagtgctcaaaaagtttcagatgttaagctggtgatgcagttcatgccagtgatccgagtactttgggaagccaagacaggtggatctcttgagcccaggagtttgaggccagactgcacaacacagtgagacctcgtttctacaaataattaaaaaattagccaggtgtggtggtgcacacctgtagtcccaggtactcaggaggctgaggtagtaggattgtttgagactgggaggttgaggctgaactgagccaggatcttgccaccacattccagcttgggcaacagagtgagaccctgtctcaaaaaaaaaaaaagtttcagattttggagcatttcagatcttcagattagggattttcaacctgtactgaccttttagtcattgacaagcattaatcaataggtggactccagataactcatttgctgtatacacattttgcctctctattcaacgaattcttatgccctcttgtggtgattttaatgtgcggaagggaaacaatagaaattttgcaattctagaaaagtcattctgtcaaaatatgtcagtcctgtagatattagccaattttaggaaaatgacaaaattttttacttttcgtctgcctttgtagctgttttatgatataaataccttatttgtaataaaattaattttaatttgagtaacaatctggaattatcagagaaggggcaagcaataggttaataaacagtattgattggtagaaggaacgttgaaatccaagagcatcaatgtcttctggtggttcaccataagccacagcagatgtcttaatctttccgagatctagtttttcagcaaagcaggatttaagaaatgtaactatcttatgtggttatgaagaacaatagaatcattgctgtataagtgctttttaacctgtaaattttgtgaagcttatcttttatgcatataaatatttgaacattttacattgtttatatttttaatcagttttactcaagtgtgattatatacaagaaaatgtaaccactgtaagggtagagttataagaattttgtcaaatgtattcacccatgtagtcacctccttatgaagagacagaacacgtacatcctcccagaaagttccacagtgctccttttccctgagtttcaccagtcctggcaaccaatgatctgcttcgtataattataactgttctagatatttgtagcaatgtaccctttccatatttattttgtgtgtgtaaggcttcttttagtcattataatatttttgagattcatctatgtttaatgttctatcagtagttgtacatcttacttgtctcagcatatcaccatatagatatactataatttgttaatctaatcactgatggatatgtaggatatttaagtttttgacattatgaataaagtggctataaatgaataaagcgactacaaatttg

SEQ ID NO: 100236 - DNA, 2555 bp, Artificial Sequence
  derived and/or modified sequence
gtggagtgaaactcaggagctgagaaaccgagtcactgtgaaaagatgggaaattatctcctgcgaaaactcaggcaggaaatgactacatttgaaagaaaacttcaagatcaagataagaaaagccaagaagtttcatccacttctaatcaggaaaacgagaatggcagtggttctgaagaagtgtgctacactgtcattaatcacatcccccatcagagatcctccctgagctccaatgatgatggctatgagaacattgactccctcacaaggaaagtgagacagtttagagaaaggtcagagacagaatatgcccttcttaggacttctgttagtaggccttgttcctgcacccatgagcatgattatgaagttgtgtttccacactaaaatcctcaagctgctttatcaccttccagcaatgaagacaatgcagaatagcagactctggcgaagttgttcaccctgagcagtgcatgaaacattcctttctggctaaagtttagaaatattatcttattatatatccttaggcaactctgatatgtggcatctctgtggcttaggtgaaatcatagaaattgacacaatgacctaaaatattctatgtgtttttgcttgtaaagtttgaggacatggaggtgataaaaaaaactttcttaggacaataatgtaaaatgaaaataaatttctaatccccctgactaactgaatggaccctcttctaggccaaagagacctcagatgaacctgaaagactgaattctggccatgataggaagggaggtgagacacaccttgttataccccttcccttttggagtttatgcacaagtgaccaggatgagtcataagactgatgaaatagactgattgtggcaataagagtcccaattccaacctgactctggtgtagatcacacactgtctgagggattccatctatgagactttgtctacataacagagaccttggtttccacaacccctttattttagctaaagcattcttttctactgacttcttaagtctttagacaaagcttaactctttcaaccaattgccaatcagacaaactttgaatctacctatgacctgtaagctctctcctgcttcaagatcttgcctctttaagctgaaccgatgtgcactttccatttaatgatttatgtctttgcttgtaactcctgtctccctaaaatgtataaaagtaaacggtgacctgaccacctcaggcacactttctcaggacctcctgagagtgtatcccaggccatggtaagtcatgttggctcagaatcaacctctttaaatattttacagaatttgggttttggttaccaataagtctccacaaatatatgtccaagaatcttcaattccaagcctgctcaccaaatttcaaatgccaacatctccccatccaattacctatttcatctttgaggtgtaatctactcaataaactgtgtaagaccagtgaccagaccctttgctaacctgacatttacttcaatttttctttttctatgtactggatatttttgcatataaacttgcagtaatagttcaaaaattaatagtttttgacattggcttttctgagaagagaaattgaaagtgtcacaaaataaaaaaagatgaaatgaagcatatataattgtcaattttttcaattttctagccaacagagaatcgaaggattctgttcaaatattagtaaaaattgaaaataaacttgtgcttatattttgtttgcaacacactagttaatttaacctgtgactagttatctctaccgaaggtggatgtgtagtttctggttttaaaattcaagcaaactggaaaataatccatctaattatgctttctttcccaagaagttttttaatgatatgccagcttcctaatttggagacaaaagccttaattgacaatgcattcattatatatttttttgtatagttacagtatacgagttgagtatcccttagatgagatgcttgggaccagaagtgttttggatttcagatttatttttggattttggaatatttccatacatataatgagagagttggaaaatgggattcaagtctaatcataaaattcacttatgtttgatatacaccttatctgaatagcctgaaggtaattttatacaatattttaaataattttatgcctgaaacagagtttgcgcacattggaccatcagaaagcagaagtgtcactatttcaagtcagtgctcaaaaagtttcagatgttaagctggtgatgcagttcatgccagtgatccgagtactttgggaagccaagacaggtggatctcttgagcccaggagtttgaggccagactgcacaacacagtgagacctcgtttctacaaataattaaaaaattagccaggtgtggtggtgcacacctgtagtcccaggtactcaggaggctgaggtagtaggattgtttgagactgggaggttgaggctgaactgagccaggatcttgccaccacattccagcttgggcaacagagtgagaccctgtctc

SEQ ID NO: 100237 - protein, 1143 aa, Artificial Sequence
  derived and/or modified sequence
MEKRETFVQAVSKELVGEFLQFVQLDKEASDPFSLNELLDELSRKQKEELWQRLKNLLTDVLLESPVDGWQVVEAQGEDNMETEHGSKMRKSIEIIYAITSVILASVSVINESENYEALLECVIILNGILYALPESERKLQSSIQDLCVTWWEKGLPAKEDTGKTAFVMLLRRSLETKTGADVCRLWRIHQALYCFDYDLEESGEIKDMLLECFININYIKKEEGRRFLSCLFNWNINFIKMIHGTIKNQLQGLQKSLMVYIAEIYFRAWKKASGKILEAIENDCIQDFMFHGIHLPRRSPVHSKVREVLSYFHHQKKVRQGVEEMLYRLYKPILWRGLKARNSEVRSNAALLFVEAFPIRDPNLHAIEMDSEIQKQFEELYSLLEDPYPMVRSTGILGVCKITSKYWEMMPPTILIDLLKKVTGELAFDTSSADVRCSVFKCLPMILDNKLSHPLLEQLLPALRYSLHDNSEKVRVAFVDMLLKIKAVRAAKFWKICPMEHILVRLETDSRPVSRRLVSLIFNSFLPVNQPEEVWCERCVTLVQMNHAAARRFYQYAHEHTACTNIAKLIHVIRHCLNACIQRAVREPPEDEEEEDGREKENVTVLDKTLSVNDVACMAGLLEIIVILWKSIDRSMENNKEAKLYTINKFASVLPEYLKVFKDDRCKIPLFMLMSFMPASAVPPFSCGVISTLRSREEGAVDKSYCTLLDCLCSWGQVGHILELVDNWLPTEHAQAKSNTASKGRVQIHDTRPVKPELALVYIEYLLTHPKNRECLLSAPRKKLNHLLKALETSKADLESLLQTPGGKPRGFSEAAAPRAFGLHCRLSIHLQHKFCSEGKVYLSMLEDTGFWLESKILSFIQDQEEDYLKLHRVIYQQIIQTYLTVCKDVVMVGLGDHQFQMQLLQRSLGIMQTVKGFFYVSLLLDILKEITGSSLIQKTDSDEEVAMLLDTVQKVFQKMLECIARSFRKQPEEGLRLLYSVQRPLHEFITAVQSRHTDTPVHRGVLSTLIAGPVVEISHQLRKVSDVEELTPPEHLSDLPPFSRCLIGIIIKSSNVVRSFLDELKACVASNDIEGIVCLTAAVHIILVINAGKHKSSKVREVAATVHRKLKTFMEITLEEDSIERFLYESSSRTLGELLNS

SEQ ID NO: 100238 - protein, 571 aa, Artificial Sequence [sequence omitted]

SEQ ID NO: 100239 - DNA, 3432 bp, Artificial Sequence
  derived and/or modified sequence
atggagaaaagagagacatttgttcaggcagttagcaaggagctggtcggagagtttctgcagtttgtgcaactagacaaagaagccagcgatcccttctcactgaatgagctgctggacgagctatctaggaaacagaaggaggagctgtggcagcgtctgaagaacctcctcacagatgtgctcctggaatcgcctgtggatgggtggcaggtggtcgaggcccagggagaggataacatggagaccgaacacggttctaaaatgaggaaaagcatcgaaatcatctacgccatcacctccgtgatactcgcttcagtgagcgtcattaacgagtccgaaaactacgaagcactgctagaatgtgttatcattctgaacgggattctgtacgcgttacctgaatccgaacgtaaactgcaatccagcatccaggacttgtgcgttacttggtgggaaaagggcctccccgcaaaagaggataccggtaagacggcttttgttatgttactgagacggagcttggaaacaaaaacgggagccgacgtgtgtcggctctggcgcatccaccaggcactttactgctttgactatgatctcgaggagagcggagaaataaaggacatgctgctggagtgctttataaatatcaactacatcaagaaagaggagggccgcaggtttctaagctgtctttttaattggaatattaatttcatcaaaatgatacatggcacaattaaaaatcagctgcaagggctgcaaaagtctctaatggtttatatagcagaaatatattttcgtgcttggaaaaaagctagcggaaagatcctggaggctatcgaaaacgactgtatccaggattttatgttccacggtatacacctaccccgtcgatccccagtgcactctaaagtccgggaagtcctgagttatttccaccaccagaaaaaagtcagacaaggcgtcgaggaaatgttgtaccgattgtataagcccatactgtggcgtggtcttaaagcccgaaatagcgaggtgcggtctaacgccgccctcctgtttgtggaggccttccctatacgtgatcccaaccttcatgccatagagatggattctgagatccaaaaacagtttgaagaactttactcactgcttgaggacccttacccaatggtgagatctaccggaatccttggggtttgcaaaataacatctaaatattgggaaatgatgcctcccacaattctcattgatctgctcaagaaggtgaccggagaactggcatttgatacgtcatccgcagacgtgcgctgttccgtcttcaagtgcctccccatgattctagacaacaagctgagtcatccattgttggagcagctgctgcccgcactgcgatactccctccatgataactctgagaaagttcgggtcgcatttgtcgatatgttattgaagatcaaggcagtgcgtgccgctaagttctggaaaatctgtcccatggaacacatcctggtccggttggagaccgactcccgccctgtctcacgacggctagtgtcactgatctttaattcatttctccctgttaaccaacccgaggaggtttggtgcgaacgctgtgtgacgttggtccagatgaaccatgcagccgctcgccgcttctatcagtacgctcacgagcacactgcatgcactaatatcgcaaaactgatacatgtcattagacactgtttgaacgcttgcattcagcgagctgttcgtgaaccccccgaggacgaagaagaggaagacgggagagagaaggagaacgtcacagttctggataaaaccctatctgtcaatgacgtggcttgtatggccggactgctggagatcattgttattctttggaagagcatcgatcggtcgatggagaacaacaaggaggcgaagctgtacacaattaacaaattcgctagtgttctgccggaatacctgaaagtgttcaaagacgacagatgcaagataccactctttatgctcatgagcttcatgcctgcaagtgcagtgcccccattctcatgcggcgtgatctccacccttaggtccagggaagaaggtgcagtcgataagtcttactgcactttgcttgactgcctgtgctcctggggacaggtgggacacatcctggagttggtagacaattggctacccaccgagcatgctcaggccaagtcaaataccgcttcaaaaggaagggtccaaatccatgatactcgtcccgttaagcctgaattagccctggtgtacatagagtatctcctgactcatcctaaaaatcgagaatgcttgctctcagctcctaggaaaaaacttaaccatctactaaaggcactggagacttctaaagctgatctcgaaagcctgctgcagacaccaggcggcaaacccaggggctttagcgaggccgcagccccccgggcattcggcttgcactgtaggctgtcgatccatctgcaacacaagttctgttccgaaggcaaagtctacctcagtatgctcgaagacacaggattctggcttgaatccaaaattctctcttttattcaggatcaggaggaagattatctcaagctccatcgggtgatctaccaacagataattcagacctacctgactgtgtgcaaggacgtcgtcatggtcggactgggcgatcatcagtttcagatgcaactactgcagcggtcattggggattatgcaaaccgtcaagggttttttctacgtctccctccttctcgacatcctgaaggagataacgggctcatctttaatccaaaaaaccgacagtgatgaggaagttgccatgctgctggatactgtgcagaaggttttccagaagatgctggaatgcatcgctaggtcgtttcggaagcagcctgaggagggcctccgtctgctgtactctgttcaacggcccctgcacgaatttattaccgctgttcagagccgccacaccgacacgccagtgcacaggggcgtgctgagtacccttattgccggtccagttgttgagatatcacaccagctacggaaagtgagtgacgttgaagaactaacacctcccgaacatctgagcgacctgcctccgttttccagatgtctcatcgggatcattatcaaatcttcaaacgtggtgcgcagcttcttggatgagttgaaggcctgcgtggcctcgaacgacatcgagggcattgtgtgcctcactgccgccgtgcacatcattctcgtgattaatgctggcaaacacaagagctctaaggtcagagaggtggccgccacagtgcataggaagttgaaaacgtttatggagatcacgctcgaggaggatagtatcgagcgctttctgtatgaaagctcgtcccgtacgctcggcgagcttctaaactcctag

SEQ ID NO: 100240 - DNA, 3432 bp, Artificial Sequence
  derived and/or modified sequence
atggaaaaaagagaaactttcgtgcaagcagtgtcaaaagagcttgtcggggagttcctgcagtttgtccagttggataaggaagcttctgatcctttctcgctgaatgagctcctcgacgagctatctagaaagcagaaagaagagctttggcagagacttaagaacctactgaccgacgtgctgctcgaatcccctgtggacggatggcaggtggtcgaagcccaaggagaagacaatatggaaactgaacacggaagtaagatgaggaaaagcatcgaaatcatctatgctatcacaagcgtgatcctggcttccgtttcagttatcaacgaatctgagaattatgaggctcttctcgagtgcgtcattatcttgaatggcatcctgtacgcactgccagaatccgagcggaagttacaaagtagtatccaggatttatgtgtgacctggtgggaaaaaggactccctgctaaagaggacactggcaaaacagcttttgtaatgctgctgagacgatctctcgagacaaaaacgggcgccgatgtgtgcaggctgtggaggatccaccaggccctctactgttttgattacgacttggaagagagtggggagataaaggatatgcttctagagtgtttcataaacatcaattatattaaaaaagaggaaggccggaggtttctctcatgtctgtttaattggaatatcaacttcatcaaaatgatccatggaactatcaaaaaccagctccaggggctgcaaaaaagtctgatggtatacattgcggagatctacttccgagcttggaagaaagctagcggcaaaatccttgaggcaatcgagaacgattgcatccaggatttcatgtttcacggaatccacctgccccggcgttccccggtacacagcaaggtgagggaggtgctcagctacttccaccatcagaagaaggtcagacagggcgtggaggagatgctctaccgcctgtataaacctatcctttggaggggactcaaagcacgtaacagcgaagtgcgtagcaacgccgccctcctctttgtcgaagctttccccattcgggaccctaacctccatgctatagaaatggacagcgagatccaaaaacagtttgaggaactgtatagtctccttgaggacccctatccgatggtccggtctacaggtattctaggtgtgtgcaagatcacctcaaagtactgggagatgatgcctcctactatcctgatcgacctgctgaaaaaggtcactggagagctggcatttgatacgtcatccgctgacgtcaggtgtagtgtattcaagtgcctgcccatgattcttgacaacaagttgtcccatccgttgctggagcagctgctgccagccttgcgctattctttgcacgacaactcagaaaaggttcgggtcgccttcgtcgacatgttgcttaaaattaaggctgtgcgggcagccaaattctggaagatttgtccgatggagcatattctggtccgccttgagaccgacagcagacctgtgagtcgaaggttagtgtccctgatttttaattcattccttcctgttaatcaacccgaggaggtttggtgtgaaagatgcgtcactcttgtacagatgaaccacgccgccgcccgccgtttctaccagtatgcacatgagcacaccgcttgcacgaacatcgccaagctgattcacgttatcaggcactgcctcaatgcttgtattcaaagggctgtgagagagccccctgaggatgaggaggaagaagatggcagagagaaggaaaacgtgaccgtgctggacaagaccctcagcgttaatgatgtggcatgtatggcggggctgctggagatcattgtgattctgtggaaatccattgatcgctccatggaaaacaacaaggaggcaaagctttacaccatcaataaattcgcgagtgtgctgccggagtacctgaaggttttcaaagacgatcggtgcaaaatcccactgttcatgttgatgtcatttatgccggcatccgctgtgccgccattttcttgcggggtaatttctaccctcagaagtagggaagaaggagcagtggacaagtcatactgcaccctgctggactgcttgtgctcatgggggcaggttggccatattcttgagctggttgacaattggcttcccactgaacacgctcaggcaaaaagcaacactgcatcaaaaggccgagtacagattcatgatacgaggcccgtgaagcccgagctggctcttgtctatattgagtaccttttgacgcaccctaaaaatagagagtgtctcctatccgcgccacggaaaaagctgaatcaccttctgaaggctctggaaactagcaaggccgatctggagtccctgctccaaacccccggcggcaaaccacggggcttcagtgaagcagcagcccctcgggcatttggactccactgtcgcctgagcatccacctgcaacataaattttgttcggagggcaaagtctacctcagcatgttagaagacacgggattctggctggaatccaagatcctcagtttcatccaagaccaggaagaagactacctcaaacttcatcgcgtgatctaccaacaaatcattcagacttacttgaccgtgtgtaaagacgtcgttatggtcggcctcggcgaccatcagttccagatgcaactcttgcagcgcagccttggcattatgcagaccgtgaaaggatttttttacgtttctctgcttctcgacattctgaaggagatcacggggtcctctctaatccagaagacagattctgacgaagaggtagcgatgctcttggatactgttcaaaaagtttttcagaaaatgcttgagtgtattgcgcgtagctttcgtaagcagcctgaggagggtttacgacttctttactccgtacagcgaccactgcacgaattcataaccgccgtccagtctagacacactgacacgcccgtccacagaggagttctgagcacattgatcgctggaccagtagtggagatctcacaccagcttcgtaaagtgtcggatgtggaggagctgacaccacctgagcacctgtcagacctaccgcctttttcacgctgcctcatcggcataatcattaaatcgtccaacgtggtccgaagcttcctggacgaactcaaggcctgcgtggcaagcaacgatatcgaagggatcgtgtgtctgactgctgcagttcacatcattctggtgattaatgccggtaagcataaatccagcaaggtgcgggaggttgcagctaccgtgcaccgaaagttaaagaccttcatggaaattacactcgaggaggatagcatcgagcggtttttgtacgaatctagttctcgaactcttggagagcttttaaatagttag

SEQ ID NO: 100241 - DNA, 1716 bp, Artificial Sequence
  derived and/or modified sequence
atggaacacattctggtgaggctggagacagattcccgaccagtttcccggaggctagtgagcctgatctttaattcttttctgccggtcaaccaacctgaggaagtgtggtgcgagcgatgtgtgactctagtgcaaatgaaccacgccgctgctaggcgattctatcaatacgcacacgaacataccgcttgcactaacatcgccaaacttattcacgtgatacgccactgtctgaatgcctgcattcaaagagcagttagggaaccgcctgaagatgaagaggaggaagacggtagagagaaagagaacgtcactgacgatagatgtaagattcccttgtttatgcttatgtccttcatgccggctagtgctgtgcctccttttagctgcggggtcatctctacccttcgctctcgcgaagagggggccgtggataagtcatactgcactctgcttgattgtctgtgtagttgggggcaagttgggcatattctggagctggtagacaattggcttcctaccgagcacgcccaggccaagagtaatacggcaagcaagggacgagtacagatacatgacacaagaccggtaaagcccgagctagccttggtttacatagagtacctccttactcatccaaagaatcgtgagtgtcttctgtcggccccacgaaaaaagctgaaccacctgttgaaagcactggaaacttccaaggcagacctagagtcacttctgcagacccccggagggaaaccacgaggctttagcgaagccgctgcccctagggcctttggattgcactgtcgcctgtcgatccatctccaacacaagttttgttccgaaggaaaagtgtacctcagcatgttagaagatactggattctggcttgagtcaaagattctgtctttcattcaggaccaggaagaggattacctcaagctgcaccgcgtgatatatcagcaaatcatccagacctaccttacagtgtgcaaggacgtggtgatggtaggtctgggggaccatcagttccagatgcagctccttcaaaggtctttgggtattatgcaaaccgtaaagggcttcttttatgtgagcctgctgttggacatattgaaggagattacaggctcctcactgatccagaagacagactcggatgaagaagtggcgatgctactggacactgtgcaaaaggtattccaaaagatgctggagtgcattgcaagatcctttaggaaacagccagaagaagggctccggttgctgtactccgtgcagcgtcccctgcatgagttcattaccgcagtacaaagtcgacataccgatacacctgtccataggggggtgctgtccacactcatcgcaggtcctgtggtggaaatatcacaccagctcagaaaggtctccgatgtagaggagttgaccccccccgaacacctgagcgatctaccccccttctcccgctgtctcatcggaattatcatcaaatccagcaatgtcgttcgctcctttttagatgagctcaaggcatgtgtggcctccaacgacatcgaggggatcgtgtgcttaacagccgctgtgcatatcatactcgtgattaatgccggtaaacataagtcttcaaaggtccgtgaagtggcggcaacagtgcatcgaaaactgaagacattcatggagattacattagaggaagacagcattgagcggatttag

SEQ ID NO: 100242 - DNA, 3930 bp, Artificial Sequence
  derived and/or modified sequence
gagagcggcgcctgatgacgaccgggagggcggggcccgtctggggcgccggcgggtgcgtttgaatctggtccgagcgcgggaaacggcgggtccccgagcccagggttacaaaataaatgccatttgaacagtgccatctgtcatggaaaaacgtgagacgtttgtacaagccgtgtctaaggagctggttggagagtttttgcaatttgttcaacttgataaagaggcctctgatcctttcagcctaaatgaattactagatgaattatcaaggaaacagaaagaagaattatggcaaaggctgaagaatttattgacagatgtgttgttagaaagcccagtggatgggtggcaggtagtggaagcccagggtgaagacaatatggaaaccgaacatggctcaaaaatgagaaaaagcatagaaataatttatgcaattacatctgtgattcttgcttctgtgtctgtaataaatgaaagtgagaactacgaagccctactggaatgtgttattatattaaatggtattttatatgcattacctgagtctgaacgaaaactacagagttctattcaggatttgtgtgttacctggtgggagaaaggcctgcctgccaaggaagacacaggaaagacagcctttgtcatgttactaaggaggagtctggagactaagacaggtgcagacgtatgtcggctttggcgtatccatcaagctttatattgctttgattatgatttggaggaaagtggagaaattaaagatatgttacttgagtgcttcataaatattaattatatcaagaaagaagagggaagaagatttcttagttgtctcttcaactggaatatcaacttcatcaaaatgatccacgggaccattaaaaaccagttacagggattacaaaagtctttgatggtatacattgcagaaatttatttcagagcttggaaaaaggcttcagggaaaatactggaggcgattgaaaatgattgcatccaggacttcatgttccacgggatacaccttccgaggaggtctccagtgcattccaaagtgcgggaggttctgagttactttcaccatcaaaagaaagttcggcagggagtggaagagatgctttatagattatataagcccatcctttggagaggattaaaggccagaaactctgaagttcgatcaaatgctgcattgttgtttgttgaagcatttcctattagggatccaaaccttcatgctattgaaatggatagtgaaatccagaaacagtttgaagagctctatagccttttagaagatccttacccgatggtccgttccacagggatccttggtgtttgtaaaataacttctaagtactgggaaatgatgcccccgaccattcttattgacctcctgaagaaggtgactggggaactggcatttgacacgagctcagctgatgttcgttgttctgtctttaagtgtctgccaatgattttggacaacaaactgagccacccattgttagagcagctccttccagctctcagatacagtctccacgacaattcggagaaagtgagggtagcttttgtggacatgctgttgaagatcaaagctgtgagggctgctaagttttggaaaatatgtcccatggagcacattctggttcgtctggaaactgattctcgacctgtgtctcggcgcctggtgagcctcatctttaattctttcctgcctgtgaatcagccggaggaggtctggtgcgagcgctgtgtcaccctggtgcagatgaaccacgccgctgccaggaggttctatcagtacgcccacgaacacaccgcctgcaccaacatagcaaagctgattcacgttattcgtcattgcttaaatgcctgtatccagagggcagtgagagagcctccagaggacgaggaggaagaggacggaagggagaaggagaatgtgactgttctggacaaaacactgtcagtaaacgatgttgcatgcatggcaggtttactagaaatcattgtgattctctggaaaagtattgacagaagtatggaaaataataaagaggccaaactttacacgattaacaagtttgcctctgtgcttccagagtatctgaaagtatttaaggatgatcgctgcaagatccctttattcatgctaatgtcctttatgccggcctctgctgtccccccattcagctgtggtgtgatttccacgctgagaagccgggaggagggcgctgtggacaagagctactgcactttgttggattgcctctgctcctgggggcaggtggggcacattctggagcttgttgacaactggctgcccacagagcatgcccaggccaagagcaacacagcttctaaaggtagggtgcagatccatgacacacgcccagtcaaacctgaattggcattggtctacattgagtatctgctgactcatccaaagaaccgcgagtgcttgctctctgctcctcggaagaaacttaaccatcttttgaaagcccttgaaacgtcaaaggcagatctggagtcacttctgcagacaccgggtgggaagcctcgtggcttcagtgaagcagctgccccgcgagcctttggtctccactgtcgcctgagcatccatcttcagcacaagttctgctcagaaggaaaggtgtatttgtccatgttggaagacactggcttttggttagaaagcaaaattttatcttttattcaagatcaagaagaagactacctgaagcttcatagggtcatttatcagcaaattatccagacctacctgactgtgtgtaaagatgttgttatggtaggccttggtgaccatcagtttcagatgcaactcttacagcggagtcttggaatcatgcaaacagtgaagggatttttttatgtttcattacttcttgacattctgaaagagataactggaagttccttgattcagaaaacagattcagatgaagaagttgcaatgctgttggacacagtccagaaagtatttcagaaaatgttggaatgtattgcacggagcttcaggaagcagccggaagaaggcctgcggctgctttattctgttcagaggcctcttcatgagttcattactgctgttcagtctcggcacacagacacccctgtgcaccggggtgtactttctactctgatcgctgggcctgtggttgagataagtcaccagctacggaaggtttctgacgtagaagagcttacccctccagagcatctttctgatcttccaccattttcaaggtgtttaataggaataataataaagtcttcgaatgtggtcaggtcatttttggatgaattaaaggcatgtgtggcttctaatgatattgaaggcattgtgtgcctcacggctgctgtgcatattatcctggttattaatgcaggtaaacataaaagctcaaaagtgagggaggttgcagccactgttcacagaaaactaaagacattcatggaaattactttggaagaggatagcattgaaagatttctctatgaatcatcatcaagaactctgggagaacttttgaattcataaccaagccaacatctccagacatgtaaaaatagggaaaagtgattcaaattgaaatgcctgtgtattttcctattgtttttaatgttaataacccatataatagggaaagggtgggatttttttgtgggaatgtgggaaggtgggggttatggaggagataactcaaaacttcttcaattttgcctagtgcctgcgtaaataatatatttaatataaaggactccaggtatgaatggtgtagaaatccatgattccaagaaaaaacacttttctagcaaacctggttgtttttaaaatgacttttatatatgtaatattgcttggaaactatgagtaataaagcaatgacaaca

SEQ ID NO: 100243 - DNA, 3957 bp, Artificial Sequence
  derived and/or modified sequence
gagggcggggcccgtctggggcgccggcgggtgcgtttgaatctggtccgagcgcgggaaacggcgggtccccgagcccagtaccagacctcctgtgcgaagagtaacctgctcttcggactgataactggatgggttacaaaataaatgccatttgaacagtgccatctgtcatggaaaaacgtgagacgtttgtacaagccgtgtctaaggagctggttggagagtttttgcaatttgttcaacttgataaagaggcctctgatcctttcagcctaaatgaattactagatgaattatcaaggaaacagaaagaagaattatggcaaaggctgaagaatttattgacagatgtgttgttagaaagcccagtggatgggtggcaggtagtggaagcccagggtgaagacaatatggaaaccgaacatggctcaaaaatgagaaaaagcatagaaataatttatgcaattacatctgtgattcttgcttctgtgtctgtaataaatgaaagtgagaactacgaagccctactggaatgtgttattatattaaatggtattttatatgcattacctgagtctgaacgaaaactacagagttctattcaggatttgtgtgttacctggtgggagaaaggcctgcctgccaaggaagacacaggaaagacagcctttgtcatgttactaaggaggagtctggagactaagacaggtgcagacgtatgtcggctttggcgtatccatcaagctttatattgctttgattatgatttggaggaaagtggagaaattaaagatatgttacttgagtgcttcataaatattaattatatcaagaaagaagagggaagaagatttcttagttgtctcttcaactggaatatcaacttcatcaaaatgatccacgggaccattaaaaaccagttacagggattacaaaagtctttgatggtatacattgcagaaatttatttcagagcttggaaaaaggcttcagggaaaatactggaggcgattgaaaatgattgcatccaggacttcatgttccacgggatacaccttccgaggaggtctccagtgcattccaaagtgcgggaggttctgagttactttcaccatcaaaagaaagttcggcagggagtggaagagatgctttatagattatataagcccatcctttggagaggattaaaggccagaaactctgaagttcgatcaaatgctgcattgttgtttgttgaagcatttcctattagggatccaaaccttcatgctattgaaatggatagtgaaatccagaaacagtttgaagagctctatagccttttagaagatccttacccgatggtccgttccacagggatccttggtgtttgtaaaataacttctaagtactgggaaatgatgcccccgaccattcttattgacctcctgaagaaggtgactggggaactggcatttgacacgagctcagctgatgttcgttgttctgtctttaagtgtctgccaatgattttggacaacaaactgagccacccattgttagagcagctccttccagctctcagatacagtctccacgacaattcggagaaagtgagggtagcttttgtggacatgctgttgaagatcaaagctgtgagggctgctaagttttggaaaatatgtcccatggagcacattctggttcgtctggaaactgattctcgacctgtgtctcggcgcctggtgagcctcatctttaattctttcctgcctgtgaatcagccggaggaggtctggtgcgagcgctgtgtcaccctggtgcagatgaaccacgccgctgccaggaggttctatcagtacgcccacgaacacaccgcctgcaccaacatagcaaagctgattcacgttattcgtcattgcttaaatgcctgtatccagagggcagtgagagagcctccagaggacgaggaggaagaggacggaagggagaaggagaatgtgactgttctggacaaaacactgtcagtaaacgatgttgcatgcatggcaggtttactagaaatcattgtgattctctggaaaagtattgacagaagtatggaaaataataaagaggccaaactttacacgattaacaagtttgcctctgtgcttccagagtatctgaaagtatttaaggatgatcgctgcaagatccctttattcatgctaatgtcctttatgccggcctctgctgtccccccattcagctgtggtgtgatttccacgctgagaagccgggaggagggcgctgtggacaagagctactgcactttgttggattgcctctgctcctgggggcaggtggggcacattctggagcttgttgacaactggctgcccacagagcatgcccaggccaagagcaacacagcttctaaaggtagggtgcagatccatgacacacgcccagtcaaacctgaattggcattggtctacattgagtatctgctgactcatccaaagaaccgcgagtgcttgctctctgctcctcggaagaaacttaaccatcttttgaaagcccttgaaacgtcaaaggcagatctggagtcacttctgcagacaccgggtgggaagcctcgtggcttcagtgaagcagctgccccgcgagcctttggtctccactgtcgcctgagcatccatcttcagcacaagttctgctcagaaggaaaggtgtatttgtccatgttggaagacactggcttttggttagaaagcaaaattttatcttttattcaagatcaagaagaagactacctgaagcttcatagggtcatttatcagcaaattatccagacctacctgactgtgtgtaaagatgttgttatggtaggccttggtgaccatcagtttcagatgcaactcttacagcggagtcttggaatcatgcaaacagtgaagggatttttttatgtttcattacttcttgacattctgaaagagataactggaagttccttgattcagaaaacagattcagatgaagaagttgcaatgctgttggacacagtccagaaagtatttcagaaaatgttggaatgtattgcacggagcttcaggaagcagccggaagaaggcctgcggctgctttattctgttcagaggcctcttcatgagttcattactgctgttcagtctcggcacacagacacccctgtgcaccggggtgtactttctactctgatcgctgggcctgtggttgagataagtcaccagctacggaaggtttctgacgtagaagagcttacccctccagagcatctttctgatcttccaccattttcaaggtgtttaataggaataataataaagtcttcgaatgtggtcaggtcatttttggatgaattaaaggcatgtgtggcttctaatgatattgaaggcattgtgtgcctcacggctgctgtgcatattatcctggttattaatgcaggtaaacataaaagctcaaaagtgagggaggttgcagccactgttcacagaaaactaaagacattcatggaaattactttggaagaggatagcattgaaagatttctctatgaatcatcatcaagaactctgggagaacttttgaattcataaccaagccaacatctccagacatgtaaaaatagggaaaagtgattcaaattgaaatgcctgtgtattttcctattgtttttaatgttaataacccatataatagggaaagggtgggatttttttgtgggaatgtgggaaggtgggggttatggaggagataactcaaaacttcttcaattttgcctagtgcctgcgtaaataatatatttaatataaaggactccaggtatgaatggtgtagaaatccatgattccaagaaaaaacacttttctagcaaacctggttgtttttaaaatgacttttatatatgtaatattgcttggaaactatgagtaataaagcaatgacaac

SEQ ID NO: 100244 - DNA, 3432 bp, Artificial Sequence
  derived and/or modified sequence
atggagaagcgggagacctttgtgcaggccgtgtccaaggagctggtgggggagttcctgcagtttgtgcagctggacaaggaggccagtgaccccttcagcctgaatgagctgctggatgagctgagcaggaagcagaaggaggagctgtggcagaggctgaagaacctgctgacagatgtgctgctggagagccctgtggatggctggcaggtggtggaggcccagggcgaggacaacatggagacagaacatggcagcaagatgaggaagagcattgagatcatctatgccatcaccagcgtcatcctggcctctgtgtctgtcatcaatgaaagtgagaactatgaggccctgctggagtgtgtgatcatcctgaatggcatcctgtatgccctgcctgagagcgagaggaagctgcagagcagcatccaggacctgtgtgtgacctggtgggagaagggcctgcctgccaaggaggacaccgggaagacagcctttgtgatgctgctgcggcgcagcctggagaccaagacaggagcagatgtgtgccgcctgtggaggatccaccaggccctgtactgctttgattatgacctggaggagagcggggagatcaaggacatgctgctggagtgcttcatcaacatcaactacatcaagaaggaggagggccgccgcttcctgagctgcctcttcaactggaacatcaacttcatcaagatgatccacggcaccatcaagaaccagctgcagggcctgcagaagagcctgatggtgtacatcgccgagatctacttccgggcctggaagaaggccagcggcaagatcctggaggccattgaaaatgactgcatccaggacttcatgttccacggcatccacctgccccggcgcagccctgtgcacagcaaggtgcgggaggtgctgagctacttccaccaccagaagaaggtgcggcagggcgtggaggagatgctgtaccgcctgtacaagcccatcctgtggaggggcctgaaggccaggaacagcgaggtgcgcagcaatgctgccctgctgtttgtggaggccttccccatccgggaccccaacctgcacgccatcgagatggacagcgagatccagaagcagtttgaggagctgtacagcctgctggaggacccctaccccatggtgcgcagcacaggcatcctgggcgtgtgcaagatcaccagcaagtactgggagatgatgccacccaccatcctgattgacctgctgaagaaggtgactggagagctggcctttgacaccagcagcgcagatgtgcgctgcagcgtcttcaagtgcctgcccatgatcctggacaacaagctgagccaccccctgctggagcagctgctgcctgccctgcgctacagcctgcatgacaacagcgagaaggtgcgggtggcctttgtggacatgctgctgaagatcaaggctgtgcgggccgccaagttctggaagatctgccccatggagcacatcctggtgcggctggagacagacagcaggcctgtgtcccggcggctggtgtccctcatcttcaacagcttcctgcctgtgaaccagcctgaggaggtgtggtgtgagcgctgtgtgaccctggtgcagatgaaccacgccgccgcccggcgcttctaccagtatgcccacgagcacacagcctgcaccaacatcgccaagctgatccacgtgatccgccactgcctgaatgcctgcatccagagagctgtgcgggagcccccagaagatgaggaggaggaggatggccgggagaaggaaaatgtgacagtgctggacaagaccctgtctgtgaatgatgtggcctgcatggccggcctgctggagatcatcgtcatcctgtggaagagcattgaccgctccatggagaacaacaaggaggccaagctgtacaccatcaacaagtttgcctctgtgctgcctgagtacctgaaggtgttcaaggatgaccgctgcaagatccccctcttcatgctgatgtccttcatgcctgccagcgctgtgccccccttcagctgtggggtcatcagcaccctgcggagccgggaggagggcgctgtggacaagagctactgcaccctgctggactgcctgtgctcctggggccaggtgggccacatcctggagctggtggacaactggctgcccacagagcacgcccaggccaagagcaacacagccagcaagggccgggtgcagatccatgacaccaggcctgtgaagccagagctggccctggtgtacatcgagtacctgctgacccaccccaagaacagagaatgtctgctgagcgcccccaggaagaagctgaaccacctgctgaaggccctggagaccagcaaggctgacctggagagcctgctgcagacccctgggggcaagccccggggcttcagcgaggccgccgccccccgggccttcggcctgcactgccgcctgagcatccacctgcagcacaagttctgcagcgagggcaaggtgtacctgtccatgctggaggacaccggcttctggctggagagcaagatcctgtccttcatccaggaccaggaggaggactacctgaagctgcacagggtcatctaccagcagatcatccagacctacctgactgtgtgcaaggatgtggtgatggtgggcctgggggaccaccagttccagatgcagctgctgcagaggagcctgggcatcatgcagacagtgaagggcttcttctacgtgtccctgctgctggacatcctgaaggagatcaccggcagcagcctcatccagaagacagacagtgatgaggaggtggccatgctgctggacacagtgcagaaggtgttccagaagatgctggagtgcatcgcccggagcttcaggaagcagcctgaggagggcctgcggctgctgtacagcgtgcagaggcccctgcacgagttcatcacagctgtgcagagccgccacacagacacccctgtgcaccggggcgtgctgagcaccctgattgctggccctgtggtggagatcagccaccagctgaggaaggtgtctgatgtggaggagctgaccccacctgagcacctgagtgacctgccccccttcagccgctgcctgattggcatcatcatcaagagcagcaatgtggtgcgctccttcctggatgagctgaaggcctgtgtggccagcaatgacatcgagggcatcgtgtgcctgacagctgctgtgcacatcatcctggtgatcaatgccggcaagcacaagagcagcaaggtgcgggaggtggccgccaccgtgcacaggaagctgaagaccttcatggagatcaccctggaggaggacagcattgagcgcttcctgtatgagagcagcagcaggaccctgggggagctgctgaacagctag

SEQ ID NO: 100245 - DNA, 1716 bp, Artificial Sequence
  derived and/or modified sequence
atggagcacatcctggtgcggctggagacagacagcaggcctgtgtcccggcggctggtgtccctcatcttcaacagcttcctgcctgtgaaccagcctgaggaggtgtggtgtgagcgctgtgtgaccctggtgcagatgaaccacgccgccgcccggcgcttctaccagtatgcccacgagcacacagcctgcaccaacatcgccaagctgattcatgtgatccgccactgcctgaatgcctgcatccagagagctgtgcgggagcccccagaagatgaggaggaggaggatggccgggagaaggaaaatgtgacagatgaccgctgcaagatccccctcttcatgctgatgtccttcatgcctgccagcgctgtgccccccttcagctgtggggtcatcagcaccctgcggagccgggaggagggcgctgtggacaagagctactgcaccctgctggactgcctgtgctcctggggccaggtgggccacatcctggagctggtggacaactggctgcccacagaacatgcccaggccaagagcaacacagccagcaagggccgggtgcagatccatgacaccaggcctgtgaagccagagctggccctggtgtacatcgagtacctgctgacccaccccaagaaccgggagtgcctgctgagcgcccccaggaagaagctgaaccacctgctgaaggccctggagaccagcaaggctgacctggagagcctgctgcagaccccaggcggcaagccccggggcttcagcgaggccgccgccccccgggccttcggcctgcactgccgcctgagcatccacctgcagcacaagttctgcagcgagggcaaggtgtacctgtccatgctggaggacaccggcttctggctggagagcaagatcctgtccttcatccaggaccaggaggaggactacctgaagctgcacagggtcatctaccagcagatcatccagacctacctgactgtgtgcaaggatgtggtgatggtgggcctgggggaccaccagttccagatgcagctgctgcagaggagcctgggcatcatgcagacagtgaagggcttcttctacgtgtccctgctgctggacatcctgaaggagatcaccggcagcagcctcatccagaagacagacagtgatgaggaggtggccatgctgctggacacagtgcagaaggtgttccagaagatgctggagtgcatcgcccgctccttcaggaagcagcctgaggagggcctgcggctgctgtacagcgtgcagaggcccctgcacgagttcatcacagctgtgcagagccgccacacagacacccctgtgcacagaggagtgctgagcaccctgattgctggccctgtggtggagatcagccaccagctgaggaaggtgtctgatgtggaggagctgaccccacctgagcacctgagtgacctgccccccttcagccgctgcctgattggcatcatcatcaagagcagcaatgtggtgcgctccttcctggatgagctgaaggcctgtgtggccagcaatgacatcgagggcatcgtgtgcctgacagctgctgtgcacatcatcctggtgatcaatgctgggaagcacaagagcagcaaggtgcgggaggtggccgccaccgtgcacaggaagctgaagaccttcatggagatcaccctggaggaggacagcattgaaagaatttag

SEQ ID NO: 100246 - DNA, 3432 bp, Artificial Sequence
  derived and/or modified sequence
atggagaagcgggagaccttcgtgcaggccgtgagcaaggagctggttggagagttcctgcagtttgtgcagttagacaaggaggcttcagaccccttttccttgaatgagctgctggacgagttatcccgcaaacaaaaggaggagctgtggcagcggctgaagaatctgctgactgatgtattattagagtctcccgtggatggatggcaagttgtagaagcacagggcgaggataacatggagactgagcatggctcaaagatgcgaaagtcaatcgaaattatttacgctatcacttcagtaatcctcgcctcagtctcggttataaatgaatcagagaattacgaggccctgctcgaatgcgtgataatcttgaacggcatactgtatgcgctcccagagtcagagaggaagctgcagtccagcatacaggatctgtgcgtcacatggtgggaaaagggcctgcccgctaaagaagataccggaaagactgcctttgtcatgcttttaaggcgcagcctggagacaaagaccggagctgatgtgtgcaggctgtggcggatccatcaggcactttattgtttcgactatgacctggaagaatcaggcgagatcaaggacatgctactggaatgttttattaacatcaattatattaaaaaagaagaggggcgtagatttctcagttgtctctttaactggaacattaacttcattaagatgatccatggaacaataaagaaccaactccagggtttgcagaagagtctcatggtgtacatcgcagagatctattttagggcttggaagaaagcttccgggaaaatcctggaagccattgaaaacgattgcatccaggatttcatgttccatggcattcatctgcccaggcgatcccctgtgcacagcaaggtccgggaagtgctttcttactttcatcaccagaaaaaagtgcgacagggagtggaggaaatgctataccggctgtacaaaccaatcctgtggagaggcctgaaagctagaaattcagaggttaggtcgaacgccgctctactgtttgtggaagccttccccatcagggatcccaatctacatgctattgaaatggattcagaaattcaaaagcagtttgaagagctttacagcttgctggaggatccctacccaatggtccgctccacaggcattctcggggtttgtaagataacaagcaagtattgggaaatgatgcctccaactatcctgattgaccttctgaagaaggttactggagaattagcatttgacaccagctccgcagacgtaagatgttccgtgtttaaatgtctgcctatgatcctggataacaagttgtcccaccctctcttggaacaactgctcccggccctgcgatattctcttcacgataattctgaaaaggttagagtggctttcgtggatatgctcttaaaaattaaagctgtgcgcgcagctaagttctggaaaatttgtcctatggagcatattcttgttcggttggaaaccgattcgaggcctgtttccaggaggctggtcagcctcatctttaatagctttctgccagtcaaccaaccagaggaagtgtggtgtgagaggtgtgtgacactcgtgcaaatgaatcatgcagcggcgagacggttctaccagtatgcccatgagcacacagcatgtactaatattgccaagctgattcatgtcattcggcactgtttgaacgcctgtattcagcgggcggtcagagaaccaccggaagatgaggaggaagaggacggacgtgagaaggaaaacgtgaccgtgctggacaagactcttagtgtcaatgatgtggcttgcatggcaggcctgctggagatcatcgtcatcctttggaagagcatcgacagatcaatggaaaataacaaagaagctaagctgtatacaataaacaaatttgcgtcagtgttgccagaatacctgaaagtcttcaaggatgaccggtgtaagattcctctgtttatgctgatgtcttttatgcccgcttccgcagtccctcccttttcgtgtggcgtcatcagcacactgcgttcccgggaggagggcgctgtggataagtcatactgcacactcttagattgcctgtgtagctggggacaggtcggccacatcctcgagctggtcgacaattggcttcccactgaacacgcgcaggccaaaagcaataccgcgtccaaaggtagagttcaaatccacgacactaggcccgtgaagcctgagttagcccttgtgtatattgaatacttgctgactcatccgaagaatcgcgagtgcctgctgtccgcaccgagaaaaaagctgaatcatctcctaaaagccctcgagacatcgaaggccgatttagaatctctgcttcagacacccggagggaagccaagaggtttttccgaagcagctgcccctagagcctttggattgcactgtcgattgtctatacacctgcagcacaaattttgtagcgaggggaaagtctatctcagcatgctggaagatacgggtttctggctggaatccaagatcctgagtttcattcaggaccaggaagaagattacctaaaacttcaccgcgtgatttatcagcagatcatccagacgtatctgaccgtgtgcaaagacgttgtcatggtgggccttggtgatcaccagtttcagatgcagcttctacagcgcagtctaggcatcatgcagactgtgaaagggttcttctatgtcagtctgttattagatatactaaaagaaataaccggctcctcgctcattcagaagaccgatagtgacgaagaagtcgccatgctgctggatactgttcagaaggtctttcagaaaatgcttgagtgtattgcacgctcctttaggaaacagccagaggaaggtctgcggctgttatacagcgtgcagagaccgcttcatgagttcattacagcagtccagagcagacacacagatacgcctgtccatcgcggagtactaagcactttgattgccggccccgttgttgagatctcccatcagctgagaaaggttagtgatgtggaggagctgacgcctccagagcatcttagcgacctccccccattttctcgctgccttatcgggattatcataaagagcagcaatgtagtgaggtccttcttggacgagttgaaggcgtgcgtcgcttcgaacgacattgaaggcatcgtctgcttaacggccgcagtccacattatcctggttatcaacgcaggtaaacacaaatcttccaaggtgcgcgaggtggctgcgaccgtgcatcgaaagctgaaaactttcatggagatcacactggaggaagacagcattgagaggtttctctatgaatcttcctcgaggaccctgggagaattactcaattcctag

SEQ ID NO: 100247 - DNA, 3432 bp, Artificial Sequence
  derived and/or modified sequence
atggagaagcgggagaccttcgtgcaggccgtgagcaaggagctggttggtgagttcctgcagtttgttcaactcgacaaagaagcctccgatcccttctctctgaacgagcttttagacgagctgtctagaaagcaaaaggaagagctgtggcagcgcctgaaaaatctgctcaccgacgttctgctggagtcgccagtagacggctggcaggttgtggaagcccaaggcgaagacaatatggagaccgagcacggctcgaagatgcggaagagtatcgagatcatctacgccatcaccagtgtcattctagcctccgtgagcgtgatcaacgagagcgagaactacgaggcacttttagaatgtgtcatcattcttaatgggatcctttacgctctgccagagtctgaaaggaaacttcaatcctccatacaggacctctgcgtgacgtggtgggagaaaggcctgcccgcaaaagaagatacaggaaagacagcctttgtgatgttgctaagacggtccctggaaaccaagaccggagctgatgtgtgtagactctggcggattcaccaggcgctgtactgttttgattacgatctggaagagtcaggcgaaattaaagacatgctcctggaatgcttcatcaacattaattatatcaagaaagaagagggccgacgcttcctcagctgtctgttcaactggaacatcaatttcattaaaatgatccatggaacaattaaaaaccaactgcagggactgcagaaatccctgatggtatacatcgccgagatctattttagagcttggaagaaggcttctggcaaaatactggaagccattgagaatgactgtatccaggactttatgtttcacggaatacacttgccaaggcgttcccccgtccacagcaaggttcgagaggtcctgagttactttcatcatcagaagaaggttagacaaggggtggaggagatgctgtaccggctgtataaacctattctctggcgaggcctgaaagcacgcaatagtgaggttagatcgaacgctgccctgctgtttgtggaggccttcccaattagagaccccaacttacacgctatcgagatggacagcgagattcagaaacagttcgaagagctctacagcctcctagaagacccttatccaatggtgcggtcaacaggcatcctgggtgtctgcaaaatcacgtctaaatactgggagatgatgccccctactattctgatcgatctactgaagaaggtcacaggagagctggcattcgacaccagctccgccgacgtccggtgcagtgtgttcaagtgtctgcccatgattctagacaataagctctcacaccctctgcttgagcagctcttacccgcacttagatattccttgcatgataactcagagaaagtccgtgtggcattcgtggatatgctgcttaagatcaaggcagtgcgagcagcgaaattttggaaaatctgcccaatggaacacattctcgtgcgactcgaaactgattctcgacccgtgtcacgcaggctggtgagcctgatatttaatagtttcctgcccgtcaaccagcccgaggaagtttggtgtgaacgctgcgttacactggttcagatgaaccatgccgctgcacgacgtttctaccaatatgcgcatgagcacaccgcgtgcactaacattgccaagctgatccacgtgataaggcattgtttaaacgcatgcatccagcgtgccgtcagagaaccacccgaggacgaggaagaagaggatggcagagaaaaggaaaacgtgacagtgctggataagactctgtccgtgaacgacgtggcatgtatggctgggctgctggaaataattgtgattctttggaagagcattgatcgatcaatggagaacaataaggaggcaaagctgtataccattaacaagttcgcctcggtcttgccagaatacttaaaggtcttcaaagacgatcgatgcaagatcccgctgttcatgctgatgagttttatgcccgcctccgccgtcccgcctttttcatgcggggtcattagcactctgcgcagcagggaagaaggtgccgttgataagagttactgcactctactcgattgcctatgcagctggggacaggtgggacatatccttgagctggtggacaattggctccccaccgaacatgctcaggctaaatctaataccgctagcaaaggacgggtccagatccacgacaccaggcccgttaaaccagaactcgcattggtgtacatagagtacctgttaactcaccctaagaaccgagagtgcctactgagtgccccaaggaagaagttaaatcatctgctgaaagccctggaaacctccaaggcagacctcgaatcactcttgcagacaccaggcggcaaacctcgcgggttcagtgaagccgccgcccctcgcgccttcggcttacattgcagattgtccatccaccttcagcacaagttctgttctgaggggaaggtctatctgagcatgcttgaggatacaggattttggctcgaatccaaaatactttccttcattcaggaccaggaggaagactacctaaagctgcaccgggttatctaccagcagataattcaaacctacctgaccgtctgcaaggacgtggtaatggtcgggttaggcgaccaccagttccagatgcagctcctgcaacggtctctcggcatcatgcagacagtcaagggattcttttatgtgtctctgctgctagacattctgaaagaaattactgggagctcattgatacaaaagaccgatagcgacgaagaagtcgccatgctgttggacaccgtgcaaaaggtgttccagaagatgctggaatgcatcgccagaagtttcagaaaacagcccgaggaggggctacgccttttatattccgtgcaacgcccactacacgagtttatcactgcggtccagtctagacatacagacacccccgttcaccgcggagttctctctaccctcatagccggacccgtggtagaaatttcccaccagctccgaaaggtgtcagacgtcgaagaactgacacctcccgagcacctctccgatttgcccccttttagccggtgcctcatagggatcatcattaagtccagcaacgtggttcggtctttcctcgatgaactgaaggcatgcgttgccagtaacgacattgaggggatcgtgtgcctcacagcagctgttcacattatcctggtcatcaacgcaggaaagcataaatcttctaaggtaagagaagtagcagcgaccgtacacagaaagttaaaaaccttcatggaaataaccctggaggaagattccattgagcggttcctgtatgaatccagctctcgtactttgggtgagctgttgaactcttag

SEQ ID NO: 100248 - DNA, 1716 bp, Artificial Sequence
  derived and/or modified sequence
atggagcacatcctggtgcggctggagaccgacagccggcccgtgtcaagaagattggtgtccctgattttcaatagcttcttaccagtcaatcagcccgaggaagtgtggtgcgaacgttgcgtgactctcgtccaaatgaaccacgccgcagcaaggcgtttctaccagtacgcccacgaacacaccgcatgcacgaatatcgcaaaactgatacacgtgatacgccactgcttaaacgcttgcattcagcgcgctgtgcgggaacctcccgaagatgaagaagaggaggacggacgcgaaaaggaaaacgtgaccgatgacaggtgtaagattccactctttatgcttatgagctttatgcctgcatctgcggtgcccccgttttcctgcggcgtcatcagcacactgagaagccgcgaagagggggcagtggacaagtcttattgtacactactggattgcctctgctcttggggccaggtcggacacattctagagctggtggacaactggttgcccacagagcatgcacaggccaaatctaatactgcctcaaaggggagggtgcagatacacgacaccaggcctgtaaaacccgagttagctctcgtgtatatcgaatacttgcttactcacccaaagaatcgagagtgtcttctctccgcgccaaggaagaagctgaatcacctcctcaaggcccttgaaaccagtaaagccgatttagaatccctccttcaaacgccaggggggaagcctcgaggcttcagtgaggcagcggctcctcgcgcctttggcttgcattgccgattgtcaattcacctacagcataagttttgcagcgaaggaaaagtgtacctatctatgctggaagacacgggattctggctggagagtaagatcctgagtttcatccaagatcaagaagaagactatctgaaacttcatcgagtcatatatcagcagattatccagacttatttgactgtgtgcaaggatgttgtcatggtcgggttgggagatcaccagtttcagatgcagctgctgcaaaggagcctcggtatcatgcaaaccgtgaaagggttcttttacgtgtcattgctgcttgacatcttgaaggagatcaccgggtcctcccttatacaaaaaaccgatagtgacgaagaggtggctatgctgctcgacactgtgcagaaagtgttccaaaagatgttggaatgtatagcccgctcattccgcaagcagcctgaggagggcctgcggctgctctacagcgtgcagcgtccgcttcacgaatttataacagctgtgcaatcgagacatacagacactcccgtacaccgaggcgtgctttcgacactcattgcaggcccagtcgtcgaaatatctcaccagctgcggaaggtttctgatgtcgaggaactaaccccgcccgagcatctgtcagatctgccacccttttctcgttgccttattggcattatcatcaagagtagtaacgtggtgcgctcattcctggacgagctgaaggcatgcgtcgcgtcaaacgatattgagggaatcgtttgcctcacagccgctgtgcacatcatccttgtcattaatgcgggaaaacataagagcagcaaagtgcgcgaagtcgccgcaactgtgcaccggaagctgaaaacttttatggagatcacactggaagaggactctatcgagcggatttag

SEQ ID NO: 100249 - DNA, 3432 bp, Artificial Sequence
  derived and/or modified sequence
atggagaagcgcgagactttcgtacaagccgtctccaaggagctcgttggggagttcctacagttcgtccagctggataaggaagcaagtgacccatttagtctcaatgaactgctggacgagctaagtagaaaacagaaagaggaattgtggcagagactgaagaatctgctgacagacgtcctgcttgaaagccctgtagatggatggcaggttgtggaagcccagggggaagacaatatggaaactgaacacggttccaaaatgcgaaagagcattgaaatcatctatgcaatcactagtgtcatactcgcttctgtctctgtcatcaatgaatcagagaactacgaggcattgctggagtgcgtcatcattctgaatggcatactctatgcacttcctgagtcggaacgaaaactccagagttccattcaggacctgtgtgtgacatggtgggagaaagggctgcccgcaaaagaagataccggcaaaaccgcgttcgttatgctcctgcgacgatctctcgagaccaaaaccggcgctgacgtgtgccggttatggcggattcatcaggccctatactgctttgactacgacctcgaagagtcaggagaaattaaagatatgctcctggagtgttttataaacattaattatataaagaaagaagaaggacgcaggttccttagttgtctttttaattggaacatcaatttcattaagatgatccacggcacgatcaagaatcagctgcagggtctccaaaaatctttgatggtatacatcgccgagatatatttcagggcctggaagaaagcatctgggaaaatcttggaagctattgaaaacgattgtatccaggacttcatgttccacggcatccatttgcccaggcggtctcctgtccactctaaggtcagagaggtgctgagttatttccaccatcagaaaaaggtgagacagggagtggaggagatgttgtaccggctctacaagcccattctgtggagggggctgaaagctcgcaacagtgaggtgcgcagcaatgcagcgctgctgttcgtggaagcattcccgatcagagaccctaatctgcacgctattgaaatggattcagagattcagaagcagtttgaggaactatactcacttctcgaggacccctaccccatggtgcggagtacaggtatccttggcgtctgcaaaattacgtctaaatattgggagatgatgccacctacaatactgattgacctgctgaagaaagtgactggtgagctagcattcgacaccagctctgcagatgtgcggtgctccgtttttaagtgtctacccatgattctcgacaataagctgtcccatcccttgctcgagcagcttttgccagcactgcgctactcactgcacgataacagcgagaaagtgcgagtcgcatttgttgatatgctcctaaaaatcaaagccgtaagggcagccaagttttggaaaatttgccctatggaacatattttggtacgcttagagactgacagtaggcccgtgtcacgtagacttgtctctcttatcttcaactcctttctgcccgtcaaccagcctgaggaagtttggtgtgaacgttgcgttacactggtacagatgaaccatgccgctgcgaggcgcttctatcagtacgcccacgagcatacagcgtgcaccaatattgccaagctgattcacgtcatccgccactgtctcaacgcttgtattcagcgcgctgttagggaacctccagaagatgaggaggaggaggacggccgagaaaaggagaatgttaccgttctcgacaagaccctgtccgtgaacgatgtggcgtgtatggccggtctgctcgagatcatcgtgattttatggaaatctattgacaggtcaatggaaaataataaagaggccaagttatatacgataaacaaatttgccagcgttctccccgaatatctgaaggtcttcaaggacgacagatgcaaaatacctctgtttatgctcatgtctttcatgcccgctagtgccgtacctccttttagctgtggggttatttccaccctcaggagcagagaggaaggcgcagttgacaagtcctattgtactctgctcgactgcttgtgctcctgggggcaggtaggacacatcctggaactggtggacaattggcttccaacagagcacgcccaggcaaagtctaacacagcctctaaggggcgagtccagattcacgatacccgcccagtgaagcccgaactggcccttgtctacatcgaatacctgctcacacaccctaagaatcgggaatgtcttttgtccgccccaagaaaaaagctaaatcacctcctgaaagcacttgaaacctctaaggcggatctggaaagcctgctacaaacacctgggggtaaacccagaggtttttcagaagccgcagcacctcgggctttcggcctccattgtaggcttagcattcacctgcagcataagttctgttccgagggcaaggtttacctatccatgctagaggacaccgggttctggctggaaagcaaaattttgtcctttatccaggaccaagaggaggactacctcaaactgcatcgggttatctatcagcaaattattcagacctatctgacggtatgcaaggacgtggtgatggtcggactcggtgatcatcagtttcagatgcaactgctgcagcgctcactcggcatcatgcagacagtgaaaggctttttctatgtgtcccttctgttggacatattaaaagagattacggggtctagtctcatacagaagacagactctgacgaggaagttgctatgctcctggacacggttcaaaaggtctttcaaaagatgcttgagtgcatcgctcgcagtttcagaaagcagccagaggaaggactgcggttgctgtacagcgtgcagcggccactgcacgaatttataacagcagtacagtcacgacacacagatacgccagtacaccgtggtgtgctctctacactgatagcgggtccagtagtggagataagtcatcaactcagaaaagtgagtgatgtggaagagctgacaccaccagagcacttatccgatctcccgccttttagccgctgtctgataggaatcattatcaagagctctaatgtggtgcgcagcttcctcgacgagctgaaagcttgcgtggccagtaacgatattgagggaatcgtttgcctgacagccgcagtccatatcatcttggtgattaacgccggaaaacacaagtcctcgaaggtgagagaggtcgccgcaacagtgcatcgtaagctgaaaacttttatggagattacacttgaggaagattccattgaacgcttcttatatgaatcttcatcccgtaccttgggtgaactgctaaactcctag

SEQ ID NO: 100250 - DNA, 3432 bp, Artificial Sequence
  derived and/or modified sequence
atggaaaagcgagagacctttgtgcaggcagtcagcaaggaactcgtgggcgagttcctgcagtttgtgcagctggataaggaggcgtcagaccccttcagcctgaacgagctgttggatgaattaagtcggaagcaaaaggaggagctctggcagagactgaaaaatctgctgacagatgtgctcctggagtcaccagtggatggctggcaggttgtggaggcacagggtgaagataatatggaaaccgagcacggatcaaaaatgcgtaaatcaatcgagataatttacgctatcaccagcgtgatccttgcttccgttagcgttatcaacgagtctgagaattacgaagctctgcttgagtgcgtgataatattaaacgggattttgtatgcacttcctgagtccgaacggaaattacagagcagcatacaggatctctgcgtcacatggtgggaaaaaggccttccagctaaggaggatactggcaagactgccttcgttatgttactacggaggtccctggagacaaagacaggggcagatgtgtgcaggttgtggagaatccatcaagccctatattgtttcgattatgatctggaagaaagcggcgagattaaagacatgctgctggagtgcttcatcaacataaattacattaagaaagaggaggggcgaagatttctttcctgtttgtttaactggaacattaactttatcaaaatgatccatgggactattaagaatcagctgcagggccttcagaagtccttgatggtatatatcgctgagatttacttcagagcctggaagaaggctagtggaaagattctggaggccatcgagaacgactgcatccaagatttcatgttccacggaatccacctgccccgacgtagtcccgttcatagtaaagtgagggaggttttgagctactttcatcaccagaagaaggtgcgccagggcgttgaggaaatgctttatagactgtacaaacccatcctgtggcgcggacttaaggcgcgtaattcagaggtgcggtctaatgcagctctgctttttgtggaagcctttccaatccgggacccaaacttgcatgctatcgagatggattcagagattcagaagcaatttgaggagctttacagcttactggaagacccatacccaatggttaggagcactggtattctgggtgtctgtaagattacttctaagtattgggagatgatgccgccaactatcctgatagaccttctgaaaaaagttaccggcgagcttgcctttgatacctcttccgccgacgtgcgttgtagtgtctttaaatgtctcccgatgatccttgataacaaactaagccaccccttgctggagcagctcctccccgctctccggtatagccttcacgacaacagcgaaaaggtgagagtggcatttgtggacatgctcctaaaaatcaaggccgtacgggctgctaaattttggaaaatatgcccaatggaacacatcttagtacgtctcgaaacggactctcggcctgtctcaagacggctggtttcgttaatcttcaacagctttcttcccgtgaaccagccagaagaagtgtggtgcgaaaggtgtgtgaccttagtgcagatgaatcacgctgccgcaaggcggttttaccaatacgcccacgagcacacggcctgtaccaacatagccaagctcatccacgtcatccggcattgtctcaatgcatgtatacagagagcagtgcgggaaccgcctgaggacgaggaagaagaggatggacgagagaaagagaatgtgacagtcttagacaagacattatcggttaacgacgtggcatgtatggcgggtctgctggagattattgtgattctgtggaaaagtatagacaggtccatggagaacaataaggaagctaagctatacacaataaacaaattcgctagtgtcctgccagagtacctaaaggtttttaaggacgaccgctgtaagatccctctctttatgctgatgagttttatgccagccagtgctgtgccccctttcagctgcggcgtgatctccacccttcgctctcgggaggaaggcgcagtcgataaatcttattgcacattacttgactgtctctgctcctgggggcaggtcggtcatatcctcgagctagtcgataattggctgcccacagagcacgcccaagcgaagtcgaataccgcttcgaaggggcgtgtacaaatacacgatactcgcccagtgaagcctgagttggcgttggtgtatatcgagtacctcttaacacatccgaaaaatcgggaatgtctcctctccgcaccccgaaaaaagctgaatcacctcctgaaggccctggagacctccaaggcggacctagagagtctgctacagaccccaggagggaaacctcgcggattttcagaggcggctgctcctagggccttcggtctccactgcagactgagtattcatctgcaacataagttctgtagcgaaggaaaggtgtacctcagcatgctcgaggacaccggtttttggttagaatcaaagatcctctccttcatccaggatcaggaagaggactatcttaaactgcaccgcgttatctaccagcaaattattcaaacctatctcaccgtgtgtaaggatgtcgtcatggtgggcctgggagatcaccagtttcaaatgcaactgttacagaggtccctgggcatcatgcaaacagtgaagggatttttctacgtctccctgctgctggatattctgaaggaaatcactggatcctcccttatccagaagaccgattccgatgaggaagtagccatgctgctggacacggtccagaaagtgttccagaaaatgctggaatgtattgctaggtcctttagaaagcagccagaggaaggcctaagacttctgtattcagtgcagaggcccctgcatgaatttatcacagccgttcaaagccgacacacagatacccccgttcatcggggtgttctcagcacactgatagcgggtccagtagtagaaattagccaccaacttcgcaaagtgagtgatgttgaggagctgacgcctccggagcatttgagcgacttgcccccatttagcaggtgtctcattggcatcatcattaagtcatcaaacgtagtcaggtcatttctggatgagcttaaggcgtgcgtcgcctccaacgacattgaggggatagtctgtctgacagcagctgttcatataatcctcgtgataaatgccggtaaacacaagagttccaaggtgagagaagtggccgctaccgtgcatcgcaagctgaaaactttcatggagattactctggaagaggattccatcgagcgcttcctatatgaatcatcaagccgcaccctgggcgagctgttgaatagctag

SEQ ID NO: 100251 - DNA, 1716 bp, Artificial Sequence
  derived and/or modified sequence
atggagcatatcctcgtccgcctggagactgacagtaggccagtatcacgaagactggtgagccttatcttcaacagctttctgccagtgaatcagcctgaggaggtatggtgcgaacggtgtgtgacactagtgcaaatgaatcatgccgctgccagacggttctaccagtacgcacacgagcatactgcctgtaccaacatcgcgaagctgattcatgtgatcaggcattgtctaaacgcatgcatccagagagccgtgagggaacctccggaagatgaggaagaggaagacgggagagagaaggagaatgtgacggacgatagatgcaagattcctcttttcatgctcatgtcttttatgccagcatcagcggtgcctccatttagctgcggagttatttccaccctgagatcgcgcgaggagggagctgtggataaaagctattgtaccttactggactgtttgtgctcctggggccaggttggtcacatcctggaactagttgataactggctgccaactgagcacgcacaggccaaatcaaacactgcttcgaagggcagagttcaaatacatgacacccgccctgtgaaacctgagttggccctggtctatattgagtatctcttaacacacccaaagaatcgtgagtgtctgcttagcgcccctagaaaaaaactcaatcatctcctgaaagccctcgagacaagcaaagctgatctggagagcctgttgcagacgcctggagggaagcctcgcggatttagcgaagcagcggctcccagagcgtttggactgcactgccggctgtctattcacctccaacacaagttttgcagcgaaggaaaagtctacctgagcatgctggaagacactgggttctggcttgagagcaagatcctgtcatttattcaggatcaggaggaggactacctaaagcttcatcgggtcatctatcagcagatcatccagacctacctgaccgtgtgtaaggatgttgtgatggtcgggttgggcgatcaccaatttcaaatgcagctgctccaacggtctttaggcatcatgcagactgtaaaagggttcttttacgtgtcactcctactcgacatcctgaaggagataactggatcctctctaatccagaagactgattccgatgaagaggtcgcaatgcttttggacaccgtacaaaaggtgtttcagaagatgctagagtgcatcgcaagaagctttaggaaacaaccagaagaggggctgagacttctctattcagtgcagcggcctctccacgaatttatcacagctgtgcagagccggcacacagatacccccgtccataggggtgtgctgagtaccctgatcgcagggccagtggtggagatcagccatcaacttaggaaagtgagcgacgtcgaggaactaactcctccagaacatctatccgacctcccaccctttagcagatgcctgattggtataatcatcaagtcctcaaacgtagtccgctcattccttgatgagctgaaagcctgcgtggccagtaatgatatagaggggatcgtatgcctaactgcagccgtacatattattctggttattaacgccggtaagcataaaagctctaaagttagggaggtagctgccaccgtgcatcggaagcttaaaaccttcatggaaattacccttgaggaggacagtatcgaacggatttag

SEQ ID NO: 100252 - DNA, 3432 bp, Artificial Sequence
  derived and/or modified sequence
atggagaagagagagaccttcgtgcaggccgtgagcaaggagctggtgggcgagttcctgcagttcgtgcagctggacaaggaggccagcgaccccttcagcctgaacgagctgctggacgagctgagcagaaagcagaaggaggagctgtggcagagactgaagaacctgctgaccgacgtgctgctggagagccccgtggacggctggcaggtggtggaggcccagggcgaggacaacatggagaccgagcacggcagcaagatgagaaagagcatcgagatcatctacgccatcaccagcgtgatcctggccagcgtgagcgtgatcaacgagagcgagaactacgaggccctgctggagtgcgtgatcatcctgaacggcatcctgtacgccctgcccgagagcgagagaaagctgcagagcagcatccaggacctgtgcgtgacctggtgggagaagggcctgcccgccaaggaggacaccggcaagaccgccttcgtgatgctgctgagaagaagcctggagaccaagaccggcgccgacgtgtgcagactgtggagaatccaccaggccctgtactgcttcgactacgacctggaggagagcggcgagatcaaggacatgctgctggagtgcttcatcaacatcaactacatcaagaaggaggagggcagaagattcctgagctgcctgttcaactggaacatcaacttcatcaagatgatccacggcaccatcaagaaccagctgcagggcctgcagaagagcctgatggtgtacatcgccgagatctacttcagagcctggaagaaggccagcggcaagatcctggaggccatcgagaacgactgcatccaggacttcatgttccacggcatccacctgcccagaagaagccccgtgcacagcaaggtgagagaggtgctgagctacttccaccaccagaagaaggtgagacagggcgtggaggagatgctgtacagactgtacaagcccatcctgtggagaggcctgaaggccagaaacagcgaggtgagaagcaacgccgccctgctgttcgtggaggccttccccatcagagaccccaacctgcacgccatcgagatggacagcgagatccagaagcagttcgaggagctgtacagcctgctggaggacccctaccccatggtgagaagcaccggcatcctgggcgtgtgcaagatcaccagcaagtactgggagatgatgccccccaccatcctgatcgacctgctgaagaaggtgaccggcgagctggccttcgacaccagcagcgccgacgtgagatgcagcgtgttcaagtgcctgcccatgatcctggacaacaagctgagccaccccctgctggagcagctgctgcccgccctgagatacagcctgcacgacaacagcgagaaggtgagagtggccttcgtggacatgctgctgaagatcaaggccgtgagagccgccaagttctggaagatctgccccatggagcacatcctggtgagactggagaccgacagcagacccgtgagcagaagactggtgagcctgatcttcaacagcttcctgcccgtgaaccagcccgaggaggtgtggtgcgagagatgcgtgaccctggtgcagatgaaccacgccgccgccagaagattctaccagtacgcccacgagcacaccgcctgcaccaacatcgccaagctgatccacgtgatcagacactgcctgaacgcctgcatccagagagccgtgagagagccccccgaggacgaggaggaggaggacggcagagagaaggagaacgtgaccgtgctggacaagaccctgagcgtgaacgacgtggcctgcatggccggcctgctggagatcatcgtgatcctgtggaagagcatcgacagaagcatggagaacaacaaggaggccaagctgtacaccatcaacaagttcgccagcgtgctgcccgagtacctgaaggtgttcaaggacgacagatgcaagatccccctgttcatgctgatgagcttcatgcccgccagcgccgtgccccccttcagctgcggcgtgatcagcaccctgagaagcagagaggagggcgccgtggacaagagctactgcaccctgctggactgcctgtgcagctggggccaggtgggccacatcctggagctggtggacaactggctgcccaccgagcacgcccaggccaagagcaacaccgccagcaagggcagagtgcagatccacgacaccagacccgtgaagcccgagctggccctggtgtacatcgagtacctgctgacccaccccaagaacagagagtgcctgctgagcgcccccagaaagaagctgaaccacctgctgaaggccctggagaccagcaaggccgacctggagagcctgctgcagacccccggcggcaagcccagaggcttcagcgaggccgccgcccccagagccttcggcctgcactgcagactgagcatccacctgcagcacaagttctgcagcgagggcaaggtgtacctgagcatgctggaggacaccggcttctggctggagagcaagatcctgagcttcatccaggaccaggaggaggactacctgaagctgcacagagtgatctaccagcagatcatccagacctacctgaccgtgtgcaaggacgtggtgatggtgggcctgggcgaccaccagttccagatgcagctgctgcagagaagcctgggcatcatgcagaccgtgaagggcttcttctacgtgagcctgctgctggacatcctgaaggagatcaccggcagcagcctgatccagaagaccgacagcgacgaggaggtggccatgctgctggacaccgtgcagaaggtgttccagaagatgctggagtgcatcgccagaagcttcagaaagcagcccgaggagggcctgagactgctgtacagcgtgcagagacccctgcacgagttcatcaccgccgtgcagagcagacacaccgacacccccgtgcacagaggcgtgctgagcaccctgatcgccggccccgtggtggagatcagccaccagctgagaaaggtgagcgacgtggaggagctgaccccccccgagcacctgagcgacctgccccccttcagcagatgcctgatcggcatcatcatcaagagcagcaacgtggtgagaagcttcctggacgagctgaaggcctgcgtggccagcaacgacatcgagggcatcgtgtgcctgaccgccgccgtgcacatcatcctggtgatcaacgccggcaagcacaagagcagcaaggtgagagaggtggccgccaccgtgcacagaaagctgaagaccttcatggagatcaccctggaggaggacagcatcgagagattcctgtacgagagcagcagcagaaccctgggcgagctgctgaacagctag

SEQ ID NO: 100253 - DNA, 1716 bp, Artificial Sequence
  derived and/or modified sequence
atggagcacatcctggtgagactggagaccgacagcagacccgtgagcagaagactggtgagcctgatcttcaacagcttcctgcccgtgaaccagcccgaggaggtgtggtgcgagagatgcgtgaccctggtgcagatgaaccacgccgccgccagaagattctaccagtacgcccacgagcacaccgcctgcaccaacatcgccaagctgatccacgtgatcagacactgcctgaacgcctgcatccagagagccgtgagagagccccccgaggacgaggaggaggaggacggcagagagaaggagaacgtgaccgacgacagatgcaagatccccctgttcatgctgatgagcttcatgcccgccagcgccgtgccccccttcagctgcggcgtgatcagcaccctgagaagcagagaggagggcgccgtggacaagagctactgcaccctgctggactgcctgtgcagctggggccaggtgggccacatcctggagctggtggacaactggctgcccaccgagcacgcccaggccaagagcaacaccgccagcaagggcagagtgcagatccacgacaccagacccgtgaagcccgagctggccctggtgtacatcgagtacctgctgacccaccccaagaacagagagtgcctgctgagcgcccccagaaagaagctgaaccacctgctgaaggccctggagaccagcaaggccgacctggagagcctgctgcagacccccggcggcaagcccagaggcttcagcgaggccgccgcccccagagccttcggcctgcactgcagactgagcatccacctgcagcacaagttctgcagcgagggcaaggtgtacctgagcatgctggaggacaccggcttctggctggagagcaagatcctgagcttcatccaggaccaggaggaggactacctgaagctgcacagagtgatctaccagcagatcatccagacctacctgaccgtgtgcaaggacgtggtgatggtgggcctgggcgaccaccagttccagatgcagctgctgcagagaagcctgggcatcatgcagaccgtgaagggcttcttctacgtgagcctgctgctggacatcctgaaggagatcaccggcagcagcctgatccagaagaccgacagcgacgaggaggtggccatgctgctggacaccgtgcagaaggtgttccagaagatgctggagtgcatcgccagaagcttcagaaagcagcccgaggagggcctgagactgctgtacagcgtgcagagacccctgcacgagttcatcaccgccgtgcagagcagacacaccgacacccccgtgcacagaggcgtgctgagcaccctgatcgccggccccgtggtggagatcagccaccagctgagaaaggtgagcgacgtggaggagctgaccccccccgagcacctgagcgacctgccccccttcagcagatgcctgatcggcatcatcatcaagagcagcaacgtggtgagaagcttcctggacgagctgaaggcctgcgtggccagcaacgacatcgagggcatcgtgtgcctgaccgccgccgtgcacatcatcctggtgatcaacgccggcaagcacaagagcagcaaggtgagagaggtggccgccaccgtgcacagaaagctgaagaccttcatggagatcaccctggaggaggacagcatcgagagaatctag

SEQ ID NO: 100254 - protein, 1156 aa, Artificial Sequence
  derived and/or modified sequence
MEKRETFVQAVSKELVGEFLQFVQLDKEASDPFSLNELLDELSRKQKEELWQRLKNLLTDVLLESPVDGWQVVEAQGEDNMETEHGSKMRKSIEIIYAITSVILASVSVINESENYEALLECVIILNGILYALPESERKLQSSIQDLCVTWWEKGLPAKEDTGKTAFVMLLRRSLETKTGADVCRLWRIHQALYCFDYDLEESGEIKDMLLECFININYIKKEEGRRFLSCLFNWNINFIKMIHGTIKNQLQGLQKSLMVYIAEIYFRAWKKASGKILEAIENDCIQDFMFHGIHLPRRSPVHSKVREVLSYFHHQKKVRQGVEEMLYRLYKPILWRGLKARNSEVRSNAALLFVEAFPIRDPNLHAIEMDSEIQKQFEELYSLLEDPYPMVRSTGILGVCKITSKYWEMMPPTILIDLLKKVTGELAFDTSSADVRCSVFKCLPMILDNKLSHPLLEQLLPALRYSLHDNSEKVRVAFVDMLLKIKAVRAAKFWKICPMEHILVRLETDSRPVSRRLVSLIFNSFLPVNQPEEVWCERCVTLVQMNHAAARRFYQYAHEHTACTNIAKLIHVIRHCLNACIQRAVREPPEDEEEEDGREKENVTVLDKTLSVNDVACMAGLLEIIVILWKSIDRSMENNKEAKLYTINKFASVLPEYLKVFKDDRCKIPLFMLMSFMPASAVPPFSCGVISTLRSREEGAVDKSYCTLLDCLCSWGQVGHILELVDNWLPTEHAQAKSNTASKGRVQIHDTRPVKPELALVYIEYLLTHPKNRECLLSAPRKKLNHLLKALETSKADLESLLQTPGGKPRGFSEAAAPRAFGLHCRLSIHLQHKFCSEGKVYLSMLEDTGFWLESKILSFIQDQEEDYLKLHRVIYQQIIQTYLTVCKDVVMVGLGDHQFQMQLLQRSLGIMQTVKGFFYVSLLLDILKEITGSSLIQKTDSDEEVAMLLDTVQKVFQKMLECIARSFRKQPEEGLRLLYSVQRPLHEFITAVQSRHTDTPVHRGVLSTLIAGPVVEISHQLRKVSDVEELTPPEHLSDLPPFSRCLIGIIIKSSNVVRSFLDELKACVASNDIEGIVCLTAAVHIILVINAGKHKSSKVREVAATVHRKLKTFMEITLEEDSIERYEDLLCCPGWALTPGLLDSIYPSASVPIG

SEQ ID NO: 100255 - DNA, 3471 bp, Artificial Sequence
  derived and/or modified sequence
atggagaaaagagagactttcgtacaagctgtgtcaaaggaacttgtgggagagttcttacaattcgtgcagttagataaggaagcatctgatcccttcagtttgaatgagctcttagatgagctgtcaaggaaacagaaggaagagctatggcagcggttaaaaaatctgctgactgatgtgctcttagagtctcccgtcgatggttggcaggtggtggaggcccagggcgaagacaacatggagactgaacacgggtccaaaatgcgcaagtcaatcgaaatcatttacgctattactagcgtgatcttggcctctgtgagtgtcatcaacgagagcgagaactatgaggcgctcttagagtgtgtgatcatcctgaatggaattctttatgcacttcctgaatcagaacgcaaattacagtcttcgatacaggacctgtgcgtgacatggtgggagaaggggttgcctgcaaaagaggacacagggaagaccgctttcgtaatgctcttgagacgcagtctggaaacgaaaacaggagctgacgtgtgccgcctctggaggattcaccaggccctttactgtttcgactatgatctggaagagagcggagagattaaggatatgctcctggagtgtttcattaatatcaattacattaagaaggaggaagggcggcgtttcctcagttgcctgtttaattggaacatcaatttcatcaagatgattcacggcactattaagaaccagctgcaggggctgcagaaatcgcttatggtttacatcgcagagatttatttccgtgcttggaagaaggcctctgggaagatcctggaggcaattgaaaacgattgtatccaggattttatgtttcatggaatccatctcccacgcagatccccggtgcacagtaaggtgagggaagttctgagctattttcaccatcagaaaaaagtcaggcagggagtcgaggagatgttatatcgactgtataagcccatcctgtggcgcgggctgaaagcacgaaattcagaagttaggtccaacgctgcgctcttgttcgtggaagccttcccaatcagggatccaaatttacatgctattgaaatggatagcgagatacagaagcagtttgaggaactgtatagcctgctcgaagacccctacccgatggtgcggtccacaggcattctaggtgtctgtaaaatcacctctaagtactgggagatgatgccccctactattctcatcgaccttctgaagaaggttacaggggagctggcattcgatacaagcagcgctgacgtgagatgctctgtgttcaagtgcctgcctatgattttggacaataaattgtcgcatccattgttagaacagttgctgccggccctaaggtactccctgcatgataattccgagaaggttcgggttgccttcgtagatatgctcctgaagatcaaggccgtaagggccgcaaagttttggaagatttgccctatggaacacatcctggtgaggcttgaaaccgatagccgccccgtatcccgccgacttgtgagcttaatttttaattccttccttccagtaaaccaaccggaagaggtttggtgcgaaagatgtgtcaccctggtgcagatgaaccatgcggcggctcgtcgattctaccagtacgcccacgaacatacggcatgcacaaatatcgccaaactcatacatgtaatccgtcattgtctgaatgcctgcatccagcgagcagtgagggagccaccagaagatgaagaggaggaagatggtcgagaaaaggagaatgttactgtcttggataagaccctcagcgtgaacgatgtcgcatgtatggccgggctgttagaaattatagtgattctctggaagtctattgaccggtcaatggagaacaacaaggaagcaaagctgtacactatcaataagtttgcctccgtgctgcctgagtacctaaaagtcttcaaggacgatcggtgcaagattcctctcttcatgctcatgtctttcatgcccgcgagcgcagtcccacctttcagttgcggggtgatttctactcttaggtcccgcgaagagggggccgttgataagtcttattgcacacttctcgattgtctgtgctcttggggacaggtgggtcacatcctggagcttgtggacaattggttgcctactgaacacgcacaagcaaaatctaatactgcgtcaaaaggtagggtccagattcatgatacacggcctgtgaagccagagctagctttagtgtacatcgagtacttgctgactcatcccaagaaccgcgaatgtttgcttagcgcacccagaaaaaaactgaatcacctgctcaaggctctcgaaacctcgaaggccgacctggagtccttgctgcagactcctggaggcaaacctcgaggcttctcagaggccgcagcacctcgggcctttggccttcactgcagactgtccattcacctgcagcacaaattctgtagtgaaggtaaagtctacctgtctatgctggaagacacaggcttctggctagagtcaaagattctcagctttatccaagatcaggaggaggattacttgaaactgcaccgtgtgatttatcagcaaattattcaaacttatttgaccgtgtgcaaagatgttgtaatggtgggtcttggagaccatcaattccaaatgcagcttctgcaaaggtcactcggcatcatgcagacagtgaagggctttttttatgtttcccttctactggacatccttaaagagatcactggttcaagtttgattcagaaaaccgactcagacgaggaggtcgctatgcttcttgataccgttcagaaggtgtttcagaaaatgctcgaatgtatagcccgtagcttcaggaaacagccggaagaggggctccgactcttgtatagcgtacagcgacctctgcatgagttcattactgccgttcaatctcgtcatactgacactcccgtacacagaggcgtcttaagcacgctgatcgcaggccccgtagttgagatatctcatcagctgcgcaaggttagtgatgtggaagaactcactccacctgagcacctgtccgatctgccccccttttccagatgtctcataggtatcataattaagagtagcaatgttgtgagatcatttctagacgagttgaaggcttgtgttgcatctaacgatatcgaagggatcgtgtgcctcacagcagctgtacatattatccttgtgataaacgcgggaaagcataagagctccaaagtcagggaagtcgcagcaaccgtccacaggaaattaaagaccttcatggaaatcacactggaagaggatagtatcgagcgatatgaggatctgctgtgctgtccaggttgggccctaacaccaggcctattggatagcatttatcccagcgctagcgtgccaatcgggtag

SEQ ID NO: 100256 - DNA, 3471 bp, Artificial Sequence
  derived and/or modified sequence
atggagaagcgtgagacgttcgtgcaggctgttagcaaggagctggtaggcgagttcttgcagtttgtccagttggacaaggaagcctcagatccattttctctgaacgaactactggacgaactgagtaggaaacagaaagaagagctctggcaaagattaaagaatttattaaccgacgtgctgctggaaagccccgtggatggatggcaagtggtggaggcgcagggagaggacaatatggagaccgaacatgggtccaagatgagaaaaagcatagaaatcatctatgccatcacaagtgtcattctggcctcggtatccgtaatcaatgaatctgagaattacgaagccctgctggaatgcgtaatcatccttaatgggatcctttacgctttgcctgaaagtgaacgaaaattgcagagtagtattcaggatctgtgtgtcacatggtgggaaaagggtctcccggccaaagaagacactggcaaaactgccttcgttatgctactgaggcgtagtctggagaccaaaaccggtgccgacgtttgtcgcctgtggcgcatacaccaggcactgtactgtttcgactatgatctggaggagtccggagagatcaaggacatgctcctggagtgtttcataaacatcaattacatcaagaaagaagaaggtcgtcgatttctgagctgtctgttcaattggaacatcaattttattaaaatgatccatggcacaattaagaaccaactgcagggactacagaagagccttatggtctacatcgcggagatatacttccgagcttggaagaaagccagcgggaagatactggaggcgatcgagaacgattgtatccaggactttatgttccacggcatccatttacctaggaggtctccagttcactctaaggtgcgagaagttctgagctattttcaccaccagaagaaggtgcgccaaggtgtggaggagatgctgtatagactatacaaacccatactgtggcgtggactcaaggccagaaactcagaagtcagatctaatgccgccctgctgttcgtggaggcttttccaatcagggatcctaacctgcacgctattgaaatggactccgaaatccagaaacaattcgaggaattgtactccctcctggaagatccatatcccatggtcaggagcactggtattctgggagtgtgcaaaatcacgagtaagtactgggagatgatgcctcccacaatcttgatcgatttactaaagaaggttacaggagaactggctttcgatacctccagcgcagacgtccgatgctctgtctttaaatgcctccctatgatcttagacaacaaactgtctcatccattgctggagcagctgctgcccgcacttcgatattcattacatgataactcggaaaaggtacgtgtggcttttgtggacatgctcttaaagattaaggctgtgcgcgctgcgaagttttggaaaatctgccctatggagcatatcctggtgagactggaaaccgactcccgccccgtatctcggaggctggtgagcctgatctttaacagcttcctccctgtcaaccagcccgaggaagtctggtgcgaacgctgcgttacgctggttcagatgaaccatgccgccgcaaggagattttatcagtacgctcacgagcatacagcctgtactaacattgctaagctcatacacgtgattaggcactgcttgaacgcatgcatccagcgggccgtccgggaaccaccggaagacgaggaggaagaggacggcagggaaaaggagaatgtgactgtccttgacaagacgctcagcgttaacgatgtcgcttgcatggcaggattgctggagatcattgtcatcctgtggaagagcatagatcgttctatggaaaacaacaaggaggcaaagctgtacaccatcaataaattcgcctctgtcctgcctgagtacttgaaggtattcaaggacgaccgttgtaaaatccccctgttcatgctaatgtcattcatgcccgcgagcgctgtccctcccttcagctgcggagtgatatcaaccttaaggagtcgcgaggaaggggccgttgacaagagctactgtactctcctcgactgcttatgttcatggggccaggtgggccatatcttggagctggtggacaactggctcccaacagaacatgcccaggcaaagagcaacactgcgtccaaaggacgcgttcagatccacgacactcgccctgtgaagcctgagcttgccctggtgtatattgagtatctcctgactcacccaaagaatcgggagtgtctattaagtgcacctagaaagaagctcaatcatctcctcaaggctctggagacttctaaggccgatctggaaagcctgctgcaaactccgggaggcaaaccgcgcgggttttctgaagcagctgctccaagagcattcgggcttcattgccggctcagtatccatctgcaacataagttctgtagcgaaggcaaagtgtacctctccatgctggaagacactggtttttggctcgaatccaaaattctctcatttatccaggaccaggaggaagattatcttaagcttcacagggtgatctatcaacagattatccaaacatatctgacagtctgtaaagatgtagtaatggtagggctgggcgatcaccagtttcagatgcagctgttacagcgcagtctggggatcatgcagaccgtgaagggctttttttacgtcagcctactgctggacatacttaaagagattaccggcagttctcttatacagaaaaccgattccgatgaggaggttgctatgctcctcgacaccgtgcagaaggtcttccaaaagatgctggagtgcatcgcccgatcgttccggaagcagccagaggaagggttgcggttgctgtacagtgttcagagacctctccacgagtttatcacagctgtacagagcagacacaccgataccccggttcaccggggggtgctttctacattaatcgcaggccccgtcgtagaaatttcccaccagctcagaaaggtgtctgacgttgaggaactaacacctccagaacatctgtcagatctgcctcccttcagccggtgtttaatcggaattataatcaaatcaagcaacgtggtgcgcagtttcctggatgagctgaaagcgtgtgttgcttccaatgacatcgaagggatagtttgcttaactgcagccgtgcacatcattctggtgatcaacgccggaaagcataagagctcaaaggtgcgcgaagtcgccgccaccgtgcaccgcaagctcaagactttcatggagattactttggaagaggatagcatcgaaagatatgaggatctgctgtgctgtcccggctgggctctcaccccaggtctgctggacagtatctacccgtccgcctctgtaccaatcggctag

SEQ ID NO: 100257 - DNA, 5253 bp, Artificial Sequence
  derived and/or modified sequence
ggggcccgtctggggcgccggcgggtgcgtttgaatctggtccgagcgcgggaaacggcgggtccccgagcccagggttacaaaataaatgccatttgaacagtgccatctgtcatggaaaaacgtgagacgtttgtacaagccgtgtctaaggagctggttggagagtttttgcaatttgttcaacttgataaagaggcctctgatcctttcagcctaaatgaattactagatgaattatcaaggaaacagaaagaagaattatggcaaaggctgaagaatttattgacagatgtgttgttagaaagcccagtggatgggtggcaggtagtggaagcccagggtgaagacaatatggaaaccgaacatggctcaaaaatgagaaaaagcatagaaataatttatgcaattacatctgtgattcttgcttctgtgtctgtaataaatgaaagtgagaactacgaagccctactggaatgtgttattatattaaatggtattttatatgcattacctgagtctgaacgaaaactacagagttctattcaggatttgtgtgttacctggtgggagaaaggcctgcctgccaaggaagacacaggaaagacagcctttgtcatgttactaaggaggagtctggagactaagacaggtgcagacgtatgtcggctttggcgtatccatcaagctttatattgctttgattatgatttggaggaaagtggagaaattaaagatatgttacttgagtgcttcataaatattaattatatcaagaaagaagagggaagaagatttcttagttgtctcttcaactggaatatcaacttcatcaaaatgatccacgggaccattaaaaaccagttacagggattacaaaagtctttgatggtatacattgcagaaatttatttcagagcttggaaaaaggcttcagggaaaatactggaggcgattgaaaatgattgcatccaggacttcatgttccacgggatacaccttccgaggaggtctccagtgcattccaaagtgcgggaggttctgagttactttcaccatcaaaagaaagttcggcagggagtggaagagatgctttatagattatataagcccatcctttggagaggattaaaggccagaaactctgaagttcgatcaaatgctgcattgttgtttgttgaagcatttcctattagggatccaaaccttcatgctattgaaatggatagtgaaatccagaaacagtttgaagagctctatagccttttagaagatccttacccgatggtccgttccacagggatccttggtgtttgtaaaataacttctaagtactgggaaatgatgcccccgaccattcttattgacctcctgaagaaggtgactggggaactggcatttgacacgagctcagctgatgttcgttgttctgtctttaagtgtctgccaatgattttggacaacaaactgagccacccattgttagagcagctccttccagctctcagatacagtctccacgacaattcggagaaagtgagggtagcttttgtggacatgctgttgaagatcaaagctgtgagggctgctaagttttggaaaatatgtcccatggagcacattctggttcgtctggaaactgattctcgacctgtgtctcggcgcctggtgagcctcatctttaattctttcctgcctgtgaatcagccggaggaggtctggtgcgagcgctgtgtcaccctggtgcagatgaaccacgccgctgccaggaggttctatcagtacgcccacgaacacaccgcctgcaccaacatagcaaagctgattcacgttattcgtcattgcttaaatgcctgtatccagagggcagtgagagagcctccagaggacgaggaggaagaggacggaagggagaaggagaatgtgactgttctggacaaaacactgtcagtaaacgatgttgcatgcatggcaggtttactagaaatcattgtgattctctggaaaagtattgacagaagtatggaaaataataaagaggccaaactttacacgattaacaagtttgcctctgtgcttccagagtatctgaaagtatttaaggatgatcgctgcaagatccctttattcatgctaatgtcctttatgccggcctctgctgtccccccattcagctgtggtgtgatttccacgctgagaagccgggaggagggcgctgtggacaagagctactgcactttgttggattgcctctgctcctgggggcaggtggggcacattctggagcttgttgacaactggctgcccacagagcatgcccaggccaagagcaacacagcttctaaaggtagggtgcagatccatgacacacgcccagtcaaacctgaattggcattggtctacattgagtatctgctgactcatccaaagaaccgcgagtgcttgctctctgctcctcggaagaaacttaaccatcttttgaaagcccttgaaacgtcaaaggcagatctggagtcacttctgcagacaccgggtgggaagcctcgtggcttcagtgaagcagctgccccgcgagcctttggtctccactgtcgcctgagcatccatcttcagcacaagttctgctcagaaggaaaggtgtatttgtccatgttggaagacactggcttttggttagaaagcaaaattttatcttttattcaagatcaagaagaagactacctgaagcttcatagggtcatttatcagcaaattatccagacctacctgactgtgtgtaaagatgttgttatggtaggccttggtgaccatcagtttcagatgcaactcttacagcggagtcttggaatcatgcaaacagtgaagggatttttttatgtttcattacttcttgacattctgaaagagataactggaagttccttgattcagaaaacagattcagatgaagaagttgcaatgctgttggacacagtccagaaagtatttcagaaaatgttggaatgtattgcacggagcttcaggaagcagccggaagaaggcctgcggctgctttattctgttcagaggcctcttcatgagttcattactgctgttcagtctcggcacacagacacccctgtgcaccggggtgtactttctactctgatcgctgggcctgtggttgagataagtcaccagctacggaaggtttctgacgtagaagagcttacccctccagagcatctttctgatcttccaccattttcaaggtgtttaataggaataataataaagtcttcgaatgtggtcaggtcatttttggatgaattaaaggcatgtgtggcttctaatgatattgaaggcattgtgtgcctcacggctgctgtgcatattatcctggttattaatgcaggtaaacataaaagctcaaaagtgagggaggttgcagccactgttcacagaaaactaaagacattcatggaaattactttggaagaggatagcattgaaagatatgaggacttgctgtgttgcccaggctgggctctaactcctggactcctggactcaatctatccttctgcctcagtcccaattggctaggactgcaggcacacaccaccagacccagctaatgtaatttctatctatatgtgtctttatatttaaagtggtttttttatagacagtatataaatgggtcatgttttttgatcttctctgacaatctgtcttaaaattggtgcatatgtaccatattcaaagtgattattgatatagttggattaatatccaccatatttgttattgtcttctatttgttccccttgttatttgttcctatttctgtcttccactccttttctgtcttttgtggttttaactgaacattttatgatgccgttttctttcctagcatatcagttatacttttttttttttaaacctttcttagtggtttctttagagttggaatttttatttgtttttatctttcttagtggttgctttagagttggagttttcatttataactaatccacgtttgctttcagatgacactataccactttgcaggtagggtggtatataataacaaaataatcctaatccttgcctctcgttccttgtatcattgctgtcattcattttgctaaggtataagcagacataagcatacataattgaatatattgttgctattattattttgaacaaactacatcttaggtcatttaagaataagaaaaataaaagtttttatttaccttcacttactccttctttgatgcttctcctttgtttgtgttgatccaaattctgacctatattcttttccttccctccagagaacttcttttaatgcttctttcaaggcatgtctactggcaactaattctcttaattttggtttgtcagagagtcttttacttctactttatttctttgcagggataatgttatgtagtttataattctagttgatgaatttttttctctctgtactttatttaatttattattattattttttgagacagagtcttgctctgttgcctagggtggaacgcagtggtgtgatctcagttcactgcaacctctgcctcctaagttcaaacgattcttgtacctcagcctgctgagtagctggtatacaggcacatcgccgccacacccagctcatttttgtattagtggagacagggcttcaccatgttgcccaggctggtctcgaattcttgatctcaagtgatctactcgcctcagcttctcaaattgctgggattactccccgtgcccggccactctctgtactttaaacatttcgctatactctcttcttggctcgtgtagtatctgagaaataggatataattcttttttgctcctcagtagataaggtgtatttttccctatctggtttctttcaatactttttctttgtttgatttttctgtaggttgaatatgatatgcctaggtgtagttttcttttcttttttttttttttttttggcatttattctattcagtattctatgagcttcctggataaattctcagttattattgtctgaatatttcttctgttcctttctctcttctgaaattcttattatacatgttaacaccttttacagttgtctcacaggtcttggatatttcattctatcaaaacagctgcatttttgaattctgtttgctaatattttatttgagaatgtttgcattaggtttgaaataagattaaatggttgttggttgttttgtt

SEQ ID NO: 100258 - DNA, 3606 bp, Artificial Sequence
  derived and/or modified sequence
gaatctggtccgagcgcgggaaacggcgggtccccgagcccagtaccagacctcctgtgcgaagagtaacctgctcttcggactgataactggatgggttacaaaataaatgccatttgaacagtgccatctgtcatggaaaaacgtgagacgtttgtacaagccgtgtctaaggagctggttggagagtttttgcaatttgttcaacttgataaagaggcctctgatcctttcagcctaaatgaattactagatgaattatcaaggaaacagaaagaagaattatggcaaaggctgaagaatttattgacagatgtgttgttagaaagcccagtggatgggtggcaggtagtggaagcccagggtgaagacaatatggaaaccgaacatggctcaaaaatgagaaaaagcatagaaataatttatgcaattacatctgtgattcttgcttctgtgtctgtaataaatgaaagtgagaactacgaagccctactggaatgtgttattatattaaatggtattttatatgcattacctgagtctgaacgaaaactacagagttctattcaggatttgtgtgttacctggtgggagaaaggcctgcctgccaaggaagacacaggaaagacagcctttgtcatgttactaaggaggagtctggagactaagacaggtgcagacgtatgtcggctttggcgtatccatcaagctttatattgctttgattatgatttggaggaaagtggagaaattaaagatatgttacttgagtgcttcataaatattaattatatcaagaaagaagagggaagaagatttcttagttgtctcttcaactggaatatcaacttcatcaaaatgatccacgggaccattaaaaaccagttacagggattacaaaagtctttgatggtatacattgcagaaatttatttcagagcttggaaaaaggcttcagggaaaatactggaggcgattgaaaatgattgcatccaggacttcatgttccacgggatacaccttccgaggaggtctccagtgcattccaaagtgcgggaggttctgagttactttcaccatcaaaagaaagttcggcagggagtggaagagatgctttatagattatataagcccatcctttggagaggattaaaggccagaaactctgaagttcgatcaaatgctgcattgttgtttgttgaagcatttcctattagggatccaaaccttcatgctattgaaatggatagtgaaatccagaaacagtttgaagagctctatagccttttagaagatccttacccgatggtccgttccacagggatccttggtgtttgtaaaataacttctaagtactgggaaatgatgcccccgaccattcttattgacctcctgaagaaggtgactggggaactggcatttgacacgagctcagctgatgttcgttgttctgtctttaagtgtctgccaatgattttggacaacaaactgagccacccattgttagagcagctccttccagctctcagatacagtctccacgacaattcggagaaagtgagggtagcttttgtggacatgctgttgaagatcaaagctgtgagggctgctaagttttggaaaatatgtcccatggagcacattctggttcgtctggaaactgattctcgacctgtgtctcggcgcctggtgagcctcatctttaattctttcctgcctgtgaatcagccggaggaggtctggtgcgagcgctgtgtcaccctggtgcagatgaaccacgccgctgccaggaggttctatcagtacgcccacgaacacaccgcctgcaccaacatagcaaagctgattcacgttattcgtcattgcttaaatgcctgtatccagagggcagtgagagagcctccagaggacgaggaggaagaggacggaagggagaaggagaatgtgactgttctggacaaaacactgtcagtaaacgatgttgcatgcatggcaggtttactagaaatcattgtgattctctggaaaagtattgacagaagtatggaaaataataaagaggccaaactttacacgattaacaagtttgcctctgtgcttccagagtatctgaaagtatttaaggatgatcgctgcaagatccctttattcatgctaatgtcctttatgccggcctctgctgtccccccattcagctgtggtgtgatttccacgctgagaagccgggaggagggcgctgtggacaagagctactgcactttgttggattgcctctgctcctgggggcaggtggggcacattctggagcttgttgacaactggctgcccacagagcatgcccaggccaagagcaacacagcttctaaaggtagggtgcagatccatgacacacgcccagtcaaacctgaattggcattggtctacattgagtatctgctgactcatccaaagaaccgcgagtgcttgctctctgctcctcggaagaaacttaaccatcttttgaaagcccttgaaacgtcaaaggcagatctggagtcacttctgcagacaccgggtgggaagcctcgtggcttcagtgaagcagctgccccgcgagcctttggtctccactgtcgcctgagcatccatcttcagcacaagttctgctcagaaggaaaggtgtatttgtccatgttggaagacactggcttttggttagaaagcaaaattttatcttttattcaagatcaagaagaagactacctgaagcttcatagggtcatttatcagcaaattatccagacctacctgactgtgtgtaaagatgttgttatggtaggccttggtgaccatcagtttcagatgcaactcttacagcggagtcttggaatcatgcaaacagtgaagggatttttttatgtttcattacttcttgacattctgaaagagataactggaagttccttgattcagaaaacagattcagatgaagaagttgcaatgctgttggacacagtccagaaagtatttcagaaaatgttggaatgtattgcacggagcttcaggaagcagccggaagaaggcctgcggctgctttattctgttcagaggcctcttcatgagttcattactgctgttcagtctcggcacacagacacccctgtgcaccggggtgtactttctactctgatcgctgggcctgtggttgagataagtcaccagctacggaaggtttctgacgtagaagagcttacccctccagagcatctttctgatcttccaccattttcaaggtgtttaataggaataataataaagtcttcgaatgtggtcaggtcatttttggatgaattaaaggcatgtgtggcttctaatgatattgaaggcattgtgtgcctcacggctgctgtgcatattatcctggttattaatgcaggtaaacataaaagctcaaaagtgagggaggttgcagccactgttcacagaaaactaaagacattcatggaaattactttggaagaggatagcattgaaagatatgaggacttgctgtgttgcccaggctgggctctaactcctggactcctggactcaatctatccttctgcctcagtcccaattggctag

SEQ ID NO: 100259 - DNA, 2276 bp, Artificial Sequence
  derived and/or modified sequence
gcacagttttggaaaatatgtcccatggagcacattctggttcgtctggaaactgattctcgacctgtgtctcggcgcctggtgagcctcatctttaattctttcctgcctgtgaatcagccggaggaggtctggtgcgagcgctgtgtcaccctggtgcagatgaaccacgccgctgccaggaggttctatcagtacgcccacgaacacaccgcctgcaccaacatagcaaagctgattcacgttattcgtcattgcttaaatgcctgtatccagagggcagtgagagagcctccagaggacgaggaggaagaggacggaagggagaaggagaatgtgactgatgatcgctgcaagatccctttattcatgctaatgtcctttatgccggcctctgctgtccccccattcagctgtggtgtgatttccacgctgagaagccgggaggagggcgctgtggacaagagctactgcactttgttggattgcctctgctcctgggggcaggtggggcacattctggagcttgttgacaactggctgcccacagagcatgcccaggccaagagcaacacagcttctaaaggtagggtgcagatccatgacacacgcccagtcaaacctgaattggcattggtctacattgagtatctgctgactcatccaaagaaccgcgagtgcttgctctctgctcctcggaagaaacttaaccatcttttgaaagcccttgaaacgtcaaaggcagatctggagtcacttctgcagacaccgggtgggaagcctcgtggcttcagtgaagcagctgccccgcgagcctttggtctccactgtcgcctgagcatccatcttcagcacaagttctgctcagaaggaaaggtgtatttgtccatgttggaagacactggcttttggttagaaagcaaaattttatcttttattcaagatcaagaagaagactacctgaagcttcatagggtcatttatcagcaaattatccagacctacctgactgtgtgtaaagatgttgttatggtaggccttggtgaccatcagtttcagatgcaactcttacagcggagtcttggaatcatgcaaacagtgaagggatttttttatgtttcattacttcttgacattctgaaagagataactggaagttccttgattcagaaaacagattcagatgaagaagttgcaatgctgttggacacagtccagaaagtatttcagaaaatgttggaatgtattgcacggagcttcaggaagcagccggaagaaggcctgcggctgctttattctgttcagaggcctcttcatgagttcattactgctgttcagtctcggcacacagacacccctgtgcaccggggtgtactttctactctgatcgctgggcctgtggttgagataagtcaccagctacggaaggtttctgacgtagaagagcttacccctccagagcatctttctgatcttccaccattttcaaggtgtttaataggaataataataaagtcttcgaatgtggtcaggtcatttttggatgaattaaaggcatgtgtggcttctaatgatattgaaggcattgtgtgcctcacggctgctgtgcatattatcctggttattaatgcaggtaaacataaaagctcaaaagtgagggaggttgcagccactgttcacagaaaactaaagacattcatggaaattactttggaagaggatagcattgaaaggatatgaggacttgctgtgttgcccaggctgggctctaactcctggactcctggactcaatctatccttctgcctcagtcccaattggctaggactgcaggcacacaccaccagacccagctaatgtaatttctatctatatgtgtctttatatttaaagtggtttttttatagacagtatataaatgggtcatgttttttgatcttctctgacaatctgtcttaaaattggtgcatatgtaccatattcaaagtgattattgatatagttggattaatatccaccatatttgttattgtcttctatttgttccccttgttatttgttcctatttctgtcttccactccttttctgtcttttgtggttttaactgaacattttatgatgccgttttctttcctagcatatcagttatacttttttttttttaaacctttcttagtggtttctttagagttggaatttttatttgtttttatctttcttagtggttgctttagagttggagttttcatttataactaatccacgtttgctttca

SEQ ID NO: 100260 - DNA, 3471 bp, Artificial Sequence
  derived and/or modified sequence
atggagaagcgggagacctttgtgcaggccgtgtccaaggagctggtgggggagttcctgcagtttgtgcagctggacaaggaggccagtgaccccttcagcctgaatgagctgctggatgagctgagcaggaagcagaaggaggagctgtggcagaggctgaagaacctgctgacagatgtgctgctggagagccctgtggatggctggcaggtggtggaggcccagggcgaggacaacatggagacagaacatggcagcaagatgaggaagagcattgagatcatctatgccatcaccagcgtcatcctggcctctgtgtctgtcatcaatgaaagtgagaactatgaggccctgctggagtgtgtgatcatcctgaatggcatcctgtatgccctgcctgagagcgagaggaagctgcagagcagcatccaggacctgtgtgtgacctggtgggagaagggcctgcctgccaaggaggacaccgggaagacagcctttgtgatgctgctgcggcgcagcctggagaccaagacaggagcagatgtgtgccgcctgtggaggatccaccaggccctgtactgctttgattatgacctggaggagagcggggagatcaaggacatgctgctggagtgcttcatcaacatcaactacatcaagaaggaggagggccgccgcttcctgagctgcctcttcaactggaacatcaacttcatcaagatgatccacggcaccatcaagaaccagctgcagggcctgcagaagagcctgatggtgtacatcgccgagatctacttccgggcctggaagaaggccagcggcaagatcctggaggccattgaaaatgactgcatccaggacttcatgttccacggcatccacctgccccggcgcagccctgtgcacagcaaggtgcgggaggtgctgagctacttccaccaccagaagaaggtgcggcagggcgtggaggagatgctgtaccgcctgtacaagcccatcctgtggaggggcctgaaggccaggaacagcgaggtgcgcagcaatgctgccctgctgtttgtggaggccttccccatccgggaccccaacctgcacgccatcgagatggacagcgagatccagaagcagtttgaggagctgtacagcctgctggaggacccctaccccatggtgcgcagcacaggcatcctgggcgtgtgcaagatcaccagcaagtactgggagatgatgccacccaccatcctgattgacctgctgaagaaggtgactggagagctggcctttgacaccagcagcgcagatgtgcgctgcagcgtcttcaagtgcctgcccatgatcctggacaacaagctgagccaccccctgctggagcagctgctgcctgccctgcgctacagcctgcatgacaacagcgagaaggtgcgggtggcctttgtggacatgctgctgaagatcaaggctgtgcgggccgccaagttctggaagatctgccccatggagcacatcctggtgcggctggagacagacagcaggcctgtgtcccggcggctggtgtccctcatcttcaacagcttcctgcctgtgaaccagcctgaggaggtgtggtgtgagcgctgtgtgaccctggtgcagatgaaccacgccgccgcccggcgcttctaccagtatgcccacgagcacacagcctgcaccaacatcgccaagctgatccacgtgatccgccactgcctgaatgcctgcatccagagagctgtgcgggagcccccagaagatgaggaggaggaggatggccgggagaaggaaaatgtgacagtgctggacaagaccctgtctgtgaatgatgtggcctgcatggccggcctgctggagatcatcgtcatcctgtggaagagcattgaccgctccatggagaacaacaaggaggccaagctgtacaccatcaacaagtttgcctctgtgctgcctgagtacctgaaggtgttcaaggatgaccgctgcaagatccccctcttcatgctgatgtccttcatgcctgccagcgctgtgccccccttcagctgtggggtcatcagcaccctgcggagccgggaggagggcgctgtggacaagagctactgcaccctgctggactgcctgtgctcctggggccaggtgggccacatcctggagctggtggacaactggctgcccacagagcacgcccaggccaagagcaacacagccagcaagggccgggtgcagatccatgacaccaggcctgtgaagccagagctggccctggtgtacatcgagtacctgctgacccaccccaagaacagagaatgtctgctgagcgcccccaggaagaagctgaaccacctgctgaaggccctggagaccagcaaggctgacctggagagcctgctgcagacccctgggggcaagccccggggcttcagcgaggccgccgccccccgggccttcggcctgcactgccgcctgagcatccacctgcagcacaagttctgcagcgagggcaaggtgtacctgtccatgctggaggacaccggcttctggctggagagcaagatcctgtccttcatccaggaccaggaggaggactacctgaagctgcacagggtcatctaccagcagatcatccagacctacctgactgtgtgcaaggatgtggtgatggtgggcctgggggaccaccagttccagatgcagctgctgcagaggagcctgggcatcatgcagacagtgaagggcttcttctacgtgtccctgctgctggacatcctgaaggagatcaccggcagcagcctcatccagaagacagacagtgatgaggaggtggccatgctgctggacacagtgcagaaggtgttccagaagatgctggagtgcatcgcccggagcttcaggaagcagcctgaggagggcctgcggctgctgtacagcgtgcagaggcccctgcacgagttcatcacagctgtgcagagccgccacacagacacccctgtgcaccggggcgtgctgagcaccctgattgctggccctgtggtggagatcagccaccagctgaggaaggtgtctgatgtggaggagctgaccccacctgagcacctgagtgacctgccccccttcagccgctgcctgattggcatcatcatcaagagcagcaatgtggtgcgctccttcctggatgagctgaaggcctgtgtggccagcaatgacatcgagggcatcgtgtgcctgacagctgctgtgcacatcatcctggtgatcaatgccggcaagcacaagagcagcaaggtgcgggaggtggccgccaccgtgcacaggaagctgaagaccttcatggagatcaccctggaggaggacagcattgaaagatatgaggacctgctgtgctgccccggctgggccctgaccccaggcctgctggacagcatctaccccagcgcctctgtgcccatcggctag

SEQ ID NO: 100261 - DNA, 3471 bp, Artificial Sequence
  derived and/or modified sequence
atggagaagcgggagaccttcgtgcaggccgtgagcaaggagctggtaggcgagtttctgcagttcgtacagctggacaaagaggcttctgaccctttcagtctaaacgagctcctggacgagctttctaggaaacagaaggaggagctctggcagcggcttaagaatctcctgactgacgtactcctggagtcgcccgtggacggatggcaggtagttgaagcacagggcgaagataatatggaaaccgagcacggctcgaaaatgaggaaatccattgaaataatctatgccataacgagtgtaattctcgcatccgtgtctgtaataaacgagagcgaaaattacgaagccctgcttgaatgcgtgatcatacttaacggaattctttatgccctaccagaatctgagcggaagttacaatccagcattcaagacctgtgtgtgacgtggtgggagaagggtctcccggccaaggaggacacgggcaagactgcgttcgtgatgctcctgcgccgcagcctcgagactaaaaccggcgcagatgtgtgtcggctctggcgcatacatcaagcactctactgtttcgattacgatctggaggaatcaggtgaaatcaaggatatgctcctagagtgtttcatcaacataaattacattaaaaaggaggagggcagacgtttcctgagctgcctgtttaactggaacatcaacttcatcaagatgatacacggaaccatcaagaaccagctgcaggggctgcagaaatccctgatggtgtacatagctgagatctatttcagagcatggaagaaggccagtgggaagatccttgaggccatagaaaacgactgtatccaggacttcatgtttcacggaattcatctccccaggcgctcacccgtgcattcaaaagtaagggaagtcctgtcatattttcaccaccagaagaaagtgaggcaaggagttgaagagatgctataccgcctgtataagcctatcctgtggagggggcttaaggctcgcaattcagaagtcaggtctaatgcagcattgctgtttgtagaggcctttcctattcgggatccaaacttgcatgcaatagagatggactccgagatacagaaacagtttgaggagctctactctttacttgaagacccatatcccatggtacgcagcacagggattctgggcgtttgcaagatcacctccaaatactgggaaatgatgcctccaactattttaatcgacctactcaagaaggtgaccggggagctggcctttgacactagtagcgccgatgttagatgttctgtgtttaaatgcctgcctatgattctagacaataagcttagccacccgctcctcgaacagctgcttcccgccctccggtattccctccatgataactccgagaaggtgcgggtggccttcgtagatatgctgttaaaaataaaggcggtccgggccgcaaagttttggaagatctgtccgatggagcacatcctggttaggctggagactgactcccgccccgtgagcaggcgcctggtcagtcttatcttcaattcttttctgcccgtgaatcaacctgaagaggtctggtgtgagcggtgcgtcaccctggtccaaatgaatcacgcggccgccaggaggttctaccagtacgctcacgaacacaccgcctgtaccaatatcgccaagctgatacatgtgatcagacactgccttaacgcctgtattcagcgagccgtcagggagccccccgaggacgaagaagaagaggacggacgagaaaaagaaaacgttacagtgctggacaagacgttgagcgtgaatgacgttgcatgcatggccggcctgctggagattatcgtgattctgtggaagagcattgacaggtcaatggaaaataacaaagaggcaaaactgtacactatcaacaaatttgcctccgtgctgcctgaatatcttaaggtgttcaaagatgaccgatgtaaaatcccactgttcatgttgatgtcatttatgcccgccagtgctgtgccacccttctcttgtggcgtaattagtactctcaggagcagggaggagggagcagtggacaaatcttattgcaccctcctcgactgcctatgttcatgggggcaggtggggcacattttggaacttgtggacaattggctcccaacagagcacgcacaggcaaaaagtaatactgcgagtaaaggcagggtgcaaatccacgacacccgccctgttaaaccagaactcgccctcgtgtatatcgagtatctgctcacccacccaaaaaacagagaatgccttctttccgcccctaggaagaaactgaatcatttgctgaaggccctagagacaagtaaagcagacttggagtcattgctccagaccccaggaggcaagcctcggggcttctctgaggcagcagctccacgagccttcggtttacactgcaggttgagtattcacctgcagcacaagttttgtagcgaaggaaaagtatatctgtctatgctcgaggatacaggtttttggctggaatctaagattctgagttttatacaggatcaggaagaggactatctgaagcttcatagggtcatatatcaacagattatccaaacttacctgaccgtatgtaaggacgtcgtcatggtaggacttggcgatcaccagttccagatgcaactactgcagcggtctctgggaattatgcagacagttaagggcttcttctacgtatctttactgttggacattctgaaggaaattaccgggtcctcgctaatccagaagacggatagtgatgaggaggtggccatgctgctagacaccgttcaaaaggttttccagaaaatgcttgaatgtattgctaggagcttccggaagcaaccagaggaaggactgcgtctcttgtattcagtgcaaaggccactgcacgaattcatcacagccgtgcagtccaggcatacagacacccccgtgcaccgcggcgtcctatctaccctcatcgccggccctgtggtggagatctcacatcaattgagaaaagtgagtgacgtggaggaactgaccccgcctgagcacctgagtgacctgcccccattctcgcggtgtctgataggaataatcatcaagtccagcaacgtggtgcgtagcttcttggacgaactgaaagcttgtgttgcaagtaatgatatcgagggaatagtctgcctgaccgcagcagtgcacatcatattagttatcaatgccggcaaacataagtccagtaaagtgcgcgaggtcgcagcgacagtccaccgtaaactgaaaacctttatggagattacgctcgaggaggactcaattgagcgctacgaagatctcctgtgctgtcctggctgggctctgaccccaggtttgctcgacagcatttacccatccgcatcagtccccattggctag

SEQ ID NO: 100262 - DNA, 3471 bp, Artificial Sequence
  derived and/or modified sequence
atggagaagcgggagaccttcgtgcaggccgtgagcaaggagctggtaggagagtttttacagtttgtccagctggataaagaggcctcagacccgttctcgctgaacgagctgctggatgagctctctaggaagcagaaggaagaactgtggcagcgcttaaagaatctgctcaccgatgtcctcctagaatctcctgtggacggttggcaggtcgtggaggcccagggcgaagataatatggaaaccgaacacggtagtaagatgagaaagtccattgaaatcatttatgcaatcacatcggtgattctcgcatctgtgagtgtgataaacgaatcagaaaactatgaggctctgttggaatgcgttatcatacttaatgggattctgtacgctctgccagaaagtgaacgcaagctccaatctagtattcaagatctgtgcgttacatggtgggagaaggggctcccagccaaagaagatactgggaaaacggcgtttgtgatgctgcttaggagaagtcttgagaccaagaccggggccgatgtctgccgcttgtggaggattcatcaggctttatattgctttgactatgatcttgaggagagcggtgaaataaaggacatgcttctcgaatgttttatcaatataaattacattaagaaggaagaaggaagacgctttctgtcttgtctgttcaactggaacatcaacttcatcaaaatgattcatgggactattaagaatcagctgcaggggctacaaaaatccttgatggtgtatatcgccgaaatctactttcgcgcctggaaaaaggcctcaggcaaaatactggaagccatcgagaacgactgcattcaagattttatgttccacggaatccatctgccacggaggtcgcctgtacactccaaagtgcgggaggtgttatcttactttcaccatcagaagaaggttagacagggcgtagaggagatgttgtataggctctacaaacccatactgtggagaggtttaaaagcccggaacagcgaggtgcggtcaaacgccgccctattattcgttgaggctttccccattcgggacccgaacctgcacgccattgaaatggacagcgaaatccagaaacaattcgaagagctctacagccttctagaggatccttaccctatggtgagaagtacagggatccttggagtatgtaagattacctccaaatattgggagatgatgccccctacaatcctcatcgacctgttaaagaaagtcaccggagaattggcatttgacaccagcagcgccgacgtgcgatgctccgtcttcaagtgcctccccatgatcctagacaataagctctcccacccactcttagaacagctgctccccgccctgaggtactcactccacgacaacagcgagaaagtaagggtggccttcgtcgacatgctgctcaagattaaggcagttagagcagctaaattttggaaaatttgcccgatggagcacatcttagttagactcgagaccgactccagaccagttagccggcggcttgtcagcctaatcttcaatagcttccttcccgtgaatcagcctgaagaggtgtggtgtgagaggtgtgtcacactggtgcagatgaatcacgctgccgcgcgacgattttatcaatacgcgcacgaacacactgcctgcacaaacattgcaaagttgatacatgtgattcgccactgtttgaatgcctgcatacagagagcggtacgcgagcctcctgaagacgaggaagaggaagatggccgagagaaagagaacgtgaccgttctcgataagaccctaagcgttaatgatgtcgcatgcatggccggtctgctcgaaataattgttatcctttggaagagcatcgatcgaagcatggagaacaataaggaggcaaagctgtacactatcaataagtttgcgtcagttctacctgaatatctgaaggtgtttaaggacgatagatgcaaaatacccctgttcatgctgatgtcctttatgccggcttctgccgtgccacccttttcttgcggagtcatctccacgctgcgatcacgagaggagggagcagtcgataagtcctactgcacattactcgactgcttatgctcctggggacaggtgggacacattttggagctggtcgacaactggctgccaactgagcatgcccaagccaaaagcaacaccgctagcaagggcagagtgcaaatacatgacactcgcccggtcaaaccagagttggccctggtctacattgagtacctgctgacgcatccgaagaatagagagtgcctgctgtctgctccgcgcaagaagctgaatcatcttcttaaggccctggaaacatcaaaagctgacctggagtccctccttcagaccccaggggggaaaccgcggggcttttccgaggctgctgcaccgcgggcattcggactgcactgtcgtcttagtatccatcttcaacacaagttttgttccgaaggaaaagtgtacctgagtatgctggaagacaccggcttttggttagagtccaagatcctaagtttcatccaagaccaggaggaagactaccttaagctgcatagggtcatttatcagcaaattattcagacgtatcttacagtgtgcaaagacgtggtgatggtgggcttgggggaccatcagtttcagatgcagcttctgcagcgctctctcggcatcatgcaaacggtcaaagggttcttctacgtatctcttctgctagatatactcaaggaaattactggtagctcacttattcagaaaacggactccgatgaagaggtggccatgcttctcgatacagttcagaaggtgttccagaaaatgctggaatgcatcgccaggagcttccgtaaacagcccgaggagggtttgcgtttgctatactccgtgcagcgtcctcttcacgagtttatcacagctgtccagagcaggcacaccgatacaccagtgcaccgcggtgtcctctcaacccttattgccggaccagtagttgagattagtcatcagctaaggaaggtgagcgacgtggaagaactcacacctcctgaacatctgtcggacttgcccccattttcacgctgtctgatcggaatcatcataaagtccagcaacgtggtgcgaagctttttagatgaactgaaagcgtgtgtagcatcaaacgatatcgagggcatagtctgcctcactgccgctgtgcacatcatactggttatcaatgccggaaaacacaaatcctctaaagtgagagaggttgctgccacagttcatcggaagctgaaaactttcatggagatcaccctcgaggaagattctatagagagatacgaagacctgctctgttgcccggggtgggctttgaccccaggtctcctggatagcatctacccatcagcttctgtgccgattggatag

SEQ ID NO: 100263 - DNA, 3471 bp, Artificial Sequence
  derived and/or modified sequence
atggagaagcgcgagacctttgtgcaggcagtgtccaaagagctggtaggagaattcctccaatttgtgcagctggataaggaggctagtgacccattctccctgaatgaacttcttgatgagttaagcaggaaacaaaaggaagaactgtggcagcgcctgaaaaacctgttgacagacgtgctgctggagtcaccagtggacggttggcaggtggtagaggcccaaggagaggacaatatggaaacagagcatgggtcaaagatgaggaaatccattgagatcatttacgctatcaccagtgtcatcctggcttccgtgtcggttatcaatgagagcgaaaattacgaggccctcctagagtgtgtgattatcctcaacgggatcctgtacgccttgcctgagtcggagcgaaaattgcagagctccattcaggacctgtgcgtgacttggtgggagaaggggttaccagctaaggaggacacaggtaagaccgctttcgtgatgttgcttaggaggtccctggaaaccaagacgggagcagacgtgtgcaggctgtggcgaatccaccaagcattgtattgctttgactacgatttggaggagtctggggaaatcaaagatatgcttctggagtgcttcattaacattaattatatcaaaaaagaagagggacgcaggtttcttagctgtctatttaactggaacattaactttataaagatgatccacgggacaataaaaaaccagcttcaaggcttgcagaagagcctgatggtgtacatcgcagagatctatttccgagcatggaaaaaagcaagtgggaagatcctagaggccattgagaatgattgtatccaagacttcatgtttcacgggatccacttaccccgtcgaagtccagttcattcgaaagtgcgagaggtattgtcctattttcatcaccagaagaaggtgcgccagggcgtcgaagaaatgctttatcggctgtacaagcccattctgtggagggggctcaaagcccgtaactcggaggtgagaagcaacgccgcactgctattcgtcgaagcttttcccatccgggatcccaacttacatgccatcgagatggacagtgagatccaaaagcagtttgaagaactctattccctgttggaggacccttatcccatggtgcggagcacaggcatcctgggcgtttgcaagattacttccaaatactgggaaatgatgcctcccacaattctaatagatctactgaagaaggtgactggggagttagcttttgacaccagtagtgcagatgtgagatgtagcgtgtttaaatgcctgccgatgatcctggacaacaagctgagccacccacttttagagcagttgctgcccgctctccgttattccctgcacgataatagcgagaaagtacgtgttgcgttcgtcgatatgctactcaaaatcaaggccgtgcgggctgccaaattctggaagatctgcccaatggaacacatcttggtgcggctggagaccgatagcaggcctgttagtcgtcggctggtttcactaattttcaatagcttccttcccgtgaaccagcctgaggaggtctggtgcgaacgctgcgttactcttgtgcaaatgaatcatgcagcagccagaagattctaccagtatgcgcacgagcacaccgcctgtactaatatcgccaagttgatacacgtcattcgccattgcttgaacgcctgtattcagcgtgccgttagagaaccccctgaggacgaggaagaggaagatgggagagaaaaggaaaatgtcaccgtgttggacaaaaccctgagcgtcaacgatgtcgcttgcatggcaggacttctggaaattatcgtaattctgtggaaatccatcgaccgaagcatggaaaataacaaagaggcgaagctctatacaattaacaagtttgcaagtgtgcttccggagtacctcaaagtgtttaaggacgaccgatgtaaaatccctctgtttatgttaatgtctttcatgcctgctagtgcggttcctccattctcatgtggagttatttcaaccttgagatctagagaggaaggtgcagtagataaaagttactgtaccctgctagattgcctgtgtagttgggggcaggtcggccatatcttggaactggtggacaactggcttcccactgagcacgcccaggcaaagtcgaacaccgccagtaaaggacgcgtgcagattcacgacacaagacccgtaaaaccggaactggccctggtgtacatcgagtacctgctgactcatcccaaaaatagagagtgcctgcttagcgctccaagaaagaagctaaaccaccttctgaaggctttagagacatcaaaggccgatttagaatccctgctgcaaacccctggcggtaagccgagaggcttttccgaagccgcagcccctcgcgcatttggacttcactgccggctgtctatccacctccagcataagttctgctcagaggggaaggtgtacctgagcatgctggaagacacggggttctggctggaaagtaaaattcttagctttattcaggaccaggaggaagattatttgaagctccatcgggtgatttaccaacagataattcagacatatcttaccgtgtgtaaggacgtggtgatggtcggcctgggtgatcaccaatttcaaatgcagctgctccagcgatctctgggaattatgcaaacagtcaagggatttttctatgtttccctactcctcgatattttgaaggagattacaggatcatccctgatacaaaagaccgacagcgacgaggaggtggccatgctgctggataccgtgcagaaagtattccaaaagatgcttgagtgcattgcaaggtcattcagaaaacaacctgaagagggcctgcggctgttgtattctgttcagaggcccctgcatgagtttatcactgctgtacagtctagacacacagatactcctgttcatcgaggcgttctatccacgctgattgcgggtccggtggtcgaaatctcacaccagctcagaaaggtgtccgatgtggaggaactcacgcccccagagcacttgtccgatctgcctcccttctcccggtgcttgattggcattatcattaagtcttccaatgttgttagatccttcctggatgaactcaaggcctgcgtggcatcaaatgatatcgaggggattgtctgtctgactgctgctgtgcacattatattggtcattaatgccggaaaacataaatccagtaaggtcagggaggtggctgctacagtgcatagaaagctgaagacctttatggaaattacattggaggaggacagtattgaacgctacgaagacctcctatgctgcccgggatgggcactgacacctggattattggactctatctatccttccgccagcgtcccaattggttag

SEQ ID NO: 100264 - DNA, 3471 bp, Artificial Sequence
  derived and/or modified sequence
atggagaagcgcgaaacattcgtgcaggctgtgagcaaagagctggtgggagaatttctccagttcgtacagcttgataaggaggcctccgatccatttagccttaacgaactgctggacgagctgtcaaggaagcagaaggaagaactgtggcagagactgaagaatctgctcactgacgtgctgcttgagagtcccgtggacggatggcaagtcgtcgaggcccagggtgaggataacatggagacagagcatggaagcaaaatgaggaagtccatagagattatttacgctataacctcggttattttggccagtgtcagcgtaatcaacgagagcgagaattatgaggccctgctggaatgtgttatcatcctaaacggcatcctctacgccctccccgaaagcgaacgcaaactgcagtcctcgattcaagacctgtgtgtcacctggtgggaaaaaggcctacccgctaaagaagacactggaaagactgccttcgtgatgctgctcagacgatcactggagacgaagactggagccgatgtttgtcgactctggcgcatccaccaggccctgtactgcttcgactatgacctggaagaatcaggagaaatcaaagatatgctcctcgagtgttttattaatatcaattatattaaaaaggaggagggcagacgcttcctgtcatgtctgttcaactggaatataaattttataaagatgatccatgggactataaaaaaccagctgcaaggactccaaaagtctttgatggtgtacattgcagaaatctactttcgcgcttggaagaaggcgtcaggaaagatcctagaagctatcgaaaatgactgcattcaagacttcatgtttcacgggattcatcttccgaggcgcagccctgtgcattcaaaggtccgagaggtgcttagctactttcaccaccagaagaaggtgcgacagggggtcgaggagatgctctataggttgtacaaacccattctctggcgcggattaaaggctcgtaactctgaagtgagatccaatgctgccctgttgttcgtcgaagccttccctattagagacccgaatcttcacgctatcgagatggatagcgaaattcagaagcagtttgaggagttgtattctttgctggaggatccttatccgatggtgcggagtacggggatcctgggcgtgtgcaaaatcacatccaagtattgggagatgatgccgccaaccattctaattgacctgctgaagaaggttaccggcgagcttgccttcgacaccagctctgccgacgtgagatgctcagtgttcaaatgtctccctatgattctggataacaaactttcccatccgctgctggaacagctgttaccggcactccgttatagcctgcacgataattcggagaaagttcgcgtggcctttgtggatatgctgcttaagatcaaagcagtgcgggcagctaagttttggaaaatctgcccaatggagcatatactggtccgtctcgagactgattcaagacccgtgtcaagacgtctggtcagtttgatatttaattccttcctgccggtcaatcagcccgaggaggtgtggtgcgaacggtgcgtgaccttggtgcaaatgaatcacgctgccgctagacgattctaccaatacgcacacgagcatacagcttgcacaaacatcgccaaattgatccatgtaatacgccactgtctgaacgcgtgtattcaacgcgcagtgcgggaaccccctgaggacgaggaagaagaagacggcagggagaaggaaaatgtgactgttctggataaaaccctcagcgtgaacgatgtcgcctgcatggccggtcttctggagatcatagttatcctctggaaatctatcgacagatctatggagaacaacaaagaggctaagttatacactattaacaagtttgcctccgttttgccggagtacctgaaggtttttaaagacgatagatgcaagatccccctgttcatgctgatgtcatttatgcccgcaagcgcagtgcctccgttttcttgcggggtcatctctaccctgaggagccgggaggaaggtgccgtggacaaaagttattgtacacttctggattgcctctgctcttggggacaagtgggacatattcttgaattggtcgacaattggctgccaactgagcacgcgcaggcaaagagcaatacagccagcaaagggagggtgcagattcatgacacgcgccctgtcaaaccagaactggctctggtgtatatcgaatacctgctcacccacccgaagaaccgggaatgtctcctgagtgctccaaggaagaagttaaaccatctactcaaagcccttgagacaagcaaggccgacctggagagtctgctgcaaacccctgggggaaagcctaggggcttttccgaagcggcagccccaagggccttcgggctgcattgccgcttgtcgatccacctgcagcataagttctgttccgaggggaaggtatacttgtctatgttggaggataccgggttctggctcgaatccaagattctcagtttcattcaagatcaggaagaagattacctcaaattacatcgagtgatttatcagcagataatccagacatatctgactgtgtgcaaggatgtggtgatggtgggccttggggaccaccagtttcagatgcagctcttacaaaggtctttgggtattatgcagactgtcaaaggattcttttacgtttctctcttactagacatcctgaaagagatcactggctcctctttgattcagaaaacagactctgacgaagaggttgcgatgctcctggacaccgtgcagaaagtttttcagaaaatgctcgagtgcattgcccgaagtttccggaagcagcctgaggaggggcttcgcctcttatattcggtgcagcggccactgcacgagtttataacggccgtgcaatcccgccacacagacactccagtgcacagaggagtcctctccaccttgatagccggaccagtggtggagatttcgcatcaactcaggaaggtgtccgatgtcgaggagcttacccccccagaacatctctctgacctccctcctttctcccgctgcttgatagggattattattaagtcgagcaacgtcgtacgttcctttttggacgaattgaaagcgtgcgttgccagtaatgacatcgagggaattgtttgcctgaccgccgctgtgcacattatcttagtgataaacgccggaaaacacaagtcctccaaagtgagagaggtcgccgcaacagtgcatcgcaaattaaaaaccttcatggaaatcaccctggaagaggatagcattgaaaggtatgaagatctcctatgctgccctgggtgggcgctgacacccggattactagacagcatctacccgagcgcgagtgttcctattgggtag

SEQ ID NO: 100265 - DNA, 3471 bp, Artificial Sequence
  derived and/or modified sequence
atggagaagagagagaccttcgtgcaggccgtgagcaaggagctggtgggcgagttcctgcagttcgtgcagctggacaaggaggccagcgaccccttcagcctgaacgagctgctggacgagctgagcagaaagcagaaggaggagctgtggcagagactgaagaacctgctgaccgacgtgctgctggagagccccgtggacggctggcaggtggtggaggcccagggcgaggacaacatggagaccgagcacggcagcaagatgagaaagagcatcgagatcatctacgccatcaccagcgtgatcctggccagcgtgagcgtgatcaacgagagcgagaactacgaggccctgctggagtgcgtgatcatcctgaacggcatcctgtacgccctgcccgagagcgagagaaagctgcagagcagcatccaggacctgtgcgtgacctggtgggagaagggcctgcccgccaaggaggacaccggcaagaccgccttcgtgatgctgctgagaagaagcctggagaccaagaccggcgccgacgtgtgcagactgtggagaatccaccaggccctgtactgcttcgactacgacctggaggagagcggcgagatcaaggacatgctgctggagtgcttcatcaacatcaactacatcaagaaggaggagggcagaagattcctgagctgcctgttcaactggaacatcaacttcatcaagatgatccacggcaccatcaagaaccagctgcagggcctgcagaagagcctgatggtgtacatcgccgagatctacttcagagcctggaagaaggccagcggcaagatcctggaggccatcgagaacgactgcatccaggacttcatgttccacggcatccacctgcccagaagaagccccgtgcacagcaaggtgagagaggtgctgagctacttccaccaccagaagaaggtgagacagggcgtggaggagatgctgtacagactgtacaagcccatcctgtggagaggcctgaaggccagaaacagcgaggtgagaagcaacgccgccctgctgttcgtggaggccttccccatcagagaccccaacctgcacgccatcgagatggacagcgagatccagaagcagttcgaggagctgtacagcctgctggaggacccctaccccatggtgagaagcaccggcatcctgggcgtgtgcaagatcaccagcaagtactgggagatgatgccccccaccatcctgatcgacctgctgaagaaggtgaccggcgagctggccttcgacaccagcagcgccgacgtgagatgcagcgtgttcaagtgcctgcccatgatcctggacaacaagctgagccaccccctgctggagcagctgctgcccgccctgagatacagcctgcacgacaacagcgagaaggtgagagtggccttcgtggacatgctgctgaagatcaaggccgtgagagccgccaagttctggaagatctgccccatggagcacatcctggtgagactggagaccgacagcagacccgtgagcagaagactggtgagcctgatcttcaacagcttcctgcccgtgaaccagcccgaggaggtgtggtgcgagagatgcgtgaccctggtgcagatgaaccacgccgccgccagaagattctaccagtacgcccacgagcacaccgcctgcaccaacatcgccaagctgatccacgtgatcagacactgcctgaacgcctgcatccagagagccgtgagagagccccccgaggacgaggaggaggaggacggcagagagaaggagaacgtgaccgtgctggacaagaccctgagcgtgaacgacgtggcctgcatggccggcctgctggagatcatcgtgatcctgtggaagagcatcgacagaagcatggagaacaacaaggaggccaagctgtacaccatcaacaagttcgccagcgtgctgcccgagtacctgaaggtgttcaaggacgacagatgcaagatccccctgttcatgctgatgagcttcatgcccgccagcgccgtgccccccttcagctgcggcgtgatcagcaccctgagaagcagagaggagggcgccgtggacaagagctactgcaccctgctggactgcctgtgcagctggggccaggtgggccacatcctggagctggtggacaactggctgcccaccgagcacgcccaggccaagagcaacaccgccagcaagggcagagtgcagatccacgacaccagacccgtgaagcccgagctggccctggtgtacatcgagtacctgctgacccaccccaagaacagagagtgcctgctgagcgcccccagaaagaagctgaaccacctgctgaaggccctggagaccagcaaggccgacctggagagcctgctgcagacccccggcggcaagcccagaggcttcagcgaggccgccgcccccagagccttcggcctgcactgcagactgagcatccacctgcagcacaagttctgcagcgagggcaaggtgtacctgagcatgctggaggacaccggcttctggctggagagcaagatcctgagcttcatccaggaccaggaggaggactacctgaagctgcacagagtgatctaccagcagatcatccagacctacctgaccgtgtgcaaggacgtggtgatggtgggcctgggcgaccaccagttccagatgcagctgctgcagagaagcctgggcatcatgcagaccgtgaagggcttcttctacgtgagcctgctgctggacatcctgaaggagatcaccggcagcagcctgatccagaagaccgacagcgacgaggaggtggccatgctgctggacaccgtgcagaaggtgttccagaagatgctggagtgcatcgccagaagcttcagaaagcagcccgaggagggcctgagactgctgtacagcgtgcagagacccctgcacgagttcatcaccgccgtgcagagcagacacaccgacacccccgtgcacagaggcgtgctgagcaccctgatcgccggccccgtggtggagatcagccaccagctgagaaaggtgagcgacgtggaggagctgaccccccccgagcacctgagcgacctgccccccttcagcagatgcctgatcggcatcatcatcaagagcagcaacgtggtgagaagcttcctggacgagctgaaggcctgcgtggccagcaacgacatcgagggcatcgtgtgcctgaccgccgccgtgcacatcatcctggtgatcaacgccggcaagcacaagagcagcaaggtgagagaggtggccgccaccgtgcacagaaagctgaagaccttcatggagatcaccctggaggaggacagcatcgagagatacgaggacctgctgtgctgccccggctgggccctgacccccggcctgctggacagcatctaccccagcgccagcgtgcccatcggctag

SEQ ID NO: 100266 - protein, 454 aa, Artificial Sequence
  derived and/or modified sequence
MDPGQQPPPQPAPQGQGQPPSQPPQGQGPPSGPGQPAPAATQAAPQAPPAGHQIVHVRGDSETDLEALFNAVMNPKTANVPQTVPMRLRKLPDSFFKPPEPKSHSRQASTDAGTAGALTPQHVRAHSSPASLQLGAVSPGTLTPTGVVSGPAATPTAQHLRQSSFEIPDDVPLPAGWEMAKTSSGQRYFLNHIDQTTTWQDPRKAMLSQMNVTAPTSPPVQQNMMNSASAMNQRISQSAPVKQPPPLAPQSPQGGVMGGSNSNQQQQMRLQQLQMEKERLRLKQQELLRQVRPQELALRSQLPTLEQDGGTQNPVSSPGMSQELRTMTTNSSDPFLNSGTYHSRDESTDSGLSMSSYSVPRTPDDFLNSVDEMDTGDTINQSTLPSQQNRFPDYLEAIPGTNVDLGTLEGDGMNIEGEELMPSLQEALSSDILNDMESVLAATKLDKESFLTWL

SEQ ID NO: 100267 - DNA, 1365 bp, Artificial Sequence
  derived and/or modified sequence
atggaccccggccagcagccccccccccagcccgccccccagggccagggccagccccccagccagcccccccagggccagggcccccccagcggccccggccagcccgcccccgccgccacccaggccgccccccaggccccccccgccggccaccagatcgtgcacgtgagaggcgacagcgagaccgacctggaggccctgttcaacgccgtgatgaaccccaagaccgccaacgtgccccagaccgtgcccatgagactgagaaagctgcccgacagcttcttcaagccccccgagcccaagagccacagcagacaggccagcaccgacgccggcaccgccggcgccctgaccccccagcacgtgagagcccacagcagccccgccagcctgcagctgggcgccgtgagccccggcaccctgacccccaccggcgtggtgagcggccccgccgccacccccaccgcccagcacctgagacagagcagcttcgagatccccgacgacgtgcccctgcccgccggctgggagatggccaagaccagcagcggccagagatacttcctgaaccacatcgaccagaccaccacctggcaggaccccagaaaggccatgctgagccagatgaacgtgaccgcccccaccagcccccccgtgcagcagaacatgatgaacagcgccagcgccatgaaccagagaatcagccagagcgcccccgtgaagcagcccccccccctggccccccagagcccccagggcggcgtgatgggcggcagcaacagcaaccagcagcagcagatgagactgcagcagctgcagatggagaaggagagactgagactgaagcagcaggagctgctgagacaggtgagaccccaggagctggccctgagaagccagctgcccaccctggagcaggacggcggcacccagaaccccgtgagcagccccggcatgagccaggagctgagaaccatgaccaccaacagcagcgaccccttcctgaacagcggcacctaccacagcagagacgagagcaccgacagcggcctgagcatgagcagctacagcgtgcccagaacccccgacgacttcctgaacagcgtggacgagatggacaccggcgacaccatcaaccagagcaccctgcccagccagcagaacagattccccgactacctggaggccatccccggcaccaacgtggacctgggcaccctggagggcgacggcatgaacatcgagggcgaggagctgatgcccagcctgcaggaggccctgagcagcgacatcctgaacgacatggagagcgtgctggccgccaccaagctggacaaggagagcttcctgacctggctgtag

SEQ ID NO: 100268 - DNA, 1365 bp, Artificial Sequence
  derived and/or modified sequence
atggatcctggacaacagccccctcctcaacctgccccacaggggcaaggtcagcctccctctcagcctccgcaaggtcagggcccacctagtggccctggacaacctgccccagcagcgacccaagctgcaccacaggcacctcccgcggggcaccagattgtccatgtcagaggagacagcgaaactgacttggaagctctgtttaacgcggtgatgaatcccaaaaccgccaacgtgccccagaccgttcctatgcggctgcgtaagctgcccgacagtttcttcaaacctccggaacctaagtcgcacagtagacaggcttcaaccgacgccggcactgcaggtgcgctgacaccccagcacgtgcgggcacattcttcccccgcaagcctccaattaggcgccgtgtcccccgggacgctcacccctactggggtggtgagtggccccgcagcaactccaacggcacagcacctccgacagagctccttcgaaattccggacgacgtacctctcccagctgggtgggaaatggccaaaacttcctccggacagcggtactttttgaaccacatcgatcagactacaacatggcaggatccaaggaaggcaatgttgtctcagatgaatgtcacagcacctactagcccgccagtgcagcagaacatgatgaattcagccagcgctatgaaccagcggatctcacagtctgcaccagtgaaacagcccccccccctggcccctcagagcccccaggggggagtgatgggcgggtctaattcaaaccaacaacagcagatgcggctgcagcagctgcagatggaaaaagagaggctccgactgaagcagcaggaattactacggcaggtgcggccgcaggagctggcacttcggagccagctgcccactctcgagcaggacggaggcactcaaaatccagtgtcatctcccggcatgagccaagagctgcgcacgatgactaccaatagctctgatcccttcctaaactctggtacttatcattctcgcgacgagtcgacggattccgggctgtccatgagttcgtattccgtgccccgaacccctgacgactttctgaacagcgtcgatgaaatggacacaggggacacaataaatcagtccacccttccatcccagcagaaccgattccctgattacctcgaggccatcccgggcacaaatgtggacttggggacactggagggagatggcatgaatattgagggcgaggagctgatgccgtccttgcaggaagctctcagctcagatattctaaatgacatggaaagtgttctggctgcgaccaaattggataaagagagcttcttaacttggctctag

SEQ ID NO: 100269 - DNA, 1365 bp, Artificial Sequence
  derived and/or modified sequence
atggaccccggccagcagcccccaccccagcctgccccccagggccagggccagccccccagccagcccccccagggccagggccccccatctggccctggccagcctgccccagctgccacccaggccgccccccaggcccccccagctggccaccagatcgtgcacgtgcggggggacagcgagacagacctggaggccctcttcaatgctgtgatgaaccccaagacagccaacgtgccccagacagtgcccatgaggctgaggaagctgcctgacagcttcttcaagcccccagagcccaagagccacagccggcaggccagcacagatgctggaacagctggggccctgaccccccagcacgtgcgggcccacagcagccctgccagcctgcagctgggcgctgtgtccccaggcaccctgacccccactggagtggtgtctggccctgctgccacccccacagcccagcacctgcggcagagcagctttgagatcccagatgatgtgcccctgcctgctggctgggagatggccaagaccagcagcggccagcgctacttcctgaaccacatcgaccagaccaccacctggcaggaccccaggaaggccatgctgagccagatgaatgtgacagcccccaccagcccccctgtgcagcagaacatgatgaacagcgccagcgccatgaaccagaggatcagccagagcgcccctgtgaagcagcccccacccctggccccccagagcccccagggcggcgtgatgggcggcagcaacagcaaccagcagcagcagatgaggctgcagcagctgcagatggagaaggagcggctgcggctgaagcagcaggagctgctgcggcaggtgcggccccaggagctggccctgcggagccagctgcccaccctggagcaggacggcggcacccagaaccctgtgagcagccctggcatgagccaggagctgcggaccatgaccaccaacagcagtgaccccttcctgaacagcggcacctaccacagcagagatgagagcacagacagcggcctgtccatgagcagctacagcgtgcccaggaccccagatgacttcctgaacagcgtggatgagatggacacaggagacaccatcaaccagagcaccctgcccagccagcagaaccgcttcccagactacctggaggccatccctggcaccaacgtggacctgggcaccctggagggagatggcatgaacattgaaggagaggagctgatgcccagcctgcaggaggccctgagcagtgacatcctgaatgacatggagagcgtgctggccgccaccaagctggacaaggagagcttcctgacctggctgtag

SEQ ID NO: 100270 - DNA, 1365 bp, Artificial Sequence
  derived and/or modified sequence
atggaccccggccagcagccccccccccagcccgccccccagggccagggccagccaccctcccagcctccccagggccaggggccaccttcgggcccaggccaacccgcacctgcagcgacgcaagcggcacctcaggccccccccgccgggcaccaaattgtgcatgtgcggggagatagcgagacagacctggaggctttgttcaacgctgttatgaacccaaagaccgcgaatgtgccccagaccgtcccgatgcgcctcaggaagctgccagacagctttttcaaaccacccgagccgaaaagtcattcccgccaggctagcacagacgctggaactgctggggccttgaccccgcagcacgttagggctcactcaagcccggcctcacttcagctgggggccgtgtcccctggaacgctgacacctacaggtgtcgtctccgggccagcggctacacccaccgcccagcatctacgtcaatctagttttgagatccccgatgatgtcccactgcctgcaggctgggaaatggcaaagacaagctccggtcaacgatatttcctcaatcacattgaccaaacaactacttggcaggacccacgcaaagcaatgctatcccagatgaatgtcaccgctcccacctccccacctgtccagcagaacatgatgaattctgcgagcgctatgaaccagaggatcagtcaatccgccccagtgaagcagccacccccactggctccgcaatcacctcagggaggggttatgggcggctccaacagtaaccagcaacagcagatgcgcctccaacagcttcagatggaaaaggaaaggctgcgtctgaaacagcaagagttgctgcgacaggtgaggcctcaggagctggctctcagaagccaactgcctactcttgagcaagacggaggcacgcaaaaccccgtcagttctcccgggatgagtcaggagttgcgcaccatgacaactaattcgtccgatccattccttaattcaggaacatatcactctagagacgagtctactgatagcggactcagcatgagtagctactcagttcctcgcactcctgatgattttctgaattctgtggacgagatggacactggcgacacaataaatcagtctacactccccagccagcagaacaggttccccgactacctggaagcgattcccggtaccaacgtcgacctcggtacgcttgagggggacggcatgaacatcgaaggagaggagttgatgccctcactgcaagaggctctgtcctccgacatcttgaatgatatggaaagcgttcttgctgcaaccaagctggacaaagaatctttcctgacctggctgtag

SEQ ID NO: 100271 - DNA, 1365 bp, Artificial Sequence
  derived and/or modified sequence
atggacccagggcaacagccaccaccacaaccagccccacagggccagggtcagccacctagtcaacctccccagggtcaaggacccccttccgggcctgggcagcctgcgccagcagctacacaggcagccccacaagcaccacctgctggacaccagattgttcacgtcagaggggattccgaaacagatctcgaggctttatttaatgccgtgatgaatcccaagactgccaatgtgccccagacagtccccatgagactgcggaaacttccagattctttctttaagccgcctgagcctaagagccacagcaggcaggcttctactgacgctggtactgcaggggcactaacgcctcagcacgtgcgggctcacagttcaccagcgagccttcaacttggcgctgttagcccaggtacgctgacccccaccggcgtcgtgagcggcccagccgctaccccaacagctcaacatcttcgccagagctcctttgagatccccgacgatgtgcctctccccgcaggttgggaaatggctaaaacatcctctggacaaagatactttctgaatcatattgaccagaccactacatggcaagatccaagaaaggccatgctctcacaaatgaacgttactgctcctacctcacctccggtgcagcagaacatgatgaacagtgcttctgctatgaaccagcgaatcagccagtccgctccagttaaacagccgccacccctcgcaccacagtctcctcagggaggggttatgggcggaagtaatagcaaccagcagcagcagatgagactgcagcagctccaaatggagaaagagcggttacggctcaagcagcaggagctcctgcggcaagtcaggccccaggaacttgcattgaggtcacagctgccaacgcttgagcaagatggcggaacgcagaaccccgtaagctcccccggaatgtctcaggagctgcggacaatgacgaccaattcttccgatccttttttgaattcaggcacctaccattccagggatgaatccaccgattctgggctgtccatgtcttcttacagtgtgccacgcacccccgatgattttctgaactcggtcgatgagatggacacaggggataccattaatcagagcacactccctagccagcagaatcgcttccccgattatttagaagccattcccggaactaacgtggatcttgggactttggagggcgatggaatgaatattgagggggaagaattgatgccctcactccaggaagcacttagctctgatatcctgaacgacatggagtctgtgctcgcagctaccaagctcgacaaggagagttttctcacatggctgtag

SEQ ID NO: 100272 - DNA, 5218 bp, Artificial Sequence
  derived and/or modified sequence
aaagggaggaaggaaggaacaagaaaaggaaataaagagaaaggggaggcggggaaaggcaacgagctgtccggcctccgtcaagggagttggagggaaaaagttctcaggcgccgcaggtccgagtgcctcgcagcccctcccgaggcgcagccgccagaccagtggagccggggcgcagggcgggggcggaggcgccggggcgggggatgcggggccgcggcgcagccccccggccctgagagcgaggacagcgccgcccggcccgcagccgtcgccgcttctccacctcggcccgtggagccggggcgtccgggcgtagccctcgctcgcctgggtcagggggtgcgcgtcgggggaggcagaagccatggatcccgggcagcagccgccgcctcaaccggccccccagggccaagggcagccgccttcgcagcccccgcaggggcagggcccgccgtccggacccgggcaaccggcacccgcggcgacccaggcggcgccgcaggcaccccccgccgggcatcagatcgtgcacgtccgcggggactcggagaccgacctggaggcgctcttcaacgccgtcatgaaccccaagacggccaacgtgccccagaccgtgcccatgaggctccggaagctgcccgactccttcttcaagccgccggagcccaaatcccactcccgacaggccagtactgatgcaggcactgcaggagccctgactccacagcatgttcgagctcattcctctccagcttctctgcagttgggagctgtttctcctgggacactgacccccactggagtagtctctggcccagcagctacacccacagctcagcatcttcgacagtcttcttttgagatacctgatgatgtacctctgccagcaggttgggagatggcaaagacatcttctggtcagagatacttcttaaatcacatcgatcagacaacaacatggcaggaccccaggaaggccatgctgtcccagatgaacgtcacagcccccaccagtccaccagtgcagcagaatatgatgaactcggcttcagccatgaaccagagaatcagtcagagtgctccagtgaaacagccaccacccctggctccccagagcccacagggaggcgtcatgggtggcagcaactccaaccagcagcaacagatgcgactgcagcaactgcagatggagaaggagaggctgcggctgaaacagcaagaactgcttcggcaggtgaggccacaggagttagccctgcgtagccagttaccaacactggagcaggatggtgggactcaaaatccagtgtcttctcccgggatgtctcaggaattgagaacaatgacgaccaatagctcagatcctttccttaacagtggcacctatcactctcgagatgagagtacagacagtggactaagcatgagcagctacagtgtccctcgaaccccagatgacttcctgaacagtgtggatgagatggatacaggtgatactatcaaccaaagcaccctgccctcacagcagaaccgtttcccagactaccttgaagccattcctgggacaaatgtggaccttggaacactggaaggagatggaatgaacatagaaggagaggagctgatgccaagtctgcaggaagctttgagttctgacatccttaatgacatggagtctgttttggctgccaccaagctagataaagaaagctttcttacatggttatagagccctcaggcagactgaattctaaatctgtgaaggatctaaggagacacatgcaccggaaatttccataagccagttgcagttttcaggctaatacagaaaaagatgaacaaacgtccagcaagatactttaatcctctattttgctcttccttgtccattgctgctgttaatgtattgctgacctctttcacagttggctctaaagaatcaaaagaaaaaaactttttatttcttttgctattaaaactactgttcattttgggggctgggggaagtgagcctgtttggatgatggatgccattccttttgcccagttaaatgttcaccaatcattttaactaaatactcagacttagaagtcagatgcttcatgtcacagcatttagtttgttcaacagttgtttcttcagcttcctttgtccagtggaaaaacatgatttactggtctgacaagccaaaaatgttatatctgatattaaatacttaatgctgatttgaagagatagctgaaaccaaggctgaagactgttttactttcagtattttcttttcctcctagtgctatcattagtcacataatgaccttgattttattttaggagcttataaggcatgagacaatttccatataaatatattaattattgccacatactctaatatagattttggtggataattttgtgggtgtgcattttgttctgttttgttgggttttttgttttttttgtttttggcagggtcggtgggggggttggttggttggttggttttgtcggaacctaggcaaatgaccatattagtgaatctgttaatagttgtagcttgggatggttattgtagttgttttggtaaaatcttcatttcctggttttttttaccaccttatttaaatctcgattatctgctctctcttttatatacatacacacacccaaacataacatttataatagtgtggtagtggaatgtatccttttttaggtttccctgctttccagttaatttttaaaatggtagcgctttgtatgcatttagaatacatgactagtagtttatatttcactggtagtttaaatctggttggggcagtctgcagatgtttgaagtagtttagtgttctagaaagagctattactgtggatagtgcctaggggagtgctccacgccctctgggcatacggtagatattatctgatgaattggaaaggagcaaaccagaaatggctttattttctcccttggactaatttttaagtctcgattggaattcagtgagtaggttcataatgtgcatgacagaaataagctttatagtggtttaccttcatttagctttggaagttttctttgccttagttttggaagtaaattctagtttgtagttctcatttgtaatgaacacattaacgactagattaaaatattgccttcaagattgttcttacttacaagacttgctcctacttctatgctgaaaattgaccctggatagaatactataaggttttgagttagctggaaaagtgatcagattaataaatgtatattggtagttgaatttagcaaagaaatagagataatcatgattatacctttatttttacaggaagagatgatgtaactagagtatgtgtctacaggagtaataatggtttccaaagagtattttttaaaggaacaaaacgagcatgaattaactcttcaatataagctatgaagtaatagttggttgtgaattaaagtggcaccagctagcacctctgtgttttaagggtctttcaatgtttctagaataagcccttattttcaagggttcataacaggcataaaatctcttctcctggcaaaagctgctatgaaaagcctcagcttgggaagatagatttttttccccccaattacaaaatctaagtattttggcccttcaatttggaggagggcaaaagttggaagtaagaagttttattttaagtactttcagtgctcaaaaaaatgcaatcactgtgttgtatataatagttcataggttgatcactcataataattgactctaaggcttttattaagaaaacagcagaaagattaaatcttgaattaagtctggggggaaatggccactgcagatggagttttagagtagtaatgaaattctacctagaatgcaaaattgggtatatgaattacatagcatgttgttgggattttttttaatgtgcagaagatcaaagctacttggaaggagtgcctataatttgccagtagccacagattaagattatatcttatatatcagcagattagctttagcttagggggagggtgggaaagtttggggggggggttgtgaagatttagggggaccttgatagagaactttataaacttctttctctttaataaagacttgtcttacaccgtgctgccattaaaggcagctgttctagagtttcagtcacctaagtacacccacaaaacaatatgaatatggagatcttcctttacccctcaactttaatttgcccagttatacctcagtgttgtagcagtactgtgatacctggcacagtgctttgatcttacgatgccctctgtactgacctgaaggagacctaagagtcctttccctttttgagtttgaatcatagccttgatgtggtctcttgttttatgtccttgttcctaatgtaaaagtgcttaactgcttcttggttgtattgggtagcattgggataagattttaactgggtattcttgaattgcttttacaataaaccaattttataatctttaaatttatcaactttttacatttgtgttattttcagtcagggcttcttagatctacttatggttgatggagcacattgatttggagtttcagatcttccaaagcactatttgttgtaataacttttctaaatgtagtgcctttaaaggaaaaatgaacacagggaagtgactttgctacaaataatgttgctgtgttaagtattcatattaaatacatgccttctatatggaacatggcagaaagactgaaaaataacagtaattaattgtgtaattcagaattcataccaatcagtgttgaaactcaaacattgcaaaagtgggtggcaatattcagtgcttaacacttttctagcgttggtacatctgagaaatgagtgctcaggtggattttatcctcgcaagcatgttgttataagaattgtgggtgtgcctatcataacaattgttttctgtatcttgaaaaagtattctccacattttaaatgttttatattagagaattctttaatgcacacttgtcaaatatatatatatagtaccaatgttacctttttattttttgttttagatgtaagagcatgctcatatgttaggtacttacataaattgttacattattttttcttatgtaatacctttttgtttgtttatgtggttcaaatatattctttccttaaactctt

SEQ ID NO: 100273 - protein, 492 aa, Artificial Sequence
  derived and/or modified sequence
MDPGQQPPPQPAPQGQGQPPSQPPQGQGPPSGPGQPAPAATQAAPQAPPAGHQIVHVRGDSETDLEALFNAVMNPKTANVPQTVPMRLRKLPDSFFKPPEPKSHSRQASTDAGTAGALTPQHVRAHSSPASLQLGAVSPGTLTPTGVVSGPAATPTAQHLRQSSFEIPDDVPLPAGWEMAKTSSGQRYFLNHIDQTTTWQDPRKAMLSQMNVTAPTSPPVQQNMMNSASGPLPDGWEQAMTQDGEIYYINHKNKTTSWLDPRLDPRFAMNQRISQSAPVKQPPPLAPQSPQGGVMGGSNSNQQQQMRLQQLQMEKERLRLKQQELLRQVRPQELALRSQLPTLEQDGGTQNPVSSPGMSQELRTMTTNSSDPFLNSGTYHSRDESTDSGLSMSSYSVPRTPDDFLNSVDEMDTGDTINQSTLPSQQNRFPDYLEAIPGTNVDLGTLEGDGMNIEGEELMPSLQEALSSDILNDMESVLAATKLDKESFLTWL

SEQ ID NO: 100274 - DNA, 1479 bp, Artificial Sequence
  derived and/or modified sequence
atggaccccggccagcagccccccccccagcccgccccccagggccagggccagccccccagccagcccccccagggccagggcccccccagcggccccggccagcccgcccccgccgccacccaggccgccccccaggccccccccgccggccaccagatcgtgcacgtgagaggcgacagcgagaccgacctggaggccctgttcaacgccgtgatgaaccccaagaccgccaacgtgccccagaccgtgcccatgagactgagaaagctgcccgacagcttcttcaagccccccgagcccaagagccacagcagacaggccagcaccgacgccggcaccgccggcgccctgaccccccagcacgtgagagcccacagcagccccgccagcctgcagctgggcgccgtgagccccggcaccctgacccccaccggcgtggtgagcggccccgccgccacccccaccgcccagcacctgagacagagcagcttcgagatccccgacgacgtgcccctgcccgccggctgggagatggccaagaccagcagcggccagagatacttcctgaaccacatcgaccagaccaccacctggcaggaccccagaaaggccatgctgagccagatgaacgtgaccgcccccaccagcccccccgtgcagcagaacatgatgaacagcgccagcggccccctgcccgacggctgggagcaggccatgacccaggacggcgagatctactacatcaaccacaagaacaagaccaccagctggctggaccccagactggaccccagattcgccatgaaccagagaatcagccagagcgcccccgtgaagcagcccccccccctggccccccagagcccccagggcggcgtgatgggcggcagcaacagcaaccagcagcagcagatgagactgcagcagctgcagatggagaaggagagactgagactgaagcagcaggagctgctgagacaggtgagaccccaggagctggccctgagaagccagctgcccaccctggagcaggacggcggcacccagaaccccgtgagcagccccggcatgagccaggagctgagaaccatgaccaccaacagcagcgaccccttcctgaacagcggcacctaccacagcagagacgagagcaccgacagcggcctgagcatgagcagctacagcgtgcccagaacccccgacgacttcctgaacagcgtggacgagatggacaccggcgacaccatcaaccagagcaccctgcccagccagcagaacagattccccgactacctggaggccatccccggcaccaacgtggacctgggcaccctggagggcgacggcatgaacatcgagggcgaggagctgatgcccagcctgcaggaggccctgagcagcgacatcctgaacgacatggagagcgtgctggccgccaccaagctggacaaggagagcttcctgacctggctgtag

SEQ ID NO: 100275 - DNA, 1479 bp, Artificial Sequence
  derived and/or modified sequence
atggatcctgggcagcagcctccgccccagcccgctccgcagggacagggccagccgcccagccagcccccccaagggcaggggcctccttcgggtcccggtcagcccgcacccgcagcaactcaagccgcccctcaggcacccccggctgggcatcagattgtgcacgtccgcggtgattctgagacagacctggaggctctgttcaacgccgtcatgaatcccaagactgccaatgtccctcagaccgtacccatgagactgcgtaagcttccagacagttttttcaaaccacctgagcccaagtctcatagtcggcaggcctcaacagatgccggcaccgcaggagcccttaccccgcagcacgtgcgcgctcacagctccccagcttctcttcagctaggggccgttagtccgggcactcttacacctactggtgtggtttcaggacccgcagccacgcctacagctcaacacctccgacaatcttctttcgagataccagatgacgtgccccttccagctggctgggagatggctaaaaccagttccggtcagagatacttcctgaatcatattgatcagaccaccacttggcaagaccctcgcaaagcaatgctatctcagatgaacgttacagcacccactagccctccagtgcagcagaacatgatgaactccgcaagcggccctctcccagacgggtgggagcaggcaatgactcaggatggagaaatctattacatcaatcacaaaaacaaaaccacttcctggctggacccacgcctcgatccccggttcgctatgaaccagcggatctctcaatcagcgccagtaaaacaacccccccctctggctcctcagtctccccagggcggtgtgatgggcggctcgaatagcaatcaacaacaacaaatgcgtctccagcaactgcagatggaaaaggaacgcttaaggcttaagcagcaagaactcctcagacaggtgcgaccccaggaactggccctgcgcagtcaactgccaacgctggagcaagatggggggactcagaatcccgtgtcgagtccaggtatgtctcaagaactcaggacaatgaccaccaacagcagtgaccctttcctgaacagtgggacttatcatagtcgcgatgaatccactgattcagggctctctatgagctcttatagcgtacctaggaccccggacgactttctcaattccgttgatgaaatggatacgggtgacacaataaaccaatcgacattacctagtcagcagaaccgctttccagattaccttgaagccattcccgggaccaacgtagacctgggcacccttgagggagacggaatgaacatcgagggcgaggagctgatgccgtccctgcaagaggctctctcctcagatatacttaacgatatggaatccgtactggccgccacaaagctggataaggagtcctttttgacctggttatag

SEQ ID NO: 100276 - DNA, 1479 bp, Artificial Sequence
  derived and/or modified sequence
atggaccccggccagcagcccccaccccagcctgccccccagggccagggccagccccccagccagcccccccagggccagggccccccatctggccctggccagcctgccccagctgccacccaggccgccccccaggcccccccagctggccaccagatcgtgcacgtgcggggggacagcgagacagacctggaggccctcttcaatgctgtgatgaaccccaagacagccaacgtgccccagacagtgcccatgaggctgaggaagctgcctgacagcttcttcaagcccccagagcccaagagccacagccggcaggccagcacagatgctggaacagctggggccctgaccccccagcacgtgcgggcccacagcagccctgccagcctgcagctgggcgctgtgtccccaggcaccctgacccccactggagtggtgtctggccctgctgccacccccacagcccagcacctgcggcagagcagctttgagatcccagatgatgtgcccctgcctgctggctgggagatggccaagaccagcagcggccagcgctacttcctgaaccacatcgaccagaccaccacctggcaggaccccaggaaggccatgctgagccagatgaatgtgacagcccccaccagcccccctgtgcagcagaacatgatgaacagcgccagcggccccctgcctgatggctgggagcaggccatgacccaggatggagagatctactacatcaaccacaagaacaagaccacctcctggctggacccccggctggaccccaggtttgccatgaaccagaggatcagccagagcgcccctgtgaagcagcccccacccctggccccccagagcccccagggcggcgtgatgggcggcagcaacagcaaccagcagcagcagatgaggctgcagcagctgcagatggagaaggagcggctgcggctgaagcagcaggagctgctgcggcaggtgcggccccaggagctggccctgcggagccagctgcccaccctggagcaggacggcggcacccagaaccctgtgagcagccctggcatgagccaggagctgcggaccatgaccaccaacagcagtgaccccttcctgaacagcggcacctaccacagcagagatgagagcacagacagcggcctgtccatgagcagctacagcgtgcccaggaccccagatgacttcctgaacagcgtggatgagatggacacaggagacaccatcaaccagagcaccctgcccagccagcagaaccgcttcccagactacctggaggccatccctggcaccaacgtggacctgggcaccctggagggagatggcatgaacattgaaggagaggagctgatgcccagcctgcaggaggccctgagcagtgacatcctgaatgacatggagagcgtgctggccgccaccaagctggacaaggagagcttcctgacctggctgtag

SEQ ID NO: 100277 - DNA, 1479 bp, Artificial Sequence
  derived and/or modified sequence
atggaccccggccagcagccccccccccagcccgccccccagggccagggccaacccccctctcaacctccacagggtcaaggccccccaagcggacccggacagcccgctccagctgccacccaagcagccccccaggctcctccagcgggtcatcagattgtgcacgttcgcggtgactctgaaacagatttggaggcactgttcaacgcagtgatgaatccaaagacagcaaatgtgccccagactgtgcctatgcgcctccggaagttaccagacagttttttcaaaccgcctgagcccaaatcacactcccgccaggcttcgacagacgctggaaccgcgggtgcgctgacccctcaacatgtacgagcccactccagccccgcctccctacagttgggcgctgtgtccccgggcactctgaccccgaccggggtggtgtccggtcccgccgccacacccacagcacagcacctgagacagagctccttcgaaattcccgacgatgtgccactgccagcggggtgggagatggcaaaaacaagtagtggacagagatacttcttgaatcatatcgatcagaccacaacttggcaggaccctcgcaaggccatgctctctcaaatgaacgtgaccgcccctacgagtccaccagtccaacaaaacatgatgaactctgcttccggcccacttcccgatggatgggagcaggccatgactcaagacggagaaatttactatatcaaccataagaacaaaaccactagctggcttgaccccagacttgatccgaggttcgctatgaaccagaggatttcccagtctgcccctgtaaagcaacctcccccactggcaccccagtccccccagggtggcgtgatgggcggctcaaatagcaaccagcaacagcagatgagactccagcaattgcaaatggagaaggaacgccttaggttaaaacagcaggagttgctccggcaggttcggccccaggaactcgcgctgaggagtcaacttcctaccctggagcaagacggtggtacccaaaatcccgttagctcgccaggaatgtctcaggagcttaggacaatgactactaatagtagcgatccattcttaaatagcggcacataccacagcagagacgagtctaccgatagcggactgagcatgagctcatattcagtgccacggactcctgacgatttcttaaactctgtggatgaaatggatacgggagacacaatcaatcagtctactctgccgtcacagcagaacaggttccctgactatctggaggccattccaggcacaaatgtcgatttaggaaccttagagggagatggcatgaatattgagggcgaagagcttatgccctctctgcaggaggcactttcgtctgacatactgaacgacatggagtccgtgctagccgcaactaaactggacaaggagtcgttccttacatggctctag

SEQ ID NO: 100278 - DNA, 1479 bp, Artificial Sequence
  derived and/or modified sequence
atggacccagggcagcagcctcccccacagcctgctcctcagggccagggacagcctcctagccagccccctcaaggacaaggcccaccctccggtccagggcaaccagctccagccgctactcaggcagcccctcaggcaccccctgctggccaccagattgtgcatgtccggggtgacagtgaaacagacttagaggctctgttcaacgctgtcatgaatcctaaaacagccaatgtcccacagactgtgcccatgcgcttgcggaagctgcccgattccttttttaagccacccgaacccaaaagccacagccgccaggcgagcaccgatgcagggacagcaggtgccctaactccgcagcatgtgagagcccacagtagtccagcaagcctgcaattgggcgcagtctcccccggtacactgacaccaaccggagtggttagcggcccagccgctacgccaacagctcagcatctgagacaatccagctttgagatcccagacgatgttccactaccagccggttgggaaatggccaagacctcctccggacaacgatactttctgaaccacatagatcagaccactacgtggcaagatccgcgaaaagccatgctgtctcaaatgaatgttacggctcccacatccccgcctgtgcaacagaatatgatgaatagcgccagcggccctctgcccgacggatgggagcaggccatgacacaggatggcgaaatttactacatcaatcacaagaacaagactaccagttggctggatccacgtcttgatcctaggtttgctatgaatcagcggatatcccagtccgccccagtcaagcagccccctccactcgcccctcaatcgccccagggcggtgtaatggggggaagcaattccaaccagcagcagcagatgcgcctccagcagctgcagatggaaaaggagcgcttacgactcaagcagcaggagttgttacgacaagtgcgacctcaagaactggccttgagaagccaacttcctaccttggagcaggacggcggtacccaaaacccagtgagcagtcctggaatgagccaggagcttaggaccatgacgacgaattcctccgaccctttcctgaattctggcacttaccactccagggatgagtcaacagactcgggcttatccatgtcgtcctactccgtccctcggactccagatgattttctaaactccgtcgacgaaatggacacaggggacaccatcaaccaaagtaccctgccgtctcaacaaaatcgcttccctgattacctggaagccataccgggaactaatgttgacctcggaacattggaaggcgacggcatgaacatagagggagaggagctgatgcctagcctgcaggaggccctgtcttccgatatactgaatgatatggaatccgtcttggctgcaaccaagctagataaggagtccttcctgacgtggctctag

SEQ ID NO: 100279 - DNA, 5332 bp, Artificial Sequence
  derived and/or modified sequence
aaagggaggaaggaaggaacaagaaaaggaaataaagagaaaggggaggcggggaaaggcaacgagctgtccggcctccgtcaagggagttggagggaaaaagttctcaggcgccgcaggtccgagtgcctcgcagcccctcccgaggcgcagccgccagaccagtggagccggggcgcagggcgggggcggaggcgccggggcgggggatgcggggccgcggcgcagccccccggccctgagagcgaggacagcgccgcccggcccgcagccgtcgccgcttctccacctcggcccgtggagccggggcgtccgggcgtagccctcgctcgcctgggtcagggggtgcgcgtcgggggaggcagaagccatggatcccgggcagcagccgccgcctcaaccggccccccagggccaagggcagccgccttcgcagcccccgcaggggcagggcccgccgtccggacccgggcaaccggcacccgcggcgacccaggcggcgccgcaggcaccccccgccgggcatcagatcgtgcacgtccgcggggactcggagaccgacctggaggcgctcttcaacgccgtcatgaaccccaagacggccaacgtgccccagaccgtgcccatgaggctccggaagctgcccgactccttcttcaagccgccggagcccaaatcccactcccgacaggccagtactgatgcaggcactgcaggagccctgactccacagcatgttcgagctcattcctctccagcttctctgcagttgggagctgtttctcctgggacactgacccccactggagtagtctctggcccagcagctacacccacagctcagcatcttcgacagtcttcttttgagatacctgatgatgtacctctgccagcaggttgggagatggcaaagacatcttctggtcagagatacttcttaaatcacatcgatcagacaacaacatggcaggaccccaggaaggccatgctgtcccagatgaacgtcacagcccccaccagtccaccagtgcagcagaatatgatgaactcggcttcaggtcctcttcctgatggatgggaacaagccatgactcaggatggagaaatttactatataaaccataagaacaagaccacctcttggctagacccaaggcttgaccctcgttttgccatgaaccagagaatcagtcagagtgctccagtgaaacagccaccacccctggctccccagagcccacagggaggcgtcatgggtggcagcaactccaaccagcagcaacagatgcgactgcagcaactgcagatggagaaggagaggctgcggctgaaacagcaagaactgcttcggcaggtgaggccacaggagttagccctgcgtagccagttaccaacactggagcaggatggtgggactcaaaatccagtgtcttctcccgggatgtctcaggaattgagaacaatgacgaccaatagctcagatcctttccttaacagtggcacctatcactctcgagatgagagtacagacagtggactaagcatgagcagctacagtgtccctcgaaccccagatgacttcctgaacagtgtggatgagatggatacaggtgatactatcaaccaaagcaccctgccctcacagcagaaccgtttcccagactaccttgaagccattcctgggacaaatgtggaccttggaacactggaaggagatggaatgaacatagaaggagaggagctgatgccaagtctgcaggaagctttgagttctgacatccttaatgacatggagtctgttttggctgccaccaagctagataaagaaagctttcttacatggttatagagccctcaggcagactgaattctaaatctgtgaaggatctaaggagacacatgcaccggaaatttccataagccagttgcagttttcaggctaatacagaaaaagatgaacaaacgtccagcaagatactttaatcctctattttgctcttccttgtccattgctgctgttaatgtattgctgacctctttcacagttggctctaaagaatcaaaagaaaaaaactttttatttcttttgctattaaaactactgttcattttgggggctgggggaagtgagcctgtttggatgatggatgccattccttttgcccagttaaatgttcaccaatcattttaactaaatactcagacttagaagtcagatgcttcatgtcacagcatttagtttgttcaacagttgtttcttcagcttcctttgtccagtggaaaaacatgatttactggtctgacaagccaaaaatgttatatctgatattaaatacttaatgctgatttgaagagatagctgaaaccaaggctgaagactgttttactttcagtattttcttttcctcctagtgctatcattagtcacataatgaccttgattttattttaggagcttataaggcatgagacaatttccatataaatatattaattattgccacatactctaatatagattttggtggataattttgtgggtgtgcattttgttctgttttgttgggttttttgttttttttgtttttggcagggtcggtgggggggttggttggttggttggttttgtcggaacctaggcaaatgaccatattagtgaatctgttaatagttgtagcttgggatggttattgtagttgttttggtaaaatcttcatttcctggttttttttaccaccttatttaaatctcgattatctgctctctcttttatatacatacacacacccaaacataacatttataatagtgtggtagtggaatgtatccttttttaggtttccctgctttccagttaatttttaaaatggtagcgctttgtatgcatttagaatacatgactagtagtttatatttcactggtagtttaaatctggttggggcagtctgcagatgtttgaagtagtttagtgttctagaaagagctattactgtggatagtgcctaggggagtgctccacgccctctgggcatacggtagatattatctgatgaattggaaaggagcaaaccagaaatggctttattttctcccttggactaatttttaagtctcgattggaattcagtgagtaggttcataatgtgcatgacagaaataagctttatagtggtttaccttcatttagctttggaagttttctttgccttagttttggaagtaaattctagtttgtagttctcatttgtaatgaacacattaacgactagattaaaatattgccttcaagattgttcttacttacaagacttgctcctacttctatgctgaaaattgaccctggatagaatactataaggttttgagttagctggaaaagtgatcagattaataaatgtatattggtagttgaatttagcaaagaaatagagataatcatgattatacctttatttttacaggaagagatgatgtaactagagtatgtgtctacaggagtaataatggtttccaaagagtattttttaaaggaacaaaacgagcatgaattaactcttcaatataagctatgaagtaatagttggttgtgaattaaagtggcaccagctagcacctctgtgttttaagggtctttcaatgtttctagaataagcccttattttcaagggttcataacaggcataaaatctcttctcctggcaaaagctgctatgaaaagcctcagcttgggaagatagatttttttccccccaattacaaaatctaagtattttggcccttcaatttggaggagggcaaaagttggaagtaagaagttttattttaagtactttcagtgctcaaaaaaatgcaatcactgtgttgtatataatagttcataggttgatcactcataataattgactctaaggcttttattaagaaaacagcagaaagattaaatcttgaattaagtctggggggaaatggccactgcagatggagttttagagtagtaatgaaattctacctagaatgcaaaattgggtatatgaattacatagcatgttgttgggattttttttaatgtgcagaagatcaaagctacttggaaggagtgcctataatttgccagtagccacagattaagattatatcttatatatcagcagattagctttagcttagggggagggtgggaaagtttggggggggggttgtgaagatttagggggaccttgatagagaactttataaacttctttctctttaataaagacttgtcttacaccgtgctgccattaaaggcagctgttctagagtttcagtcacctaagtacacccacaaaacaatatgaatatggagatcttcctttacccctcaactttaatttgcccagttatacctcagtgttgtagcagtactgtgatacctggcacagtgctttgatcttacgatgccctctgtactgacctgaaggagacctaagagtcctttccctttttgagtttgaatcatagccttgatgtggtctcttgttttatgtccttgttcctaatgtaaaagtgcttaactgcttcttggttgtattgggtagcattgggataagattttaactgggtattcttgaattgcttttacaataaaccaattttataatctttaaatttatcaactttttacatttgtgttattttcagtcagggcttcttagatctacttatggttgatggagcacattgatttggagtttcagatcttccaaagcactatttgttgtaataacttttctaaatgtagtgcctttaaaggaaaaatgaacacagggaagtgactttgctacaaataatgttgctgtgttaagtattcatattaaatacatgccttctatatggaacatggcagaaagactgaaaaataacagtaattaattgtgtaattcagaattcataccaatcagtgttgaaactcaaacattgcaaaagtgggtggcaatattcagtgcttaacacttttctagcgttggtacatctgagaaatgagtgctcaggtggattttatcctcgcaagcatgttgttataagaattgtgggtgtgcctatcataacaattgttttctgtatcttgaaaaagtattctccacattttaaatgttttatattagagaattctttaatgcacacttgtcaaatatatatatatagtaccaatgttacctttttattttttgttttagatgtaagagcatgctcatatgttaggtacttacataaattgttacattattttttcttatgtaatacctttttgtttgtttatgtggttcaaatatattctttccttaaactctt

SEQ ID NO: 100280 - protein, 862 aa, Artificial Sequence
  derived and/or modified sequence
MKTVLMVAEKPSLAQSIAKILSRGSLSSHKGLNGACSVHEYTGTFAGQPVRFKMTSVCGHVMTLDFLGKYNKWDKVDPAELFSQAPTEKKEANPKLNMVKFLQVEGRGCDYIVLWLDCDKEGENICFEVLDAVLPVMNKAHGGEKTVFRARFSSITDTDICNAMACLGEPDHNEALSVDARQELDLRIGCAFTRFQTKYFQGKYGDLDSSLISFGPCQTPTLGFCVERHDKIQSFKPETYWVLQAKVNTDKDRSLLLDWDRVRVFDREIAQMFLNMTKLEKEAQVEATSRKEKAKQRPLALNTVEMLRVASSSLGMGPQHAMQTAERLYTQGYISYPRTETTHYPENFDLKGSLRQQANHPYWADTVKRLLAEGINRPRKGHDAGDHPPITPMKSATEAELGGDAWRLYEYITRHFIATVSHDCKYLQSTISFRIGPELFTCSGKTVLSPGFTEVMPWQSVPLEESLPTCQRGDAFPVGEVKMLEKQTNPPDYLTEAELITLMEKHGIGTDASIPVHINNICQRNYVTVESGRRLKPTNLGIVLVHGYYKIDAELVLPTIRSAVEKQLNLIAQGKADYRQVLGHTLDVFKRKFHYFVDSIAGMDELMEVSFSPLAATGKPLSRCGKCHRFMKYIQAKPSRLHCSHCDETYTLPQNGTIKLYKELRCPLDDFELVLWSSGSRGKSYPLCPYCYNHPPFRDMKKGMGCNECTHPSCQHSLSMLGIGQCVECESGVLVLDPTSGPKWKVACNKCNVVAHCFENAHRVRVSADTCSVCEAALLDVDFNKAKSPLPGDETQHMGCVFCDPVFQELVELKHAASCHPMHRGGPGRRQGRGRGRARRPPGKPNPRRPKDKMSALAAYFV

SEQ ID NO: 100281 - protein, 282 aa, Artificial Sequence
  derived and/or modified sequence
MFLNMTKLEKEAQVEATSRKEKAKQRPLALNTVEMLRVASSSLGMGPQHAMQTAERLYTQGYISYPRTETTHYPENFDLKGSLRQQANHPYWADTVKRLLAEGINRPRKGHDAGDHPPITPMKSATEAELGGDAWRLYEYITRHFIATVSHDCKYLQSTISFRIGPELFTCSGKTVLSPGFTEVMPWQSVPLEESLPTCQRGDAFPVGEVKMLEKQTNPPDYLTEAELITLMEKHGIGGCACPGPRAGSVSSTQASSLLTKLPRQPCVPSPAPLHGLVSGNW

SEQ ID NO: 100282 - protein, 21 aa, Artificial Sequence
  derived and/or modified sequence
MKTVLMVAEKPSLAQSIAKIL

SEQ ID NO: 100283 - protein, 42 aa, Artificial Sequence
  derived and/or modified sequence
MKTVLMVAEKPSLAQSIAKILSRGSLSSHKGLNGACSVHEYT

SEQ ID NO: 100284 - protein, 47 aa, Artificial Sequence
  derived and/or modified sequence
MKTVLMVAEKPSLAQSIAKILSRGSLSSHKGLNGACSVHEYTGTFAG

SEQ ID NO: 100285 - protein, 525 aa, Artificial Sequence
  derived and/or modified sequence
  misc_feature (1)..(1): Xaa can be any naturally occurring amino acid
XLDSSLISFGPCQTPTLGFCVERHDKIQSFKPETYWVLQAKVNTDKDRSLLLDWDRVRVFDREIAQMFLNMTKLEKEAQVEATSRKEKAKQRPLALNTVEMLRVASSSLGMGPQHAMQTAERLYTQGYISYPRTETTHYPENFDLKGSLRQQANHPYWADTVKRLLAEGINRPRKGHDAGDHPPITPMKSATEAELGGDAWRLYEYITRHFIATVSHDCKYLQSTISFRIGPELFTCSGKTVLSPGFTEVMPWQSVPLEESLPTCQRGDAFPVGEVKMLEKQTNPPDYLTEAELITLMEKHGIGTDASIPVHINNICQRNYVTVESGRRLKPTNLGIVLVHGYYKIDAELVLPTIRSAVEKQLNLIAQGKADYRQVLGHTLDVFKRKFHYFVDSIAGMDELMEVSFSPLAATGKPLSRCGKCHRFMKYIQAKPSRLHCSHCDETYTLPQNGTIKLYKELRCPLDDFELVLWSSGSRGKSYPLCPYCYNHPPFRDMKKGECSHSLLSTGSCSLFSVPTPALHQAGL

SEQ ID NO: 100286 - DNA, 2589 bp, Artificial Sequence
  derived and/or modified sequence
atgaagaccgtgctgatggtggccgagaagcccagcctggcccagagcatcgccaagatcctgagcagaggcagcctgagcagccacaagggcctgaacggcgcctgcagcgtgcacgagtacaccggcaccttcgccggccagcccgtgagattcaagatgaccagcgtgtgcggccacgtgatgaccctggacttcctgggcaagtacaacaagtgggacaaggtggaccccgccgagctgttcagccaggcccccaccgagaagaaggaggccaaccccaagctgaacatggtgaagttcctgcaggtggagggcagaggctgcgactacatcgtgctgtggctggactgcgacaaggagggcgagaacatctgcttcgaggtgctggacgccgtgctgcccgtgatgaacaaggcccacggcggcgagaagaccgtgttcagagccagattcagcagcatcaccgacaccgacatctgcaacgccatggcctgcctgggcgagcccgaccacaacgaggccctgagcgtggacgccagacaggagctggacctgagaatcggctgcgccttcaccagattccagaccaagtacttccagggcaagtacggcgacctggacagcagcctgatcagcttcggcccctgccagacccccaccctgggcttctgcgtggagagacacgacaagatccagagcttcaagcccgagacctactgggtgctgcaggccaaggtgaacaccgacaaggacagaagcctgctgctggactgggacagagtgagagtgttcgacagagagatcgcccagatgttcctgaacatgaccaagctggagaaggaggcccaggtggaggccaccagcagaaaggagaaggccaagcagagacccctggccctgaacaccgtggagatgctgagagtggccagcagcagcctgggcatgggcccccagcacgccatgcagaccgccgagagactgtacacccagggctacatcagctaccccagaaccgagaccacccactaccccgagaacttcgacctgaagggcagcctgagacagcaggccaaccacccctactgggccgacaccgtgaagagactgctggccgagggcatcaacagacccagaaagggccacgacgccggcgaccacccccccatcacccccatgaagagcgccaccgaggccgagctgggcggcgacgcctggagactgtacgagtacatcaccagacacttcatcgccaccgtgagccacgactgcaagtacctgcagagcaccatcagcttcagaatcggccccgagctgttcacctgcagcggcaagaccgtgctgagccccggcttcaccgaggtgatgccctggcagagcgtgcccctggaggagagcctgcccacctgccagagaggcgacgccttccccgtgggcgaggtgaagatgctggagaagcagaccaacccccccgactacctgaccgaggccgagctgatcaccctgatggagaagcacggcatcggcaccgacgccagcatccccgtgcacatcaacaacatctgccagagaaactacgtgaccgtggagagcggcagaagactgaagcccaccaacctgggcatcgtgctggtgcacggctactacaagatcgacgccgagctggtgctgcccaccatcagaagcgccgtggagaagcagctgaacctgatcgcccagggcaaggccgactacagacaggtgctgggccacaccctggacgtgttcaagagaaagttccactacttcgtggacagcatcgccggcatggacgagctgatggaggtgagcttcagccccctggccgccaccggcaagcccctgagcagatgcggcaagtgccacagattcatgaagtacatccaggccaagcccagcagactgcactgcagccactgcgacgagacctacaccctgccccagaacggcaccatcaagctgtacaaggagctgagatgccccctggacgacttcgagctggtgctgtggagcagcggcagcagaggcaagagctaccccctgtgcccctactgctacaaccacccccccttcagagacatgaagaagggcatgggctgcaacgagtgcacccaccccagctgccagcacagcctgagcatgctgggcatcggccagtgcgtggagtgcgagagcggcgtgctggtgctggaccccaccagcggccccaagtggaaggtggcctgcaacaagtgcaacgtggtggcccactgcttcgagaacgcccacagagtgagagtgagcgccgacacctgcagcgtgtgcgaggccgccctgctggacgtggacttcaacaaggccaagagccccctgcccggcgacgagacccagcacatgggctgcgtgttctgcgaccccgtgttccaggagctggtggagctgaagcacgccgccagctgccaccccatgcacagaggcggccccggcagaagacagggcagaggcagaggcagagccagaagaccccccggcaagcccaaccccagaagacccaaggacaagatgagcgccctggccgcctacttcgtgtag

SEQ ID NO: 100287 - DNA, 66 bp, Artificial Sequence
  derived and/or modified sequence
atgaagaccgtgctgatggtggccgagaagcccagcctggcccagagcatcgccaagatcctgtag

SEQ ID NO: 100288 - DNA, 1578 bp, Artificial Sequence
  derived and/or modified sequence
tgactggacagcagcctgatcagcttcggcccctgccagacccccaccctgggcttctgcgtggagagacacgacaagatccagagcttcaagcccgagacctactgggtgctgcaggccaaggtgaacaccgacaaggacagaagcctgctgctggactgggacagagtgagagtgttcgacagagagatcgcccagatgttcctgaacatgaccaagctggagaaggaggcccaggtggaggccaccagcagaaaggagaaggccaagcagagacccctggccctgaacaccgtggagatgctgagagtggccagcagcagcctgggcatgggcccccagcacgccatgcagaccgccgagagactgtacacccagggctacatcagctaccccagaaccgagaccacccactaccccgagaacttcgacctgaagggcagcctgagacagcaggccaaccacccctactgggccgacaccgtgaagagactgctggccgagggcatcaacagacccagaaagggccacgacgccggcgaccacccccccatcacccccatgaagagcgccaccgaggccgagctgggcggcgacgcctggagactgtacgagtacatcaccagacacttcatcgccaccgtgagccacgactgcaagtacctgcagagcaccatcagcttcagaatcggccccgagctgttcacctgcagcggcaagaccgtgctgagccccggcttcaccgaggtgatgccctggcagagcgtgcccctggaggagagcctgcccacctgccagagaggcgacgccttccccgtgggcgaggtgaagatgctggagaagcagaccaacccccccgactacctgaccgaggccgagctgatcaccctgatggagaagcacggcatcggcaccgacgccagcatccccgtgcacatcaacaacatctgccagagaaactacgtgaccgtggagagcggcagaagactgaagcccaccaacctgggcatcgtgctggtgcacggctactacaagatcgacgccgagctggtgctgcccaccatcagaagcgccgtggagaagcagctgaacctgatcgcccagggcaaggccgactacagacaggtgctgggccacaccctggacgtgttcaagagaaagttccactacttcgtggacagcatcgccggcatggacgagctgatggaggtgagcttcagccccctggccgccaccggcaagcccctgagcagatgcggcaagtgccacagattcatgaagtacatccaggccaagcccagcagactgcactgcagccactgcgacgagacctacaccctgccccagaacggcaccatcaagctgtacaaggagctgagatgccccctggacgacttcgagctggtgctgtggagcagcggcagcagaggcaagagctaccccctgtgcccctactgctacaaccacccccccttcagagacatgaagaagggcgagtgcagccacagcctgctgagcaccggcagctgcagcctgttcagcgtgcccacccccgccctgcaccaggccggcctgtag

SEQ ID NO: 100289 - DNA, 2589 bp, Artificial Sequence
  derived and/or modified sequence
atgaagactgtgcttatggtggccgaaaagccttcactcgcccagagcatcgcaaagattcttagtagaggatctctttcttcacacaaaggcttgaacggcgcctgctcagtgcatgagtataccgggactttcgccggccaacccgtaagattcaaaatgacctctgtctgtggccatgtaatgaccctggacttcctgggaaagtacaataagtgggataaggtggatccagcggagctcttttcacaggccccaaccgaaaagaaggaagccaatccgaagctcaacatggtaaagttcttgcaggtcgagggccggggctgtgactatatagtgctttggctggattgtgataaggagggggaaaatatttgcttcgaagtgcttgatgctgtgctgcccgtcatgaataaggcccacggaggcgagaagacagtgtttagggccaggttctcttctatcacagatacagacatctgcaatgcgatggcctgcttgggtgaacctgaccataacgaggcattaagtgtggacgcacgacaggagctggacttaaggattggctgcgcatttacgaggtttcagaccaaatacttccagggtaaatacggagatcttgacagtagtctcatctcctttggaccgtgtcagaccccaacccttggtttctgtgtggagaggcacgacaagatccagtctttcaagcctgaaacatactgggtgctccaggcgaaagtcaataccgataaggatcgcagcctcctgttggattgggatcgtgttagggtgttcgatagagagatagcacagatgttcttgaatatgacgaagctcgagaaggaggcccaggtggaggcaacaagccgaaaagaaaaagccaagcagagaccacttgccctgaataccgtcgagatgctgcgggttgcaagttcttctctgggaatggggccccagcatgccatgcagaccgccgagcgcctgtatacacagggctatatttcttatcctaggaccgagacgacacactaccctgagaactttgacctgaaggggagcctgcggcagcaggcaaatcacccttactgggcagatacagtaaagagactgcttgctgagggaatcaacaggccacggaaaggacatgatgccggcgatcatccgcccatcactcccatgaagagcgctaccgaggccgaattggggggggatgcttggagactttacgaatacatcacccgccatttcattgcaacggtctctcatgactgcaaatacctgcaatccaccattagctttcgtattggcccggaactgttcacttgctctgggaaaactgtgctgagccccgggttcactgaggtgatgccctggcagagtgtgccactagaagaaagcctcccaacatgccaacggggggatgctttcccggtcggcgaagtgaaaatgctggagaagcagaccaacccgccagactatcttacggaagcggaacttatcaccctgatggagaaacatggcattggaactgacgcatctatccccgtgcacattaataatatctgtcagaggaattacgtgacggtcgaatccggtcggcgcctaaaacctacaaatcttggcatagttctggtgcatggatactataagatcgacgcagagctcgttctacccacaatcagatctgcagtggaaaagcagttaaacctcattgcccagggaaaggctgattaccggcaggtgttgggccacacccttgacgtctttaaaaggaagttccactatttcgtggattctatcgctggtatggacgaattaatggaggtgagctttagccccctcgctgccacagggaaacctcttagccgatgcgggaagtgccacagatttatgaaatatatccaggcaaagcccagtcgcctgcattgttctcactgcgacgagacttatacgctcccccagaacgggacaattaaactgtacaaagagttaaggtgccctttggacgactttgagcttgtgctgtggtcatccggaagccgcggaaagtcatacccattgtgcccatactgttataaccatcccccctttcgcgacatgaagaaaggaatgggctgtaacgagtgtacacacccatcttgtcagcatagcttatctatgctgggcattggccagtgtgttgagtgcgagtctggcgtgcttgtgctggaccccacctcaggcccaaagtggaaggtcgcttgtaacaaatgtaatgtggtggcccactgttttgaaaacgcgcacagggtgcgtgtgtccgcggacacatgcagtgtctgtgaggcggctctactggacgtggacttcaataaggcaaaatcacccttgcctggcgacgagacacagcatatgggctgcgttttttgcgaccctgtattccaggagctggtggaattaaaacacgcagccagttgccaccccatgcaccgtggtggacctggaaggagacagggaagaggaagaggacgggcgcggaggccacctgggaagccaaatcctcggcgcccaaaagataaaatgagtgcactggccgcatactttgtgtag

SEQ ID NO: 100290 - DNA, 2589 bp, Artificial Sequence
  derived and/or modified sequence
atgaaaactgtactgatggtggcagagaaaccttcgctcgcccagtcaatcgcaaagatcctgagtcgcggcagtctgagctcacataaaggccttaatggtgcatgttccgttcacgaatataccggcaccttcgccggccagccagtcagatttaaaatgacctccgtgtgcgggcacgtcatgaccttggactttctgggaaaatacaacaagtgggacaaagtggatcccgcggagcttttctcacaggcccctacggaaaagaaagaagctaatccaaagctgaacatggttaagttcctacaagtcgaagggcggggctgcgactatattgtgctctggctggattgcgataaagagggtgaaaacatctgcttcgaagtcctggacgcagtcttgccagttatgaataaggcccacggcggggagaagaccgtgtttcgcgctcgcttttcttcaatcaccgacacagacatctgcaacgcgatggcatgtcttggggagcctgatcataacgaagctctgtctgttgacgcaagacaggagctcgatctcagaatcggctgcgccttcacccggtttcagacaaagtattttcagggaaaatatggtgatctggactcatccctcatctccttcggcccttgccagactcctacactgggcttttgtgttgaaaggcatgataagatccaatcttttaagccggaaacttattgggtgctccaggccaaggtcaataccgataaggaccgcagtcttctcttagattgggatcgagtgagggtttttgaccgcgagattgcccagatgtttctgaacatgaccaagctcgagaaagaggcacaagtggaggcgacatcgaggaaggagaaagccaagcagcggcctctggccctgaatactgtggagatgcttagggtggcgagcagctcactcggaatgggaccacagcatgccatgcagaccgcggagagactgtacacgcagggttacattagttatcctcgaacggagaccacacactaccctgaaaacttcgacctgaagggatctctgagacaacaggctaaccacccctactgggcagacaccgtcaagcggcttctggccgaaggaatcaataggccgaggaaagggcacgacgcgggcgaccatccacctatcaccccaatgaaatccgctacagaggcggagctcggtggcgatgcatggcggctgtacgaatatattactaggcactttattgcaacagtatcacatgattgcaagtacttacaaagtactatcagcttccgtatcggaccagaattgtttacctgctcaggtaagactgtactgagcccaggcttcaccgaggttatgccttggcagtcagtgcctctggaagagtcactaccgacttgccagcggggggatgcgtttcccgtgggggaagtaaaaatgctggagaaacagaccaaccctcccgactatttgactgaggctgaactcatcacccttatggaaaaacatggaatcggcaccgacgcgtcaatcccagtgcacatcaataacatttgccagcggaactatgtcacagtggaaagtgggcgacggttgaagccaacaaacttagggatcgtgctcgtacacggctattacaagatcgatgccgaactggtgctgcccacaatcaggtccgccgtcgagaagcaactgaatttaatagcccagggcaaggctgactacaggcaggttctgggccatactctcgacgttttcaagcgcaagtttcactatttcgtggattctattgccggtatggacgaattaatggaggttagtttcagtcccttggcagccacaggaaagcccctctcgagatgtggcaaatgccacaggtttatgaagtatatccaggcaaagccatcgcgcctgcactgttcacactgcgatgaaacgtacacattaccccaaaacggcacaatcaagctgtataaagagcttcgctgccccctggatgacttcgagctcgtcttgtggtcatctgggtcccgcgggaaatcctatccactgtgtccctattgttacaatcacccacctttccgagacatgaagaaaggcatgggttgcaatgaatgtactcacccgtcctgtcagcacagcctcagcatgctggggattggccagtgtgttgagtgtgagtctggcgtcctagtcctggacccaaccagcggccctaagtggaaagtcgcatgcaacaagtgcaacgtggttgcccactgctttgagaatgcgcacagagtacgggtcagcgccgacacgtgtagcgtgtgcgaggctgctctgctggatgtggacttcaataaggctaagagtcctcttccgggggacgagacccagcatatgggatgtgtcttttgcgaccctgtgttccaggagttggtcgaactgaagcacgcagcctcgtgccaccccatgcatcggggaggccccggtcgccggcagggacgaggccggggcagagctagacgtcctcctggaaaacctaacccccgcaggcccaaagataagatgtctgctttagccgcttatttcgtttag

SEQ ID NO: 100291 - DNA, 66 bp, Artificial Sequence
  derived and/or modified sequence
atgaagactgttctcatggtcgcggaaaaaccgagcctggcacagtctatcgctaagatcctgtag

SEQ ID NO: 100292 - DNA, 1578 bp, Artificial Sequence
  derived and/or modified sequence
taactggattccagtctcattagtttcgggccgtgccagacccctactctgggcttctgcgttgaacggcacgataaaattcagagcttcaaaccggaaacctactgggtcctgcaggcgaaagtaaacacggataaagataggagcctgctgttggattgggatcgggtaagagtgttcgatcgtgagatagcacagatgttccttaatatgactaagctcgagaaagaagcacaagtcgaggcgacctcaagaaaagagaaagctaagcagcggcccctggccttaaacacggttgagatgctgagagtggcatcttcgtccttgggcatgggaccacagcacgccatgcagacagctgagaggctttacacacagggctatatctcttatccccggactgaaacaactcactatcccgaaaacttcgatctgaagggctcactacgccagcaggccaaccacccctactgggccgacactgtaaaaaggttgctggccgagggcatcaatcggcctcgcaagggccatgatgccggtgatcacccacctatcaccccgatgaagagcgctacagaagctgagcttgggggcgatgcatggagactgtatgaatatataacccgccacttcatcgccacagtgagtcacgactgtaagtacttacaaagtacaatttcctttcggatcggcccggagctttttacatgcagtggcaaaactgtcctttcccccgggtttactgaggtcatgccatggcagtccgttccgctcgaggaatccctcccaacatgccagagaggggacgcctttcctgtaggagaagtcaagatgctagaaaagcagactaatccgcccgactacttgaccgaggctgagttaattactctgatggaaaagcacggtatcggaacggatgcttccatccccgttcacattaacaacatttgccaaaggaattatgtgactgtggagtcgggtaggagattgaaaccgacaaatctgggaatagtgctggtccatgggtactataaaatcgacgcggaactggtcctcccgaccatcaggtctgcagtcgagaagcagttaaatttaattgcccaggggaaagctgattaccgtcaggtgctgggccacaccctggatgtcttcaaaaggaaatttcattactttgtggactctatcgctggcatggatgagttgatggaagtatcattcagcccactggctgccacaggcaaaccactcagtcgctgcggcaaatgtcaccgattcatgaaatacatacaagccaaaccaagccgtctacattgctcccactgcgacgagacttacactctcccacaaaatggtacaattaagctatataaggaactccgatgcccactggatgactttgaacttgtcttgtggagctccggctctcgtgggaaatcctaccctctctgcccttactgctacaaccatcctccattccgggacatgaagaaaggcgagtgttcccactcccttctctccacggggtcatgtagccttttcagcgtgcccacccctgccctgcaccaggctggactgtag

SEQ ID NO: 100293 - DNA, 2589 bp, Artificial Sequence
  derived and/or modified sequence
atgaagacagtgctgatggtggccgagaagcccagcctggcccagagcatcgccaagatcctgagccggggcagcctgagcagccacaagggcctgaatggagcctgcagcgtgcatgagtacacaggcacctttgctggccagcctgtgcgcttcaagatgacctctgtgtgtggccacgtgatgaccctggacttcctgggcaagtacaacaagtgggacaaggtggaccctgctgagctgttcagccaggcccccacagagaagaaggaggccaaccccaagctgaacatggtgaagttcctgcaggtggagggccggggctgtgactacatcgtgctgtggctggactgtgacaaggagggggagaacatctgctttgaggtgctggatgctgtgctgcctgtgatgaacaaggcccatggaggagagaagacagtgttccgggcccgcttcagcagcatcacagacacagacatctgcaatgccatggcctgcctgggggagccagaccacaatgaggccctgtctgtggatgcccggcaggagctggacctgcgcatcggctgtgccttcacccgcttccagaccaagtacttccagggcaagtacggggacctggacagcagcctcatcagctttggcccctgccagacccccaccctgggcttctgtgtggagagacatgacaagatccagagcttcaagccagagacctactgggtgctgcaggccaaggtgaacacagacaaggacaggagcctgctgctggactgggacagagtgcgggtgtttgaccgggagatcgcccagatgttcctgaacatgaccaagctggagaaggaggcccaggtggaggccaccagcaggaaggagaaggccaagcagaggcccctggccctgaacacagtggagatgctgcgggtggccagcagcagcctgggcatgggcccccagcacgccatgcagacagctgagcggctgtacacccagggctacatctcctaccccaggacagagaccacccactacccagagaactttgacctgaagggcagcctgcggcagcaggccaaccacccctactgggccgacacagtgaagaggctgctggccgagggcatcaaccggcccaggaagggccatgatgctggggaccacccccccatcacccccatgaagagcgccacagaagctgagctgggcggagatgcctggaggctgtatgagtacatcaccaggcacttcatcgccaccgtgtcccatgactgcaagtacctgcagagcaccatctccttcagaattggccctgagctgttcacctgcagcggcaagacagtgctgagccctggcttcacagaggtgatgccctggcagagcgtgcccctggaggagagcctgcccacctgccagagaggagatgccttccctgtgggggaggtgaagatgctggagaagcagaccaaccccccagactacctgacagaagctgagctgatcaccctgatggagaagcacggcatcggcacagatgccagcatccctgtgcacatcaacaacatctgccagaggaactacgtgacagtggagagcggccgccgcctgaagcccaccaacctgggcatcgtgctggtgcacggctactacaagattgatgctgagctggtgctgcccaccatccgctctgctgtggagaagcagctgaacctgattgcccagggcaaggctgactaccggcaggtgctgggccacaccctggatgtgttcaagaggaagttccactactttgtggacagcattgctggcatggatgagctgatggaggtgtccttcagccccctggccgccaccgggaagcccctgagccgctgtgggaagtgccaccgcttcatgaagtacatccaggccaagcccagccggctgcactgcagccactgtgatgagacctacaccctgccccagaatggcaccatcaagctgtacaaggagctgcgctgccccctggatgactttgagctggtgctgtggagcagcggcagccggggcaagagctaccccctgtgcccctactgctacaaccacccccccttccgggacatgaagaagggcatgggctgcaatgaatgtacccaccccagctgccagcacagcctgtccatgctgggcatcggccagtgtgtggagtgtgagagcggcgtgctggtgctggaccccaccagcggccccaagtggaaggtggcctgcaacaagtgcaatgtggtggcccactgctttgaaaatgcccaccgggtgcgggtgtctgctgacacctgcagcgtgtgtgaggccgccctgctggatgtggacttcaacaaggccaagagccccctgcctggagatgagacccagcacatgggctgtgtgttctgtgaccctgtgttccaggagctggtggagctgaagcacgccgccagctgccaccccatgcacagaggaggccctggaagacggcagggccggggccggggccgggcccggcggcccccaggcaagcccaacccccggcggcccaaggacaagatgtctgccctggccgcctactttgtgtag

SEQ ID NO: 100294 - DNA, 66 bp, Artificial Sequence
  derived and/or modified sequence
atgaagacagtgctgatggtggccgagaagcccagcctggcccagagcatcgccaagatcctgtag

SEQ ID NO: 100295 - DNA, 1578 bp, Artificial Sequence
  derived and/or modified sequence
tgactggacagcagcctcatcagctttggcccctgccagacccccaccctgggcttctgtgtggagagacatgacaagatccagagcttcaagccagagacctactgggtgctgcaggccaaggtgaacacagacaaggacaggagcctgctgctggactgggacagagtgcgggtgtttgaccgggagatcgcccagatgttcctgaacatgaccaagctggagaaggaggcccaggtggaggccaccagcaggaaggagaaggccaagcagaggcccctggccctgaacacagtggagatgctgcgggtggccagcagcagcctgggcatgggcccccagcacgccatgcagacagctgagcggctgtacacccagggctacatctcctaccccaggacagagaccacccactacccagaaaattttgacctgaagggcagcctgcggcagcaggccaaccacccctactgggccgacacagtgaagaggctgctggccgagggcatcaaccggcccaggaaaggacatgatgctggggaccacccccccatcacccccatgaagagcgccacagaggccgagctgggcggagatgcctggaggctgtatgagtacatcaccaggcacttcatcgccaccgtgtcccatgactgcaagtacctgcagagcaccatctccttccgcatcggccctgagctgttcacctgcagcggcaagacagtgctgagccctggcttcacagaggtgatgccctggcagagcgtgcccctggaggagagcctgcccacctgccagagaggagatgccttccctgtgggggaggtgaagatgctggagaagcagaccaaccccccagactacctgacagaggccgagctgatcaccctgatggagaagcatggaattggaacagatgccagcatccctgtgcacatcaacaacatctgccagagaaattatgtgacagtggagagcggccggcggctgaagcccaccaacctgggcatcgtgctggtgcacggctactacaagattgatgctgagctggtgctgcccaccatccgctctgctgtggagaagcagctgaacctgattgcccagggcaaggctgactaccggcaggtgctgggccacaccctggatgtgttcaagaggaagttccactactttgtggacagcattgctggcatggatgagctgatggaggtgtccttcagccccctggccgccaccgggaagcccctgagccgctgtgggaagtgccaccgcttcatgaagtacatccaggccaagcccagccggctgcactgcagccactgtgatgagacctacaccctgccccagaatggcaccatcaagctgtacaaggagctgcgctgccccctggatgactttgagctggtgctgtggagcagcggcagccggggcaagagctaccccctgtgcccctactgctacaaccacccccccttccgggacatgaagaagggagaatgtagccacagcctgctgagcacaggcagctgcagcctcttctctgtgcccaccccagccctgcaccaggccggcctgtag

SEQ ID NO: 100296 - DNA, 2589 bp, Artificial Sequence
  derived and/or modified sequence
atgaagaccgtgctgatggtggccgagaagcccagcctggcccagtcaatcgcaaagatactgagccgcgggtctctgtccagtcacaagggcttgaacggcgcttgctccgttcatgaatatacggggacattcgcggggcaacctgtgcgattcaaaatgactagtgtgtgcggccatgtgatgacactggattttctcggtaaatacaataagtgggataaggttgaccctgcagaattatttagtcaggcccccaccgaaaagaaagaggccaacccgaagctgaatatggtgaagtttctgcaggtggagggtcgcggatgtgactatatcgtgctgtggctggactgcgataaggaaggcgagaatatctgctttgaggtattagatgccgttctgcctgttatgaacaaagcccacgggggagagaagactgtcttccgcgcccgtttctcttctatcactgataccgacatttgtaacgccatggcttgccttggtgaaccagatcacaatgaggcgctgtctgtcgatgcaaggcaggaactagatctgagaatcggatgcgcctttactagatttcaaacaaaatacttccagggtaagtacggggatctcgattcttctctgatctcctttggaccctgccagacacccaccctgggcttttgcgtcgagagacacgacaaaatacagtcattcaaacccgaaacctattgggtgctgcaggcgaaggtaaacacagataaggaccgtagcctcctcctagattgggaccgcgtgcgtgtgttcgatagagagattgcacaaatgtttctgaacatgactaagcttgagaaagaagcccaggtcgaggccacaagccgaaaggagaaagccaagcagagacctctggccctcaatacagtggaaatgttgcgtgtagcctcttcttctctggggatgggaccccagcatgcaatgcaaacagccgaaagactttacactcagggctatattagctaccccaggactgagacaactcattacccggaaaacttcgacttaaaggggtcactgcggcagcaggccaaccacccgtactgggccgatacggtgaaaaggctcttagcggaggggatcaatcgcccgcgtaaagggcacgatgcaggcgaccatccaccaattacaccaatgaagagcgccaccgaagcagaattgggtggagacgcttggcgcctctacgaatacattaccagacatttcattgccacagtctcccacgattgtaaatacctgcagtctacaataagttttaggattggacctgagctctttacatgttcgggcaaaaccgtcttatctccgggatttaccgaggtgatgccctggcaaagtgtgccacttgaagagagccttcctacctgccaacgaggcgatgcctttcccgttggcgaggtcaagatgctcgagaaacagactaatcccccagattacctgacagaagcagaacttatcaccctaatggagaaacatggaatagggactgatgcgtctatccctgttcatataaataatatctgccagcgcaactacgtgaccgtggagtcaggcaggaggctgaagccaacaaacctcggaatagttctcgtgcatgggtattataagattgacgcggagttagtcctgcctaccatccgctcggctgtggagaagcagctcaacctcatagcccaggggaaagccgactaccgtcaggtcctgggacacacattggatgtgtttaagcgcaagtttcattatttcgtagactctattgccggcatggacgagctgatggaagtgtctttcagccctttagccgctacgggcaagcctttgtctagatgtggcaaatgtcaccgctttatgaagtatatccaggcgaagcccagtagattgcactgctcccattgtgatgagacttataccttgccacagaacggaacgatcaaactatacaaggagttgaggtgccccctggatgatttcgaattagtcttgtggagcagcggcagccgtggcaaatcgtacccactgtgcccatattgttataaccaccccccttttagagatatgaaaaaggggatgggctgcaacgagtgcacacacccgtcgtgccaacacagtctaagcatgctgggaatcggtcagtgcgttgaatgcgagtctggcgtcttagttcttgacccaacgtccggtcccaagtggaaggttgcttgcaacaagtgcaacgttgtggcccactgctttgaaaacgctcatagggtaagagtgagtgctgatacctgtagcgtgtgcgaggccgcactgctggacgtggactttaataaggctaagagtcctttgcctggtgacgagactcagcacatgggctgcgttttttgtgatcccgtctttcaggagcttgtagaactcaagcacgccgcctcctgtcaccccatgcaccgtggcggaccaggccgccgtcaaggcaggggtcgcggcagggcccggcgtcccccaggaaaaccgaaccctaggcggcctaaagataagatgtccgcgctggcagcctactttgtgtag

SEQ ID NO: 100297 - DNA, 2589 bp, Artificial Sequence
  derived and/or modified sequence
atgaagaccgtgctgatggtggccgagaagcccagcctggcccagtctatcgcaaaaatcctatcccggggttcccttagttcgcataaaggactgaacggcgcctgcagtgtgcacgagtatacgggaacatttgcaggtcagccagtgcgctttaagatgacctccgtctgcgggcatgtcatgaccttggacttcctgggcaagtataacaagtgggataaagtcgatccggctgagttgttttcacaggccccgaccgagaagaaagaggcaaatcctaagctgaacatggttaagtttctccaagtcgaagggaggggctgtgattacattgtgttatggctggactgcgacaaggagggggagaacatctgctttgaagtactggatgccgtgctgcccgttatgaataaggcccacggaggagagaaaacagttttcagagccaggttctccagcatcactgacacagatatttgtaacgcaatggcttgtctcggggagcctgatcataacgaggctctctctgtggacgcacgacaggaactagatctgcgaattgggtgcgccttcactcggttccagaccaagtatttccaagggaagtatggagatttggactcctccttgattagcttcggaccatgtcaaacacctaccctgggcttttgcgtggaaaggcatgataaaatccagagtttcaaacctgaaacatactgggtgctccaggcaaaagtcaacaccgataaagatcggtctttactgctagattgggatcgtgtgagggtattcgatagggagatcgcacaaatgtttctcaatatgaccaagctcgaaaaggaagcacaggtggaagctacctcacggaaggagaaggctaaacagcgccctcttgctctgaatactgttgaaatgctacgcgtggcgtcttccagcttaggcatgggtccgcaacatgcaatgcagaccgcagagagactttacacacagggctacatttcttatccaaggactgaaacaacacactaccctgaaaacttcgaccttaaagggagcttgagacaacaagcgaatcacccatactgggctgacacagtcaagcgattgctggcagaagggattaatcgcccacgaaaaggacacgacgccggagatcaccctcctatcactcctatgaagtccgccacagaagccgagctgggaggagatgcctggagactttacgaatatattacccgacatttcattgccaccgtgtcccacgattgtaaatatctacagagcacaatctcctttcgtatcggtccagaactatttacttgctctggcaagaccgtcttatccccaggctttacagaagtgatgccgtggcagtccgttccgctggaagagagcctgcctacatgtcagagaggagatgcattcccggtgggcgaagttaagatgctagagaaacagaccaacccgccggattatctcacagaggccgaactgattaccttgatggaaaaacatggtatcggtacagatgcgtccattcctgttcacattaataacatttgtcaacgcaactacgtgacagtggagtctggtcggcgcttaaagcccactaatctcggaatagtactcgtgcacggctactacaaaatagacgccgaacttgtgctcccaacgatcaggtcggccgtggaaaagcagttgaatttgattgcacagggtaaggctgattacaggcaggtgcttgggcacacgctggacgtgtttaagcgaaagttccactactttgtcgattccatcgccggaatggacgagttgatggaggtttcttttagtcctttagccgctacaggcaaacctctgtcgagatgcggaaaatgtcaccgtttcatgaagtatatccaagcgaaaccttctcggctgcactgctcccattgtgacgagacatatactctgccccagaatggaaccatcaagctgtacaaggagttgcggtgccccctggacgattttgagctggtcctgtggagctctggatcccgcgggaaaagctacccgctgtgcccctactgctataaccatcctccttttcgtgacatgaaaaagggaatgggctgcaatgaatgtacccatccttcctgtcagcacagtcttagtatgctggggatcggacagtgtgtggaatgcgaatctggagtcctcgtgctcgaccctacctccggaccaaaatggaaggttgcatgcaataaatgtaatgtggtggcacactgctttgagaatgcccatcgggtgcgtgtatcagctgacacttgtagcgtttgcgaggcagccctgctagacgtcgacttcaataaagccaagtctccgctgcccggagacgagacccagcacatggggtgcgtgttttgtgaccctgtcttccaggaactggtcgaactgaagcatgccgcatcttgtcatcccatgcaccgcggaggtcctgggcgaagacaggggagggggcgaggacgcgctagaaggcctcctggcaaacctaacccccggcgccccaaggacaagatgtccgccctcgccgcttacttcgtctag

SEQ ID NO: 100298 - DNA, 66 bp, Artificial Sequence
  derived and/or modified sequence
atgaagaccgtgctgatggtggccgagaagcccagcctggcccagagcatcgctaagatcctctag

SEQ ID NO: 100299 - DNA, 1578 bp, Artificial Sequence
  derived and/or modified sequence
tgactggacagcagcctgatcagcttcggcccctgccagacccccaccctaggtttctgcgtggagagacatgacaagatccagagcttcaaaccagaaacctattgggtgttgcaggccaaagtgaatacggataaagacaggagtctactgctggattgggacagggtgagggtgttcgacagagaaatcgcccaaatgttccttaacatgaccaaattagaaaaggaggctcaggtggaagccacgtcgcgaaaggagaaggccaagcagagaccgttggctctgaatactgtcgaaatgctgcgggtggcttcttcgagcctgggcatgggcccacagcatgccatgcagacagccgaacggttgtacactcagggatacatctcctatccaagaacagagactactcactatcctgagaatttcgatttaaaagggagcttacgacagcaggccaatcacccctactgggccgatacggtgaaacgcctgctggctgaaggtatcaatcgccccaggaagggccatgatgccggggatcatccccctattactccaatgaaaagtgccactgaagccgaattgggcggagacgcctggagattatacgagtacattacaaggcattttatcgccacggtctcccatgattgcaaatatctccagagcacaatatctttcaggattgggcctgaactttttacatgtagcggcaagacagtgttaagtccaggttttacagaggtgatgccgtggcagagcgtgcccctagaagagtcattgccaacctgccagaggggcgatgcgttccccgtgggcgaagtaaaaatgctcgagaagcaaacaaatccaccggactatctgactgaggccgagctgattacactaatggaaaaacatggtattggaaccgacgcaagcatccctgtccatataaataatatatgccaaaggaattacgttacagtcgagtccggccgcaggctgaagcctacaaatctgggtatagtgctagtgcatgggtactataagatcgatgccgaactggtgctgcccacgatcaggtccgccgtagaaaagcagctgaacctgattgcccagggcaaagccgattacagacaagtactcggacataccctagatgtgtttaagagaaagttccattatttcgtggatagcatcgctggtatggacgaactgatggaggtgtctttctcgccactggctgccactggtaagccattgtcccggtgtggcaaatgccatcggttcatgaaatacatacaagccaaaccttcacgtctccattgctcacattgtgacgaaacctacacgttgccccagaacggcaccattaaactttacaaagagctgcgctgtcctctggacgatttcgaactggtgctgtggagcagcggatctcgcgggaaaagttacccgctgtgcccttattgctataaccatcctccattccgggacatgaagaagggtgagtgttcccactcacttctgagtactggctcgtgttccctctttagcgtacctacaccggccctacaccaggctggactgtag

SEQ ID NO: 100300 - DNA, 2589 bp, Artificial Sequence
  derived and/or modified sequence
atgaaaactgtcttaatggttgccgaaaagccctccctggctcagagcattgcaaagatcctatcacgcggatccttatccagccataagggtctcaatggagcctgctccgtacacgagtacactggcactttcgccggtcagccagtgcggttcaagatgacaagtgtgtgcggtcacgtcatgactctcgatttcctcggcaagtacaacaagtgggacaaagtcgatcccgctgaactcttttctcaggcacctacagaaaaaaaagaagctaacccaaagttgaacatggtgaaatttctacaagtggagggcagaggttgcgattatatcgtcctctggcttgattgcgacaaagagggcgaaaacatctgctttgaggtgctagacgctgtactcccagttatgaataaggcacatggcggtgagaagactgtgttcagggcgcgttttagcagcatcaccgacacagatatctgcaacgctatggcatgtctcggggaacccgatcataacgaagctctgagtgttgacgcacggcaggagctcgacttgcgtatcggttgcgcttttactcgcttccagaccaaatacttccaggggaagtacggcgatttggactccagcctgatctcatttgggccttgtcagaccccaactcttggtttttgtgtagaacgccatgataaaattcagagcttcaagcctgagacatattgggtcctgcaggccaaagtgaataccgacaaagaccgctccctactgcttgattgggatcgcgtgcgtgtgttcgaccgggagatagcccagatgtttctcaatatgactaaactggagaaagaagctcaggttgaggcgactagtagaaaggagaaggctaagcagagaccgctggctctcaacacagtggagatgctgcgggttgcgagctcctcactgggcatgggccctcagcacgccatgcaaactgccgagcggttgtatacccagggatacatttcatatcctagaaccgagacaacacattaccccgagaattttgacttgaagggctccttgcggcagcaagctaatcacccctactgggctgacacagttaagaggctgctagcagaggggattaatagacccaggaagggccacgacgctggcgatcaccctcctattaccccaatgaaatccgcaaccgaggctgagcttggaggagacgcatggcgcctatacgaatacatcacaagacattttatcgcgacagtgtcccatgattgcaaatacctgcaaagcacgatctcttttcgtattgggcctgagctgtttacatgtagtgggaaaactgtcctcagtcctggatttacagaagtgatgccttggcagtctgtgccactggaggaaagcctcccaacgtgccaacggggagacgcctttcccgtaggcgaagtgaaaatgctggagaagcaaaccaatccccctgattacctgacagaggcagaactaataacgcttatggagaagcatggcattggcaccgatgcatcaattcccgtgcatataaacaatatttgccagcgaaactatgttaccgtggagtcagggaggcgccttaaacctactaacctcgggattgtgctggtccacggctactataaaatcgatgctgaattggtccttcctaccatcaggtcagcggttgagaagcagctgaacctgattgcccaaggtaaggccgactatcgacaggtgctgggtcacacactcgacgtctttaagaggaagttccactacttcgttgactccatcgcgggaatggacgaattaatggaagtctctttctccccccttgcggctacggggaagcccctgtctagatgtgggaagtgccaccggttcatgaagtacatccaggcgaagccaagcaggttgcactgtagccactgcgacgagacctatactttaccacagaatggcacaattaaactgtataaagagttgcgctgccccctagacgatttcgagctggtactgtggtccagcggcagcagaggaaagagctaccctttatgtccgtattgctataaccatcccccatttcgggacatgaaaaaaggaatggggtgtaacgagtgcacacacccctcatgccagcactcgttatcaatgttgggaattgggcagtgtgtggaatgtgagagcggtgtgctggttctggatccaacctctggaccgaagtggaaagtggcatgtaacaaatgcaacgtggtggctcactgtttcgagaatgcgcaccgtgtccgtgtctccgccgacacctgctccgtatgtgaggctgccttactggatgtcgacttcaataaggccaagtcaccgctcccaggtgatgaaacacagcatatgggttgcgtgttttgtgatcctgtttttcaggaactcgtggagctcaaacatgctgcctcctgccatccaatgcacaggggaggacccggtcggcgacagggcagaggtcggggaagggctcgtaggccccctggcaaaccaaaccctcggagacccaaagataaaatgagtgcccttgcagcgtacttcgtctag

SEQ ID NO: 100301 - DNA, 2589 bp, Artificial Sequence
  derived and/or modified sequence
atgaagactgtgttgatggtagctgagaaaccaagcttggctcaaagcatcgctaagatcctctcccgaggatctctctctagtcataagggccttaacggcgcatgctcagtacatgagtatactgggacattcgcaggacaacctgtacggtttaagatgaccagcgtgtgcggacacgtgatgacactagacttcctcggaaagtacaacaaatgggataaggttgacccagcagagctgttcagtcaggcccctaccgagaaaaaagaggcaaatcccaagttgaacatggttaaatttttacaggtcgagggtaggggatgcgactacatagtgctatggttagactgcgacaaggaaggcgaaaatatttgtttcgaggttctcgacgccgtgctcccagtcatgaacaaggcccacggtggggaaaaaaccgtttttagagcgaggttctcatcgattactgacaccgatatctgcaacgccatggcgtgtctgggtgaaccagatcacaacgaagcactgagcgtggacgcccgtcaagagctggatctccgtatcggctgcgcatttacgcgttttcagacgaagtacttccaggggaagtatggagacctggattcgtctctcataagcttcgggccttgtcagacccctaccttaggcttctgtgtagagagacacgacaaaatccaaagttttaaaccagaaacatattgggttctgcaggcgaaggtgaacacggataaagatcgtagcctgttgctggattgggatagggtgcgcgtattcgaccgagagatcgctcagatgttcctcaatatgacaaaactggagaaagaggctcaggtggaagccacctcacgtaaagagaaggctaagcaacggcctctggctcttaacactgtggaaatgttaagggtcgcttccagctctctgggtatggggcctcaacacgcgatgcaaaccgccgaacgcttgtacacccaaggttatatatcctatccacgcacggagaccacccactacccggagaacttcgatctcaagggatcactccgccaacaggctaaccacccgtactgggctgacacagttaaacgactgttggcggaggggattaacagacccaggaagggccatgacgccggtgaccacccccctatcacccccatgaagagtgccacggaggctgagctgggaggcgatgcctggaggctgtatgaatatattacgaggcattttattgctactgtctctcacgactgcaagtatctgcagtctacaattagctttagaatcggcccagagttgtttacttgctcgggtaaaacggtgctttctcctggattcaccgaagttatgccatggcagagcgtcccactagaggagtctctgcctacgtgtcagcgcggagatgccttccccgtcggggaagtaaagatgcttgagaaacagactaacccaccagactatcttaccgaggcggaactcattacactgatggaaaaacacggaatcggtaccgacgcctctattcctgtgcacataaataacatttgccaacgaaactacgtgaccgtggaatctgggaggaggctgaagcctacgaacctgggcatcgtcttggtgcacgggtattacaagatcgatgctgagctggtccttccaacaatccggagcgcggttgaaaaacagctgaacctgatagcccaggggaaggccgactaccggcaagtgctgggacacaccttagacgtttttaaacgtaagttccattacttcgtcgactccatcgcgggtatggacgagttaatggaggtaagcttttccccactggctgccactggcaaacctctgtctcgctgcggtaagtgtcatcgattcatgaaatacattcaagctaagcccagccggttgcactgtagccactgtgacgagacttacaccctgccccagaacggcacaattaagctctacaaggaattgaggtgccccttggacgactttgagctcgtcctgtggagtagcggttcacggggtaagagctaccccctgtgcccatactgctacaatcatccgccttttcgcgacatgaagaagggtatgggctgcaatgaatgtactcatccttcctgtcagcacagtctaagtatgctggggattggtcagtgcgtggagtgtgaatctggggttctcgtgctcgatccaacctctggacctaagtggaaggtggcgtgtaataagtgtaatgtggtggctcactgtttcgagaatgcccatcgcgtacgggtgtctgcggatacctgttctgtttgtgaagcagccttgcttgacgtcgacttcaacaaagcaaagtcgccattgcccggagacgagacccagcacatggggtgtgtgttctgcgacccagtgttccaggagttagtggaacttaagcacgccgctagttgtcatcccatgcatcgaggaggacccggtaggcggcagggcagggggaggggcagagccaggcgaccccctggcaaacctaaccctcgacggcctaaggacaagatgtctgccctagccgcttattttgtgtag

SEQ ID NO: 100302 - DNA, 66 bp, Artificial Sequence
  derived and/or modified sequence
atgaagaccgtcctcatggtggctgagaagcccagcttggcccagtccatcgctaagatactctag

SEQ ID NO: 100303 - DNA, 1578 bp, Artificial Sequence
  derived and/or modified sequence
tgacttgactcctccctgatctcatttggtccctgccagactcccaccctggggttctgtgttgaacggcatgataaaattcagagcttcaagcccgagacgtactgggtgttacaagccaaggtgaacacggacaaagacagatccctgttactcgactgggaccgggtacgggtgttcgatagagaaatcgcgcaaatgtttctgaatatgactaagcttgaaaaagaggcgcaagtggaggcaactagcaggaaggagaaagctaaacagcgcccactcgcgctgaatacagtggaaatgcttcgggtggctagcagcagtctaggcatgggaccacagcacgccatgcagactgccgagcgactgtacacgcagggctacatctcctacccacgtaccgagaccacccactatcctgagaacttcgatctgaaaggaagcctacggcagcaggccaatcatccgtactgggccgataccgttaaaaggttactcgctgagggaatcaaccgccctcggaaaggacacgacgccggagaccatccgcctataacccctatgaaatcagccaccgaagctgaacttgggggagacgcttggcggctgtatgagtacataacaagacattttatcgctacagtatcccacgattgcaaatatctacaatcgacaatcagttttaggattgggcctgaactttttacttgcagcggaaaaaccgtcctttcgcccggtttcaccgaagtcatgccttggcagtcagtgccgcttgaagaatccctgccgacctgccagcgcggagatgcttttcccgtgggcgaggtgaagatgctggaaaaacagaccaatccaccagattatctgaccgaggctgagttaattactctgatggaaaaacacggcatcgggactgacgccagcattcctgtgcacattaataacatttgtcagcgcaattacgtcactgtggaaagcggccgaagattgaaacccacgaatctaggcattgtgctcgtgcatgggtactacaagatagacgccgagctggtgcttcctacaatcaggtcggcagtagaaaagcagctaaacttgattgctcaaggcaaagccgattataggcaagttctcgggcacactttggatgttttcaagcgaaagtttcactacttcgtggattctatcgccggtatggatgagctcatggaggtttccttcagccccctcgccgctacagggaagcccttgtcccgttgtgggaagtgccacagatttatgaagtacatacaggcaaaaccctccaggctccattgttctcactgtgatgagacatacaccctcccacagaacggcacaattaaattgtataaagagctccggtgtcctctcgatgattttgaattagtgctgtggtcttccggctctcggggaaagtcatatcccctgtgtccctattgttacaaccatccacctttccgagatatgaaaaaaggggagtgttcccactctctgctgtctactgggagctgcagccttttctccgtccccaccccagctctccatcaggccggactgtag

SEQ ID NO: 100304 - DNA, 2863 bp, Artificial Sequence
  derived and/or modified sequence
gccagaagcggctggacccggaaataggggttgtcggtagccgccccgggaacaaggaccggagctggatccgcggtgcggctgtgggagtcagcattggtaatagtgctgtgctgcggaagagtggagtctaaactttttcattgccagtgccccgaaactggagtgtgaaggaccgagacaaaatgaagactgtgctcatggttgctgaaaagccgtccttggcacagtcaattgccaaaatcctctctagagggagcctgtcctcacacaaagggctgaacggggcctgctcagtccacgagtacactgggacctttgctggccagccagtgcgcttcaagatgacgtctgtctgtggtcacgtgatgaccctggatttcctgggaaaatacaacaaatgggacaaagtggaccccgcagaactgttcagccaagctcccacggagaagaaagaagctaaccccaagctgaacatggtgaagttcctgcaggtggagggcagaggctgcgactacatcgtgctgtggctggactgcgacaaggagggggagaacatctgctttgaggttcttgatgctgttctgcccgtcatgaacaaggcccatggtggcgagaagaccgtgttccgggccaggtttagctccatcacggacacagacatctgtaatgccatggcctgcctaggcgagcctgaccacaacgaggcgctctcagtggatgctcgccaggagctggacctgcgaatcggctgtgcattcaccaggtttcagactaaatatttccaggggaaatacggtgatttagacagctctctcatctcctttgggccgtgtcagactccaaccctgggattctgtgtggagagacatgataaaatccagtccttcaaaccagagacctactgggtgctgcaggccaaggttaacactgacaaagacagatctctccttttggactgggaccgagtaagagtgtttgaccgggagatcgcacagatgtttttaaacatgacaaagctggagaaggaagcccaggtggaggccacaagcaggaaagaaaaggccaagcagaggcccctggccctgaacactgtggagatgctgcgtgtggccagctcttctctgggcatggggccgcagcacgccatgcagacggctgagcggctctacacgcaaggctacatcagctacccacggacagagaccacccactaccctgagaactttgacctgaagggctctctgcggcagcaggccaaccacccctactgggccgacacggtgaagcggttgttagcagaaggtatcaaccgcccgcggaaaggccatgacgccggcgaccatccccccatcacccccatgaagtctgccacagaggccgaattagggggtgacgcgtggcggctctatgagtacatcaccagacacttcatcgccacggtcagccatgactgcaagtacctgcagagcaccatctccttcagaattgggcccgagctcttcacctgctccgggaagaccgtcctctcaccaggcttcacggaggtcatgccctggcagagcgtgcccctggaggagagcctgcccacttgccagcggggtgatgccttccctgtgggcgaggtgaagatgctggagaagcagacgaacccacccgactacctgacggaggccgagctcatcacgctcatggagaagcatggcatcggcacggatgccagcatccctgtgcatatcaacaacatctgccagcgcaactatgtcacggtggagagcgggcgccggctcaagcccaccaacctcggcatcgtcctggtgcacggctactataagattgatgcagagctggtgctccccaccatccgcagtgcagtggagaagcagctgaacctgatcgcccagggcaaggccgactaccgccaggtcctgggccacaccctggacgtgttcaagaggaagttccactactttgtcgactccattgctggcatggatgagttgatggaggtgtctttctcgcccctggcggccacaggcaagcccctctcacgctgtgggaagtgccaccgcttcatgaagtacatccaggccaagccaagccgcctgcactgctcccactgcgatgagacctacacgctcccccagaacggcaccatcaagctctacaaggagctccgctgccctctggatgacttcgagctggtcctgtggtcatcaggctctcggggcaagagctacccgctgtgcccctactgctacaaccacccacccttccgagacatgaagaaaggcatgggctgcaacgagtgtacgcacccctcctgccagcactcgctgagcatgctgggcatcggccagtgcgtggaatgtgagagcggggtgctggtgctggaccccacctcgggccccaagtggaaggtggcctgcaacaagtgcaacgtggtagcgcactgcttcgagaacgcccaccgcgtgcgggtgtccgccgacacctgcagtgtctgtgaggccgccttgcttgatgtggacttcaacaaggccaagtccccactcccgggcgatgagacgcagcacatgggctgcgtcttttgtgaccccgtcttccaggagctggtggagctgaagcatgcggcctcctgccaccccatgcaccgcggtggaccagggagaaggcagggtcgagggcggggccgggccaggaggccccctgggaagcccaaccccagacggcccaaggacaagatgtcagccctggccgcctactttgtatgatgaccctgtcctccctcacccaggctgcagtgccatgcagacacctcatggcacttcaaactattaaaatgcattttatcttatccaga

SEQ ID NO: 100305 - DNA, 3107 bp, Artificial Sequence
  derived and/or modified sequence
ggatccgcggtgcggctgtgggtgagcggcgggctgcgggaccctcgcccggcggctcagaaaggcgggaagcgcacgcatttttctggcttgtttcctgaacgttggccggcggaggacccgcgagctcgggagagcgcccgggccgggctctgcattcttgttgcctcttccctggcgggggtgatactctcccgcggggcttgctgtgggggttcagggaggtggagatgggcccgccatgtgcctgcagggagcaggcgctgtggttaatacttttcttcttcgaaccctcccacagctctttagggtgagatctgctgtaccagtctcacaggagtcagcattggtaatagtgctgtgctgcggaagagtggagtctaaactttttcattgccagtgccccgaaactggagtgtgaaggaccgagacaaaatgaagactgtgctcatggttgctgaaaagccgtccttggcacagtcaattgccaaaatcctctctagagggagcctgtcctcacacaaagggctgaacggggcctgctcagtccacgagtacactgggacctttgctggccagccagtgcgcttcaagatgacgtctgtctgtggtcacgtgatgaccctggatttcctgggaaaatacaacaaatgggacaaagtggaccccgcagaactgttcagccaagctcccacggagaagaaagaagctaaccccaagctgaacatggtgaagttcctgcaggtggagggcagaggctgcgactacatcgtgctgtggctggactgcgacaaggagggggagaacatctgctttgaggttcttgatgctgttctgcccgtcatgaacaaggcccatggtggcgagaagaccgtgttccgggccaggtttagctccatcacggacacagacatctgtaatgccatggcctgcctaggcgagcctgaccacaacgaggcgctctcagtggatgctcgccaggagctggacctgcgaatcggctgtgcattcaccaggtttcagactaaatatttccaggggaaatacggtgatttagacagctctctcatctcctttgggccgtgtcagactccaaccctgggattctgtgtggagagacatgataaaatccagtccttcaaaccagagacctactgggtgctgcaggccaaggttaacactgacaaagacagatctctccttttggactgggaccgagtaagagtgtttgaccgggagatcgcacagatgtttttaaacatgacaaagctggagaaggaagcccaggtggaggccacaagcaggaaagaaaaggccaagcagaggcccctggccctgaacactgtggagatgctgcgtgtggccagctcttctctgggcatggggccgcagcacgccatgcagacggctgagcggctctacacgcaaggctacatcagctacccacggacagagaccacccactaccctgagaactttgacctgaagggctctctgcggcagcaggccaaccacccctactgggccgacacggtgaagcggttgttagcagaaggtatcaaccgcccgcggaaaggccatgacgccggcgaccatccccccatcacccccatgaagtctgccacagaggccgaattagggggtgacgcgtggcggctctatgagtacatcaccagacacttcatcgccacggtcagccatgactgcaagtacctgcagagcaccatctccttcagaattgggcccgagctcttcacctgctccgggaagaccgtcctctcaccaggcttcacggaggtcatgccctggcagagcgtgcccctggaggagagcctgcccacttgccagcggggtgatgccttccctgtgggcgaggtgaagatgctggagaagcagacgaacccacccgactacctgacggaggccgagctcatcacgctcatggagaagcatggcatcggcacggatgccagcatccctgtgcatatcaacaacatctgccagcgcaactatgtcacggtggagagcgggcgccggctcaagcccaccaacctcggcatcgtcctggtgcacggctactataagattgatgcagagctggtgctccccaccatccgcagtgcagtggagaagcagctgaacctgatcgcccagggcaaggccgactaccgccaggtcctgggccacaccctggacgtgttcaagaggaagttccactactttgtcgactccattgctggcatggatgagttgatggaggtgtctttctcgcccctggcggccacaggcaagcccctctcacgctgtgggaagtgccaccgcttcatgaagtacatccaggccaagccaagccgcctgcactgctcccactgcgatgagacctacacgctcccccagaacggcaccatcaagctctacaaggagctccgctgccctctggatgacttcgagctggtcctgtggtcatcaggctctcggggcaagagctacccgctgtgcccctactgctacaaccacccacccttccgagacatgaagaaaggcatgggctgcaacgagtgtacgcacccctcctgccagcactcgctgagcatgctgggcatcggccagtgcgtggaatgtgagagcggggtgctggtgctggaccccacctcgggccccaagtggaaggtggcctgcaacaagtgcaacgtggtagcgcactgcttcgagaacgcccaccgcgtgcgggtgtccgccgacacctgcagtgtctgtgaggccgccttgcttgatgtggacttcaacaaggccaagtccccactcccgggcgatgagacgcagcacatgggctgcgtcttttgtgaccccgtcttccaggagctggtggagctgaagcatgcggcctcctgccaccccatgcaccgcggtggaccagggagaaggcagggtcgagggcggggccgggccaggaggccccctgggaagcccaaccccagacggcccaaggacaagatgtcagccctggccgcctactttgtatgatgaccctgtcctccctcacccaggctgcagtgccatgcagacacctcatggcacttcaaactattaaaatgcattttatctta

SEQ ID NO: 100306 - DNA, 2956 bp, Artificial Sequence
  derived and/or modified sequence
atttagacagctctctcatctcctttgggccgtgtcagactccaaccctgggattctgtgtggagagacatgataaaatccagtccttcaaaccagagacctactgggtgctgcaggccaaggttaacactgacaaagacagatctctccttttggactgggaccgagtaagagtgtttgaccgggagatcgcacagatgtttttaaacatgacaaagctggagaaggaagcccaggtggaggccacaagcaggaaagaaaaggccaagcagaggcccctggccctgaacactgtggagatgctgcgtgtggccagctcttctctgggcatggggccgcagcacgccatgcagacggctgagcggctctacacgcaaggctacatcagctacccacggacagagaccacccactaccctgagaactttgacctgaagggctctctgcggcagcaggccaaccacccctactgggccgacacggtgaagcggttgttagcagaaggtatcaaccgcccgcggaaaggccatgacgccggcgaccatccccccatcacccccatgaagtctgccacagaggccgaattagggggtgacgcgtggcggctctatgagtacatcaccagacacttcatcgccacggtcagccatgactgcaagtacctgcagagcaccatctccttcagaattgggcccgagctcttcacctgctccgggaagaccgtcctctcaccaggcttcacggaggtcatgccctggcagagcgtgcccctggaggagagcctgcccacttgccagcggggtgatgccttccctgtgggcgaggtgaagatgctggagaagcagacgaacccacccgactacctgacggaggccgagctcatcacgctcatggagaagcatggcatcggcacggatgccagcatccctgtgcatatcaacaacatctgccagcgcaactatgtcacggtggagagcgggcgccggctcaagcccaccaacctcggcatcgtcctggtgcacggctactataagattgatgcagagctggtgctccccaccatccgcagtgcagtggagaagcagctgaacctgatcgcccagggcaaggccgactaccgccaggtcctgggccacaccctggacgtgttcaagaggaagttccactactttgtcgactccattgctggcatggatgagttgatggaggtgtctttctcgcccctggcggccacaggcaagcccctctcacgctgtgggaagtgccaccgcttcatgaagtacatccaggccaagccaagccgcctgcactgctcccactgcgatgagacctacacgctcccccagaacggcaccatcaagctctacaaggagctccgctgccctctggatgacttcgagctggtcctgtggtcatcaggctctcggggcaagagctacccgctgtgcccctactgctacaaccacccacccttccgagacatgaagaaaggtgagtgcagccactccctcctgtccacaggtagctgcagtctcttttcagtgccaacccctgccttgcaccaggctggactctgaggggacccctcaccctggcctttcctgcactcattggcactgagacgagagaccctggatgtagctggggcactgcttaggcctcagccagtggtgccaccctctctctgtgtcagaatcgagcaggcaaccctagtccaccctcaggacctgggcacaggtgtgcagtgctccctctggagctgagtgagcaagaggatgcagcagtcgggggacccacccggtgagcgggcacccccagtcagcgtccaccaccgtcctccatcctcatcctcgtcctcattactggaggagggagcgcatgtccaggcaggcaggacagagcaccgagccagaccaggaatcagcgggagtgaggcatctgcccacattcaccgtgtgctctgcagaaagctccctcaggcctcagtctgcacccaggctgccccgggagtgagaccccatccctgccctcctgctgccgccagagtagctgacagggtggttccatgtggcccagtgacatgagggtcatgtggcattaccagtaacaagctggcagcaaagcaaaggggggatggagtcagctgaaacccactgggatggtgccagcgaggggccttgaaagttgaggaggtttcaggtaagcagaaaacaggggtaatggcagccaggagccgaaacatgagcaaggctgtccccaagagcaaggccaagaagagttccttctgctgggacgagggatccaggagcttgaggcattgggagcaggcagcagagggcaggtgggcacagtgggcgtgcctttacagggctcccttctcccgccaggcatgggctgcaacgagtgtacgcacccctcctgccagcactcgctgagcatgctgggcatcggccagtgcgtggaatgtgagagcggggtgctggtgctggaccccacctcgggccccaagtggaaggtggcctgcaacaagtgcaacgtggtagcgcactgcttcgagaacgcccaccgcgtgcgggtgtccgccgacacctgcagtgtctgtgaggccgccttgcttgatgtggacttcaacaaggccaagtccccactcccgggcgatgagacgcagcacatgggctgcgtcttttgtgaccccgtcttccaggagctggtggagctgaagcatgcggcctcctgccaccccatgcaccgcggtggaccagggagaaggcagggtcgagggcggggccgggccaggaggccccctgggaagcccaaccccagacggcccaaggacaagatgtcagccctggccgcctactttgtatgatgaccctgtcctccctcacccaggctgcagtgccatgcagacacctcatggcacttcaaactattaaaatgcattttatcttatcca

SEQ ID NO: 100307 - DNA, 258 bp, Artificial Sequence
  derived and/or modified sequence
atgcagacaagcgaaaccggaagtgatacaggttctactgttactctccagaccagcgtcgccagtcaagctgctgtgcctacccaggttgtacagcaggtgcctgtgcagcagcaagtgcaacaggtgcagaccgtgcagcaggtgcagcacgtctacccagcacaagtccaatacgtggagggaagcgatacggtttacaccaacggggccatgagtcgggcgccatggtcaatgattctagagtcctcaccttag

SEQ ID NO: 100308 - DNA, 588 bp, Artificial Sequence
  derived and/or modified sequence
atgcagacctctgagacaggaagcgacaccggttccaccgtgacgctccaaaccagcgttgccagtcaagcagctgtgccgactcaagtggtgcaacaggtccctgtccagcagcaggtccagcaggttcagacagtgcagcaggtgcagcacgtgtatccagctcaagtgcagtatgtggagggatccgacacagtgtacacaaacggggctatcagaaccactacgtatccctacacagagactcagatgtactcacagaatactggaggaaactatttcgacacccagggaagctccgcacaggtaactacagttgtctcctctcatagcatggtaggcacaggcggtatccagatgggcgtcaccgggggacagctcatcagtagttccgggggaacatacctgatcgggaactcaatggagaactccgggcattctgtgacacatacgacaagggcctcgcccgcaactgctaacagtgttccagaaatgaagcttctgcgtcagatcacaatgaatcgactgttccccaccctgaatcacaaactcactgaaggtagcggccctcatttccaaagcatctag

SEQ ID NO: 100309 - DNA, 471 bp, Artificial Sequence
  derived and/or modified sequence
gtccagcaggttcagactgtgcagcaagtgcaacacgtgtatcctgctcaagttcagtatgttgagggctccgatactgtttacactaacggtgccattagaactaccacttacccatatactgaaacacagatgtattctcagaatacaggcggcaattactttgacactcagggaagctctgcacaggtcactacagtggtttcttcccactctatggtgggcacaggaggtattcaaatgggggtcactgggggccagctgatctcttcaagtggcgggacctaccttattgggaactctatggagaactccggacatagcgttacacatacaactcgcgcgagccctgctacagcaaactctgttccagaaatgaaactcttacggcaaataactatgaaccgactctttcccacccttaatcataaactgaccgagggtagtgggcctcacttccagagtatctag

SEQ ID NO: 100310 - DNA, 408 bp, Artificial Sequence
  derived and/or modified sequence
gttcaacaagtgcagactgtgcagcaggtccaacacgtgtaccccgctcaagtgcaatacgtggaagggagtgacaccgtctatacaaatggagcaattcggaccactacctatccatacaccgaaactcagatgtatagccagaataccggcggtaactacttcgacactcagggcagctctgcacaggttaccaccgtggttagctcccacagcatggtcgggacagggggaatccaaatgggcgtgacgggtggacagctgatcagctctagcggggggacctatctgattggcaattctatggagaactcgggccactcagtgacgcacactacacgcgcctcgcccgctacccttttcctgttttcttgtgtaccattcagcctgggacaactctctccttag

SEQ ID NO: 100311 - DNA, 417 bp, Artificial Sequence
  derived and/or modified sequence
atgcaaactagtgaaactggaagcgacaccggctcaaccgtcacattgcagacttccgtggctagccaggctgccgtgccgacgcaggtcgttcagcaagtgcctgtgcaacagcaggtgcaacaagtgcagacggttcagcaggtgcagcacgtctaccctgctcaggttcagtatgtggagggcagcgacaccgtgtacactaatggtgcgatcagaacgacaacctatccttatactgaaacacaaatgtacagtcaaaataccggaggtaattatttcgacacacagggaagcagcgcccaggtgaccactgtcgtgtcctctcactctatggtagggacaggaggtattcagatgggagtcaccggaggccagcttatctcatcctccggtggaacgtaccttatcggctag

SEQ ID NO: 100312 - DNA, 555 bp, Artificial Sequence
  derived and/or modified sequence
atgcaaacctccgagaccggctcggatactggatcaacagtcaccctccaaacaagtgtggctagccaggccgccgtgcctacccaggtggtccagcaggtccccgttcaacagcaggttcagcaagtacagaccgtccagcaggtgcagcacgtatacccagcacaggtccaatacgtggagggctccgatacggtgtatactaacggagctattcggactactacttacccgtacaccgaaacccagatgtacagccagaatacgggaggtaattactttgatactcagggttccagcgcacaagtgaccacggtggtgagctcgcattcaatggtcggtaccgggggcatacagatgggggttacaggtggtcagcttattagctcaagtggcggtacctacttgatcggaaatagtatggagaattccggccatagtgtgacccacaccaccagagcatcgccggctacaatcgaaatggctatcgagactctccagaaatccgacgggttgtccacacacagaagctcactgctcaatagccacgtctag

SEQ ID NO: 100313 - DNA, 258 bp, Artificial Sequence
  derived and/or modified sequence
atgcagaccagcgagaccggcagtgacaccggcagcacagtgaccctgcagacctctgtggccagccaggccgctgtgcccacccaggtggtgcagcaggtgcctgtgcagcagcaggtgcagcaggtgcagacagtgcagcaggtgcagcacgtgtacccagcccaggtgcagtatgtggagggcagtgacacagtgtacaccaatggagccatgagccgggccccctggagcatgatcctggagagcagcccctag

SEQ ID NO: 100314 - DNA, 588 bp, Artificial Sequence
  derived and/or modified sequence
atgcagaccagcgagaccggcagtgacaccggcagcacagtgaccctgcagacctctgtggccagccaggccgctgtgcccacccaggtggtgcagcaggtgcctgtgcagcagcaggtgcagcaggtgcagacagtgcagcaggtgcagcacgtgtacccagcccaggtgcagtatgtggagggcagtgacacagtgtacaccaatggagccatccgcaccaccacctacccctacacagagacccagatgtacagccagaacacaggaggcaactactttgacacccagggcagcagcgcccaggtgaccaccgtggtgagcagccacagcatggtgggcactggaggcatccagatgggcgtgactggaggccagctgatcagcagcagcggcggcacctacctgattggcaacagcatggagaacagcggccacagcgtgacccacaccacccgggccagccctgccacagccaacagcgtgcctgagatgaagctgctgcggcagatcaccatgaacagactcttccccaccctgaaccacaagctgacagagggcagcggcccccacttccagagcatctag

SEQ ID NO: 100315 - DNA, 471 bp, Artificial Sequence
  derived and/or modified sequence
gtgcagcaggtgcagacagtgcagcaggtgcagcacgtgtacccagcccaggtgcagtatgtggagggcagtgacacagtgtacaccaacggggccatccgcaccaccacctacccctacacagagacccagatgtacagccagaacacaggaggcaactactttgacacccagggcagcagcgcccaggtgaccaccgtggtgagcagccacagcatggtgggcaccggcggcatccagatgggcgtgactggaggccagctgatcagcagcagcggcggcacctacctgattggcaacagcatggagaacagcggccacagcgtgacccacaccacccgggccagccctgccacagccaacagcgtgcctgagatgaagctgctgcggcagatcaccatgaacagactcttccccaccctgaaccacaagctgacagagggcagcggcccccacttccagagcatctag

SEQ ID NO: 100316 - DNA, 408 bp, Artificial Sequence
  derived and/or modified sequence
gtgcagcaggtgcagacagtgcagcaggtgcagcacgtgtacccagcccaggtgcagtatgtggagggcagtgacacagtgtacaccaacggggccatccgcaccaccacctacccctacacagagacccagatgtacagccagaacacaggaggcaactactttgacacccagggcagcagcgcccaggtgaccaccgtggtgagcagccacagcatggtgggcaccggcggcatccagatgggcgtgactggaggccagctgatcagcagcagcggcggcacctacctgattggcaacagcatggagaacagcggccacagcgtgacccacaccacccgggccagccctgccaccctcttcctgttcagctgtgtgcccttcagcctgggccagctgagcccctag

SEQ ID NO: 100317 - DNA, 417 bp, Artificial Sequence
  derived and/or modified sequence
atgcagaccagcgagaccggcagtgacaccggcagcacagtgaccctgcagacctctgtggccagccaggccgctgtgcccacccaggtggtgcagcaggtgcctgtgcagcagcaggtgcagcaggtgcagacagtgcagcaggtgcagcacgtgtacccagcccaggtgcagtatgtggagggcagtgacacagtgtacaccaatggagccatccgcaccaccacctacccctacacagagacccagatgtacagccagaacacaggaggcaactactttgacacccagggcagcagcgcccaggtgaccaccgtggtgagcagccacagcatggtgggcactggaggcatccagatgggcgtgactggaggccagctgatcagcagcagcggcggcacctacctgattggatag

SEQ ID NO: 100318 - DNA, 555 bp, Artificial Sequence
  derived and/or modified sequence
atgcagaccagcgagaccggcagtgacaccggcagcacagtgaccctgcagacctctgtggccagccaggccgctgtgcccacccaggtggtgcagcaggtgcctgtgcagcagcaggtgcagcaggtgcagacagtgcagcaggtgcagcacgtgtacccagcccaggtgcagtatgtggagggcagtgacacagtgtacaccaatggagccatccgcaccaccacctacccctacacagagacccagatgtacagccagaacacaggaggcaactactttgacacccagggcagcagcgcccaggtgaccaccgtggtgagcagccacagcatggtgggcactggaggcatccagatgggcgtgactggaggccagctgatcagcagcagcggcggcacctacctgattggcaacagcatggagaacagcggccacagcgtgacccacaccacccgggccagccctgccaccatcgagatggccatcgagaccctgcagaagagtgatggcctgagcacccacaggagcagcctgctgaacagccacgtgtag

SEQ ID NO: 100319 - DNA, 364 bp, Artificial Sequence
  derived and/or modified sequence
atgcagacatcagagactgggtcggacacaggctcgacagtgaccttacaaacatctgtggctagtcaagcagcagtgcctacgcaggtggtacagcaagtaccagtacaacaacaggtacagcaggtacagactgtgcagcaggtacaacatgtctatcccgctcaggtgcagtatgtggaaggaagcgatactgtctataccaatggagcaatgtccagggccccctggagcatgattttggaatcttcaccataaacttaaactactgttggcatttataccaaatgaaaaagacgcctgccacttcgacctttatgctctcagggaaaataaatggctttgtagacactgctagaggtca

SEQ ID NO: 100320 - DNA, 900 bp, Artificial Sequence
  derived and/or modified sequence
cgtgcgagtgtctccctctccctctcgctctctctctctctccctctctctctctcttttgtgagttatagcaaccgttgccttgtgaatcaagcgccatagtcaccgtagtcctggcgactgttacccatcaacaacaactactcctctcctcctcctcctcctcttcctcctcctcctccccaccaccaccatctccatcacccaccaacaacaccacaataatccacagccaaggccacttggtcattctggcattttatggtagagaatacgttgagtttggctctggaaggaatatgagagaccatcatgcagacatcagagactgggtcggacacaggctcgacagtgaccttacaaacatctgtggctagtcaagcagcagtgcctacgcaggtggtacagcaagtaccagtacaacaacaggtacagcaggtacagactgtgcagcaggtacaacatgtctatcccgctcaggtgcagtatgtggaaggaagcgatactgtctataccaatggagcaatccgaacaacaacgtatccttacacagagacacagatgtacagccaaaatactggagggaattactttgatactcaagggagttccgcccaggtgactaccgtggtctcatcccacagtatggtgggcactggtgggattcagatgggcgtcacaggaggacaactcatcagcagctctggaggaacctatctgatcggcaactcaatggagaattctggtcactcagtgacacacacaactcgggcctccccagcgacagccaactcagtccctgaaatgaaactcctcagacagattaccatgaaccgtctgtttcctacactaaatcataaattgactgaaggttctgggcctcattttcaaagcatttaa

SEQ ID NO: 100321 - DNA, 492 bp, Artificial Sequence
  derived and/or modified sequence
gtacagcaggtacagactgtgcagcaggtacaacatgtctatcccgctcaggtgcagtatgtggaaggaagcgatactgtctataccaatggagcaatccgaacaacaacgtatccttacacagagacacagatgtacagccaaaatactggagggaattactttgatactcaagggagttccgcccaggtgactaccgtggtctcatcccacagtatggtgggcactggtgggattcagatgggcgtcacaggaggacaactcatcagcagctctggaggaacctatctgatcggcaactcaatggagaattctggtcactcagtgacacacacaactcgggcctccccagcgacagccaactcagtccctgaaatgaaactcctcagacagattaccatgaaccgtctgtttcctacactaaatcataaattgactgaaggttctgggcctcattttcaaagcatttaataaaatgggactttgaatgac

SEQ ID NO: 100322 - DNA, 526 bp, Artificial Sequence
  derived and/or modified sequence
gtacagcaggtacagactgtgcagcaggtacaacatgtctatcccgctcaggtgcagtatgtggaaggaagcgatactgtctataccaatggagcaatccgaacaacaacgtatccttacacagagacacagatgtacagccaaaatactggagggaattactttgatactcaagggagttccgcccaggtgactaccgtggtctcatcccacagtatggtgggcactggtgggattcagatgggcgtcacaggaggacaactcatcagcagctctggaggaacctatctgatcggcaactcaatggagaattctggtcactcagtgacacacacaactcgggcctccccagcgacactttttctgttttcctgtgtccctttttccctaggccaactcagtccctgaaatgaaactcctcagacagattaccatgaaccgtctgtttcctacactaaatcataaattgactgaaggttctgggcctcattttcaaagcatttaataaaatgggactttgaatgac

SEQ ID NO: 100323 - DNA, 869 bp, Artificial Sequence
  derived and/or modified sequence
cttccctcccccacccctccccgtgcgagtgtctccctctccctctcgctctctctctctctccctctctctctctcttttgtgagttatagcaaccgttgccttgtgaatcaagcgccatagtcaccgtagtcctggcgactgttacccatcaacaacaactactcctctcctcctcctcctcctcttcctcctcctcctccccaccaccaccatctccatcacccaccaacaacaccacaataatccacagccaaggccacttggtcattctggcattttatggtagagaatacgttgagtttggctctggaaggaatatgagcagccatggaggatactctagtttctttgggaagataaacactcaatctgctagttaagagacaaagctcaagagaaataagctgaagctgtaacctccatttcaaacttgtggttctgcagaccatcatgcagacatcagagactgggtcggacacaggctcgacagtgaccttacaaacatctgtggctagtcaagcagcagtgcctacgcaggtggtacagcaagtaccagtacaacaacaggtacagcaggtacagactgtgcagcaggtacaacatgtctatcccgctcaggtgcagtatgtggaaggaagcgatactgtctataccaatggagcaatccgaacaacaacgtatccttacacagagacacagatgtacagccaaaatactggagggaattactttgatactcaagggagttccgcccaggtgactaccgtggtctcatcccacagtatggtgggcactggtgggattcagatgggcgtcacaggaggacaactcatcagcagctctggaggaacctatctgatcggcaa

SEQ ID NO: 100324 - DNA, 740 bp, Artificial Sequence
  derived and/or modified sequence
acttctgcttccactacaaacagtactttaaagacaggccttccactgccattcagaaagcagccatggaggatactctagtttctttgggaagataaacactcaatctgctagttaagagacaaagctcaagagaaataagctgaagctgtaacctccatttcaaacttgtggttctgcagaccatcatgcagacatcagagactgggtcggacacaggctcgacagtgaccttacaaacatctgtggctagtcaagcagcagtgcctacgcaggtggtacagcaagtaccagtacaacaacaggtacagcaggtacagactgtgcagcaggtacaacatgtctatcccgctcaggtgcagtatgtggaaggaagcgatactgtctataccaatggagcaatccgaacaacaacgtatccttacacagagacacagatgtacagccaaaatactggagggaattactttgatactcaagggagttccgcccaggtgactaccgtggtctcatcccacagtatggtgggcactggtgggattcagatgggcgtcacaggaggacaactcatcagcagctctggaggaacctatctgatcggcaactcaatggagaattctggtcactcagtgacacacacaactcgggcctccccagcgacaattgaaatggcgattgagacgctgcaaaagtctgacggtctgtccactcacagaagctctcttctcaacagccatgta

SEQ ID NO: 100325 - DNA, 258 bp, Artificial Sequence
  derived and/or modified sequence
atgcagaccagcgagaccggcagcgacaccggcagcaccgtgaccctgcagactagcgtcgcctcgcaagcagcagtgccaactcaagtggtgcagcaagtgcctgtgcagcaacaggtccaacaagtgcaaacagtgcagcaagtccagcacgtctacccggcacaagtccaatacgtagaggggtcagacactgtttacactaacggagccatgtctagagctccatggtccatgatcctggagtcttcgccatag

SEQ ID NO: 100326 - DNA, 588 bp, Artificial Sequence
  derived and/or modified sequence
atgcagaccagcgagaccggcagcgacaccggcagcaccgtgaccctccagacgtctgtggcttcacaagccgcagtccctacacaagtcgtgcagcaagttccagtgcagcagcaggtacagcaagtgcagacggtgcagcaggtccagcacgtgtatcccgcacaggtccagtacgtcgagggttcagatactgtttacactaacggcgctattagaaccaccacttatccgtacactgagactcaaatgtacagccagaacaccggagggaattatttcgacacccagggctcaagtgctcaggtgaccacagtggtgtccagtcactccatggtgggcactggcggcatacaaatgggtgtgactggtgggcaactgatctccagttctgggggtacctatcttattggcaactctatggaaaactctggtcacagtgtgactcatacaacccgcgcctctcccgctactgcgaattcagtgcctgaaatgaaactcctgcgccagatcacaatgaatcgactattcccaacattgaatcacaaactgactgaggggtcaggaccccacttccagtcgatttag

SEQ ID NO: 100327 - DNA, 471 bp, Artificial Sequence
  derived and/or modified sequence
gtgcagcaggtgcagaccgtgcagcaggtgcagcacgtgtaccccgcccaagtgcagtatgtggagggtagcgatactgtctataccaacggcgcaatacggactacaacctacccttacacagagacgcagatgtacagccagaacaccggtggaaactatttcgatacccaaggatccagtgcccaagttaccacggttgtgagcagccattccatggtggggaccggaggaatccagatgggggttacagggggacaactcatctcttccagcggtggcacctatttgataggcaactctatggagaactccggccactccgtcacgcacacaactcgcgcttccccagccactgctaactcagtcccagaaatgaagttgttgcgccaaatcacaatgaaccggctcttcccaacgctgaatcataagttgacagagggcagtggcccacacttccagagcatatag

SEQ ID NO: 100328 - DNA, 408 bp, Artificial Sequence
  derived and/or modified sequence
gtgcagcaggtgcagaccgtgcagcaggtgcagcacgtgtaccccgcccaggttcaatacgtggagggctccgacacagtctacacaaatggggccattaggacaaccacttacccgtataccgagacacagatgtactcacagaatactggcggcaattatttcgacacgcagggcagcagtgctcaggtaacgaccgtggtgagcagccactctatggtaggcaccggaggcatacaaatgggcgtcactgggggtcaactaatatccagtagcggagggacctacctcattggtaactcaatggaaaattccggacattcagtcacccatacaaccagagcctcaccagcaacattattcttattcagctgcgtcccattcagcctgggtcagctgtccccctag

SEQ ID NO: 100329 - DNA, 417 bp, Artificial Sequence
  derived and/or modified sequence
atgcagaccagcgagaccggcagcgacaccggcagcaccgtgaccttgcagacatccgtggcctcacaggctgccgttcccacacaggttgtgcagcaggtgccggtgcagcagcaagtgcagcaggtgcagacggtacaacaggttcagcacgtttaccccgcccaggtccagtacgtggagggcagtgatactgtctatactaatggtgccattcggacaaccacttacccttacacagagacccagatgtacagccaaaacaccggcggtaactacttcgatacacaggggtcaagcgcacaggtcactactgtagtatccagtcactcaatggtgggaactggaggaatacagatgggggtgaccggcgggcagcttatatcaagtagcgggggcacttatctcatcggttag

SEQ ID NO: 100330 - DNA, 555 bp, Artificial Sequence
  derived and/or modified sequence
atgcagaccagcgagaccggcagcgacaccggcagcaccgtgaccttgcagacgtcggttgcctcgcaagcggccgtgccaacacaagtggtgcagcaagtgcctgtgcagcaacaggtgcaacaggttcagaccgttcaacaagtacagcacgtgtatcccgcacaagtgcagtatgtagagggatctgataccgtgtacactaatggagccatccgaacaactacttacccttacacagagacacagatgtactcccaaaacacaggcgggaattactttgacacacaggggtcatccgcgcaggtcactactgtggtctcctcccactcgatggtaggcacaggggggattcagatgggcgtgacagggggacagctgatttcctcctcaggcggtacatacctcataggcaattcgatggagaacagcggccattctgtgactcacactacaagggcttcccccgccacaatagagatggccattgaaaccttgcagaaatccgacggcctgtcgactcacagaagctccttacttaactctcacgtgtag

SEQ ID NO: 100331 - DNA, 258 bp, Artificial Sequence
  derived and/or modified sequence
atgcaaacttcggaaaccgggtccgatactggaagcacagtgacactccaaactagtgtcgcctctcaggctgccgtcccaactcaggttgtgcaacaggtgcctgtgcaacagcaggtgcagcaggtgcagactgtgcagcaggttcagcatgtgtacccggctcaggtacagtacgtggagggcagcgataccgtgtacaccaacggggcaatgtcccgtgctccatggtccatgattttagagtcttccccgtag

SEQ ID NO: 100332 - DNA, 588 bp, Artificial Sequence
  derived and/or modified sequence
atgcagactagcgaaacggggtcagacaccggctccactgtgacgctccagacaagcgtggcctcccaggcggctgtacccacacaagtggtgcagcaggtgcctgtacagcagcaagttcagcaagtgcagaccgttcagcaggtacagcacgtgtaccccgctcaggtgcagtatgtcgagggcagtgataccgtctacactaacggggcaattcggacaactacctacccatatacagagacacaaatgtacagccagaataccggtgggaattattttgatacccaagggtcgtcagcccaagttaccaccgttgtgtccagccacagtatggtcggaacgggcggaatccagatgggcgtgactgggggacagcttattagttcgtctggaggaacctacctgatcggaaacagtatggaaaatagtggacacagcgtaacacatacaacccgcgcatccccagccacagctaactccgttccagaaatgaagctgctaagacagattacgatgaaccgactcttcccaacattgaatcataaactaactgaaggctctggcccacacttccaatcaatttag

SEQ ID NO: 100333 - DNA, 471 bp, Artificial Sequence
  derived and/or modified sequence
gtacagcaggtgcagacggtgcaacaagtgcagcatgtgtaccccgcacaggtacagtatgttgaaggcagcgacacggtatataccaacggagcaataagaactacgacctacccatacaccgagacgcagatgtattcccagaatactggagggaactatttcgacacccagggttcaagtgcacaggtgactaccgtggtgagctctcatagtatggttggaactggcggaattcaaatgggcgttactgggggtcaattaatatcaagttcaggaggcacctatctgatcggcaattccatggagaattctgggcactctgtgacccatactacaagggcctctcctgccactgctaatagcgtaccagaaatgaaactgctgcgccagattactatgaatcggctgttcccgacactgaaccacaaactcacagaggggagcgggccacacttccagtctatctag

SEQ ID NO: 100334 - DNA, 408 bp, Artificial Sequence
  derived and/or modified sequence
gtgcagcaggtgcaaaccgttcagcaagttcagcatgtgtacccagcccaggtccaatacgtggaggggagcgacactgtgtatactaatggggctatcagaacaacgacatacccatacaccgaaactcagatgtactcccagaataccggtggcaattattttgacacccaggggtctagcgcccaggtgaccacagtggtatcttcacacagcatggtgggaacgggagggattcaaatgggcgtgacagggggacagctcatttcttcctccggcggtacctacctgattgggaacagtatggagaactcagggcacagcgtaacacatacgacccgagcctccccagcaacactgtttctcttcagctgtgtccccttttccctgggccagctctccccgtag

SEQ ID NO: 100335 - DNA, 417 bp, Artificial Sequence
  derived and/or modified sequence
atgcagacatctgaaacaggttctgatacaggtagcacagtgacgttgcagacctccgtggcctcccaagcagcagtccctacccaggtggtgcaacaggtgcctgtgcagcagcaagtacagcaggtgcagaccgtgcaacaagtccagcacgtttacccagcccaggtccagtatgtcgagggttcagacacagtatacaccaatggtgccatacggacaaccacatatccatatacagaaacccagatgtattcacaaaatacaggcggtaattactttgacacccaggggtcctcagctcaggtcacgacggtggtatcaagccattctatggtcggcactggtggcatccagatgggagtaacaggtggccagctcatctcctcttctggtggcacgtatctcatcggttag

SEQ ID NO: 100336 - DNA, 555 bp, Artificial Sequence
  derived and/or modified sequence
atgcagacgagcgagactgggtctgacacaggatccaccgtgacactccagacatctgtcgcctcccaggctgcggtgcctactcaggtggtgcagcaggtaccagtgcaacagcaggtacagcaggttcagaccgtgcagcaagtgcagcacgtgtaccccgctcaggtgcagtatgtggagggctctgatactgtgtacacgaatggggcaatacgaaccacaacttacccctacactgagacccagatgtactcccaaaatacaggaggcaattatttcgacacacagggctcatccgcacaggtgaccaccgtcgtgtcatcacactctatggtcggcaccgggggaatccagatgggagtcacggggggacaactgatctctagtagtgggggtacgtacttgatcggaaattctatggagaatagcggccacagcgtgacccacaccactagggcttctcctgccactatcgaaatggctatagagacgctgcagaagtccgatggcctgtccacacaccggtcgtccctgcttaactcccacgtctag

SEQ ID NO: 100337 - DNA, 258 bp, Artificial Sequence
  derived and/or modified sequence
atgcagaccagcgagaccggcagcgacaccggcagcaccgtgaccctgcagaccagcgtggccagccaggccgccgtgcccacccaggtggtgcagcaggtgcccgtgcagcagcaggtgcagcaggtgcagaccgtgcagcaggtgcagcacgtgtaccccgcccaggtgcagtacgtggagggcagcgacaccgtgtacaccaacggcgccatgagcagagccccctggagcatgatcctggagagcagcccctag

SEQ ID NO: 100338 - DNA, 588 bp, Artificial Sequence
  derived and/or modified sequence
atgcagaccagcgagaccggcagcgacaccggcagcaccgtgaccctgcagaccagcgtggccagccaggccgccgtgcccacccaggtggtgcagcaggtgcccgtgcagcagcaggtgcagcaggtgcagaccgtgcagcaggtgcagcacgtgtaccccgcccaggtgcagtacgtggagggcagcgacaccgtgtacaccaacggcgccatcagaaccaccacctacccctacaccgagacccagatgtacagccagaacaccggcggcaactacttcgacacccagggcagcagcgcccaggtgaccaccgtggtgagcagccacagcatggtgggcaccggcggcatccagatgggcgtgaccggcggccagctgatcagcagcagcggcggcacctacctgatcggcaacagcatggagaacagcggccacagcgtgacccacaccaccagagccagccccgccaccgccaacagcgtgcccgagatgaagctgctgagacagatcaccatgaacagactgttccccaccctgaaccacaagctgaccgagggcagcggcccccacttccagagcatctag

SEQ ID NO: 100339 - DNA, 471 bp, Artificial Sequence
  derived and/or modified sequence
gtgcagcaggtgcagaccgtgcagcaggtgcagcacgtgtaccccgcccaggtgcagtacgtggagggcagcgacaccgtgtacaccaacggcgccatcagaaccaccacctacccctacaccgagacccagatgtacagccagaacaccggcggcaactacttcgacacccagggcagcagcgcccaggtgaccaccgtggtgagcagccacagcatggtgggcaccggcggcatccagatgggcgtgaccggcggccagctgatcagcagcagcggcggcacctacctgatcggcaacagcatggagaacagcggccacagcgtgacccacaccaccagagccagccccgccaccgccaacagcgtgcccgagatgaagctgctgagacagatcaccatgaacagactgttccccaccctgaaccacaagctgaccgagggcagcggcccccacttccagagcatctag

SEQ ID NO: 100340 - DNA, 408 bp, Artificial Sequence
  derived and/or modified sequence
gtgcagcaggtgcagaccgtgcagcaggtgcagcacgtgtaccccgcccaggtgcagtacgtggagggcagcgacaccgtgtacaccaacggcgccatcagaaccaccacctacccctacaccgagacccagatgtacagccagaacaccggcggcaactacttcgacacccagggcagcagcgcccaggtgaccaccgtggtgagcagccacagcatggtgggcaccggcggcatccagatgggcgtgaccggcggccagctgatcagcagcagcggcggcacctacctgatcggcaacagcatggagaacagcggccacagcgtgacccacaccaccagagccagccccgccaccctgttcctgttcagctgcgtgcccttcagcctgggccagctgagcccctag

SEQ ID NO: 100341 - DNA, 417 bp, Artificial Sequence
  derived and/or modified sequence
atgcagaccagcgagaccggcagcgacaccggcagcaccgtgaccctgcagaccagcgtggccagccaggccgccgtgcccacccaggtggtgcagcaggtgcccgtgcagcagcaggtgcagcaggtgcagaccgtgcagcaggtgcagcacgtgtaccccgcccaggtgcagtacgtggagggcagcgacaccgtgtacaccaacggcgccatcagaaccaccacctacccctacaccgagacccagatgtacagccagaacaccggcggcaactacttcgacacccagggcagcagcgcccaggtgaccaccgtggtgagcagccacagcatggtgggcaccggcggcatccagatgggcgtgaccggcggccagctgatcagcagcagcggcggcacctacctgatcggctag

SEQ ID NO: 100342 - DNA, 555 bp, Artificial Sequence
  derived and/or modified sequence
atgcagaccagcgagaccggcagcgacaccggcagcaccgtgaccctgcagaccagcgtggccagccaggccgccgtgcccacccaggtggtgcagcaggtgcccgtgcagcagcaggtgcagcaggtgcagaccgtgcagcaggtgcagcacgtgtaccccgcccaggtgcagtacgtggagggcagcgacaccgtgtacaccaacggcgccatcagaaccaccacctacccctacaccgagacccagatgtacagccagaacaccggcggcaactacttcgacacccagggcagcagcgcccaggtgaccaccgtggtgagcagccacagcatggtgggcaccggcggcatccagatgggcgtgaccggcggccagctgatcagcagcagcggcggcacctacctgatcggcaacagcatggagaacagcggccacagcgtgacccacaccaccagagccagccccgccaccatcgagatggccatcgagaccctgcagaagagcgacggcctgagcacccacagaagcagcctgctgaacagccacgtgtag

SEQ ID NO: 100343 - protein, 1450 aa, Artificial Sequence
  derived and/or modified sequence
MALVTVQRSPTPSTTSSPCASSSHLEDSESAALLCCECEESEIFTDSNEADSGEEECRSQPRSISESFLTVKGAALFLPRGNGSSTPRISHRRNKHAGDLQQHLQAMFILLRPEDNIRLAVRLESTYQNRTRYMVVVSTNGRQDTEESIVLGMDFSSNDSSTCTMGLVLPLWSDTLIHLDGDGGFSVSTDNRVHIFKPVSVQAMWSALQSLHKACEVARAHNYYPGSLFLTWVSYYESHINSDQSSVNEWNAMQDVQSHRPDSPALFTDIPTERERTERLIKTKLREIMMQKDLENITSKEIRTELEMQMVCNLREFKEFIDNEMIVILGQMDSPTQIFEHVFLGSEWNASNLEDLQNRGVRYILNVTREIDNFFPGVFEYHNIRVYDEEATDLLAYWNDTYKFISKAKKHGSKCLVHCKMGVSRSASTVIAYAMKEYGWNLDRAYDYVKERRTVTKPNPSFMRQLEEYQGILLASKQRHNKLWRSHSDSDLSDHHEPICKPGLELNKKDITTSADQIAEVKTMESHPPIPPVFVEHMVPQDANQKGLCTKERMICLEFTSREFHAGQIEDELNLNDINGCSSGCCLNESKFPLDNCHASKALIQPGHVPEMANKFPDLTVEDLETDALKADMNVHLLPMEELTSPLKDPPMSPDPESPSPQPSCQTEISDFSTDRIDFFSALEKFVELSQETRSRSFSHSRMEELGGGRNESCRLSVVEVAPSKVTADDQRSSSLSNTPHASEESSMDEEQSKAISELVSPDIFMQSHSENAISVKEIVTEIESISQGVGQIQLKGDILPNPCHTPKKNSIHELLLERAQTPENKPGHMEQDEDSCTAQPELAKDSGMCNPEGCLTTHSSIADLEEGEPAEGEQELQGSGMHPGAKWYPGSVRRATLEFEERLRQEQEHHGAAPTCTSLSTRKNSKNDSSVADLAPKGKSDEAPPEHSFVLKEPEMSKGKGKYSGSEAGSLSHSEQNATVPAPRVLEFDHLPDPQEGPGSDTGTQQEGVLKDLRTVIPYQESETQAVPLPLPKRVEIIEYTHIVTSPNHTGPGSEIATSEKSGEQGLRKVNMEKSVTVLCTLDENLNRTLDPNQVSLHPQVLPLPHSSSPEHNRPTDHPTSILSSPEDRGSSLSTALETAAPFVSHTTHLLSASLDYLHPQTMVHLEGFTEQSSTTDEPSAEQVSWEESQESPLSSGSEVPYKDSQLSSADLSLISKLGDNTGELQEKMDPLPVACRLPHSSSSENIKSLSHSPGVVKERAKEIESRVVFQAGLTKPSQMRRSASLAKLGYLDLCKDCLPEREPASCESPHLKLLQPFLRTDSGMHAMEDQESLENPGAPHNPEPTKSFVEQLTTTECIVQSKPVERPLVQYAKEFGSSQQYLLPRAGLELTSSEGGLPVLQTQGLQCACPAPGLAVAPRQQHGRTHPLRRLKKANDKKRTTNPFYNTM

SEQ ID NO: 100344 - DNA, 4353 bp, Artificial Sequence
  derived and/or modified sequence
atggcattagtgacagtccagcggtcgcccaccccttccacgacatcttctccttgcgcttcttcaagccatctggaggatagcgaaagcgctgcgttgctgtgttgtgaatgtgaagaatccgaaatttttactgattccaacgaggccgattccggagaagaagagtgccgaagtcagcctcggtcaatttcagagtcattcctgacagttaagggggccgccctcttcctccccaggggaaatggctcaagcactccaaggatcagccatcggagaaataaacacgccggcgacctgcaacaacacctgcaggccatgtttatactattgcgccctgaagataatatccgcttagcagtgcggctcgagtcaacataccagaatcgcactcggtacatggttgttgtgtcaactaacggcaggcaggataccgaggaatccattgtgctagggatggacttctcttcaaatgattcctcaacatgtaccatggggctcgtactcccattgtggagcgatactcttatccaccttgatggggatgggggcttttccgtctccacggacaaccgggtgcatatttttaagcccgtcagtgtacaagcgatgtggagtgcattgcaatctctgcataaggcttgcgaggtggcacgagcccacaactattacccagggagtttgtttctcacgtgggtatcttattatgagtcacatataaatagtgaccagtccagtgtcaacgaatggaatgccatgcaggacgttcaatcacaccggcctgactccccggctctgtttacggacatacccaccgaaagagaaagaactgaaagattgattaagacaaagctccgcgaaattatgatgcagaaagaccttgaaaatatcaccagcaaagagattagaaccgagctcgaaatgcagatggtgtgtaatctgcgggagttcaaagaatttatagataacgaaatgatcgtgattctgggacaaatggactctcctacccagatttttgagcatgtctttctgggctctgaatggaatgccagtaatctagaagacctgcaaaataggggcgtacggtacattcttaacgtgacacgcgagattgacaatttttttcccggggtgtttgagtaccataacattagagtgtatgacgaagaagccaccgacttgcttgcgtattggaatgacacttacaagttcatctctaaagcgaaaaagcatggctccaagtgtctggtgcactgtaaaatgggcgtcagtagaagcgccagcacagtgattgcatacgccatgaaggagtacggctggaacctcgatcgggcttatgattatgtgaaagagcggagaacagtcactaagccgaatcccagctttatgcggcaactcgaggaatatcaaggaattttactagccagtaagcagcggcacaacaagctgtggcggagccacagcgactcagacctgagtgatcatcacgagcccatatgtaaacctggactggagctgaataagaaagatataactacaagtgccgatcagattgcggaggtcaagacaatggagagtcaccctcccattccgcctgtattcgtggaacacatggtgcctcaagatgctaaccaaaaggggctgtgtaccaaggagcgcatgatctgtctggagttcacatcccgcgagtttcacgcaggacaaattgaggatgagctcaatttgaacgacattaacgggtgctctagtggctgctgcctcaatgaatccaaatttcctctcgataattgtcatgcctctaaggctctgatccagcctgggcacgtccctgagatggccaataagttcccagatctcaccgtggaagaccttgaaactgacgcactgaaggccgacatgaacgtgcatttattgcctatggaggagctcactagcccactgaaggacccaccaatgtcacctgaccctgagtcaccaagcccacaaccatcatgccaaaccgagatcagcgacttctccacagatcgcatcgacttcttttctgccctggaaaaatttgtggagctaagccaggaaactcgatctagaagcttcagtcattcacgcatggaagagctaggcgggggccgtaacgaatcctgcagactctccgtggtcgaagtggcccccagcaaggtgacagcagacgaccagcgcagcagctcactttccaatacacctcatgcctcggaggaaagcagcatggatgaagagcagtcaaaagcaatctcagagttggtgtcccctgatatttttatgcaatctcatagtgagaatgctatctcagtcaaggaaatcgtcacagagatcgagtccatttctcagggggttggacaaatccaactcaagggcgacatactcccaaatccttgtcatactccaaaaaaaaactctatccacgagttactattggaaagagctcagaccccagaaaacaaacctgggcacatggagcaggatgaagatagttgcacagctcagcccgagctggctaaggattctggcatgtgcaaccctgaaggctgtctgacaactcactcctctattgctgatctcgaggagggggaacctgccgagggcgaacaggagctccagggaagtggcatgcacccgggtgctaaatggtatcccggttctgtgcgtagggccacccttgagttcgaggagcgactgaggcaggagcaagagcatcacggagccgcgccaacatgcacttccctcagcacccggaaaaattccaaaaatgacagctctgttgcggacctggcacccaagggcaagtctgacgaggcccctcccgaacatagctttgtgctgaaagaacccgagatgtcaaagggaaagggaaaatactctggttctgaggccggcagtttgagtcactccgagcagaatgctaccgtacctgctcctagagtgctggagttcgatcatctccccgacccccaggaaggtcccggtagcgataccggcacccaacaggaaggagtgctgaaggatctgagaacagttattccatatcaggagtctgaaacccaggccgtgccactgcctttgccaaagagggtggagatcattgagtacacccacattgtcacaagccccaatcacaccggacccggctcggagattgccacctcagagaagagtggcgagcaagggctcagaaaagttaacatggaaaagtctgtcacagtactctgtacacttgatgaaaacttaaatcgaacactcgatcccaatcaagtttcattgcacccacaggtgctccctcttcctcatagttcctctccagaacacaaccggccgaccgatcaccctacgagtatcctgtcctcgcccgaagacaggggctcctccttgtctacggctctggaaacggccgcccccttcgtatcccacacaacgcatctattgtccgcctccttggactatttacacccccaaacaatggtgcaccttgagggtttcacagagcagagttccaccactgatgaaccctccgccgaacaggtgagctgggaggaatctcaagagagccccctgtcttccggtagtgaggtgccatataaggactcacagttgtccagcgcagacttaagtttgatttccaagctgggtgataacacgggggaactgcaggagaaaatggaccctttgcccgtggcttgccgtctacctcattcctcctcttccgagaacatcaagagtctctctcattcacccggcgtggtgaaagagcgcgcaaaggaaattgagagccgagtggtctttcaggccggcttaacaaaaccctcccaaatgcgccgcagtgcctctctcgccaaacttggttacttagacctatgtaaggactgtttgccggagcgcgagcctgcaagctgcgagagccctcatttgaaactgctgcagccttttcttaggacagactctggaatgcatgccatggaggatcaggagtctctggaaaacccgggagccccccacaatcctgagcctaccaaatcctttgtggagcaactcacaactactgagtgcatcgtgcagtctaagcctgtggagagacccttagttcagtacgccaaagagtttggttcctcacagcagtacctcctccccagggccggtctggagctgacctcctcggagggagggcttcccgtgttgcagactcagggcctgcaatgcgcttgtccggcccccgggctggctgtggctccccgtcagcagcacggacgcacgcatccgctgaggagactcaagaaagctaacgataagaaacgaaccactaatccgttctataatactatgtag

SEQ ID NO: 100345 - DNA, 4353 bp, Artificial Sequence
  derived and/or modified sequence
atggccctggtgacagtgcagaggagccccacccccagcaccaccagcagcccctgtgccagcagcagccacctggaggacagcgagagcgctgccctgctgtgctgtgaatgtgaggagagcgagatcttcacagacagcaatgaggccgacagcggggaggaggagtgccgcagccagcccaggagcatcagcgagagcttcctgactgtgaagggggccgccctcttcctgcccagaggaaatggcagcagcaccccccgcatcagccacagaagaaacaagcatgctggggacctgcagcagcacctgcaggccatgttcatcctgctgcggcctgaggacaacatccggctggccgtgcggctggagagcacctaccagaacagaacccgctacatggtggtggtgtccaccaacggccggcaggacacagaggagagcatcgtgctgggcatggacttcagcagcaatgacagcagcacctgcaccatgggcctggtgctgcccctgtggagcgacaccctcatccacctggatggagatggcggcttctctgtgtccacagacaacagagtgcacatcttcaagcctgtgtctgtgcaggccatgtggagcgccctgcagagcctgcacaaggcctgtgaggtggcccgggcccacaactactacccaggcagcctcttcctgacctgggtgtcctactatgagagccacatcaacagcgaccagagctctgtgaatgagtggaatgccatgcaggatgtgcagagccacaggccagacagccctgccctcttcacagacatccccacagagcgggagaggacagagcggctcatcaagaccaagctgcgggagatcatgatgcagaaggacctggagaacatcaccagcaaggagatcagaacagagctggagatgcagatggtgtgcaacctgcgggagttcaaggagttcatcgacaatgagatgatcgtcatcctgggccagatggacagccccacccagatctttgaacatgtgttcctgggcagcgagtggaatgccagcaacctggaggacctgcagaacagaggagtgcgctacatcctgaatgtgacccgggagattgacaacttcttccctggggtgtttgagtaccacaacatccgggtgtatgatgaggaggccacagacctgctggcctactggaatgacacctacaagttcatcagcaaggccaagaagcacggcagcaagtgcctggtgcactgcaagatgggcgtgagccgcagcgccagcacagtgattgcctatgccatgaaggagtatggctggaacctggaccgggcctatgactatgtgaaggagaggagaacagtgaccaagcccaaccccagcttcatgaggcagctggaggagtaccagggcatcctgctggccagcaagcagaggcacaacaagctgtggaggagccacagcgacagcgacctgagtgaccaccacgagcccatctgcaagccaggcctggagctgaacaagaaggacatcaccaccagcgctgaccagattgctgaggtgaagaccatggagagccacccccccatcccccctgtgtttgtggagcacatggtgccccaggatgccaaccagaagggcctgtgcaccaaggagaggatgatctgcctggagttcaccagccgggagttccacgccggccagattgaagatgagctgaacctgaatgacatcaatggctgcagcagcggctgctgcctgaatgaaagcaagttccccctggacaactgccacgccagcaaggccctgatccagcccggccacgtgcctgagatggccaacaagttcccagacctgactgtggaggacctggagacagatgccctgaaggctgacatgaatgtgcacctgctgcccatggaggagctgaccagccccctgaaggacccccccatgagcccagaccctgagagccccagcccccagcccagctgccagacagagatcagtgacttcagcacagacagaattgacttcttcagcgccctggagaagtttgtggagctgagccaggagaccaggagccgctccttcagccacagcaggatggaggagctgggcggcggcagaaatgaaagctgccgcctgtctgtggtggaggtggcccccagcaaggtgacagcagatgaccagaggagcagcagcctgagcaacacccctcatgccagcgaggagagctccatggatgaggagcagagcaaggccatcagcgagctggtgtccccagacatcttcatgcagagccacagtgaaaatgccatctctgtgaaggagatcgtgacagaaattgagagcatcagccagggcgtgggccagatccagctgaagggggacatcctgcccaacccctgccacacccccaagaagaacagcatccacgagctgctgctggagcgggcccagaccccagagaacaagccaggccacatggagcaggatgaggacagctgcacagcccagcctgagctggccaaggacagcggcatgtgcaaccctgagggctgcctgaccacccacagcagcattgctgacctggaggagggggagcctgctgagggggagcaggagctgcagggcagcggcatgcaccctggggccaagtggtacccaggctctgtgcggcgggccaccctggagtttgaggagcggctgcggcaggagcaggagcaccacggggccgcccccacctgcaccagcctgagcaccaggaagaacagcaagaatgacagctctgtggccgacctggcccccaagggcaagagtgatgaggcccctcctgagcacagctttgtgctgaaggagcctgagatgagcaagggcaagggcaagtacagcggcagcgaggccggcagcctgagccacagcgagcagaatgccaccgtgcctgccccccgggtgctggagtttgaccacctgcctgacccccaggagggccctggcagtgacaccggcacccagcaggagggcgtgctgaaggacctgaggacagtcatcccctaccaggagagcgagacccaggccgtgcccctgcccctgcccaagagggtggagatcatcgagtacacccacatcgtgaccagccccaaccacactggacctggcagcgagatcgccaccagcgagaagtctggagagcagggcctgaggaaggtgaacatggagaagtctgtgacagtgctgtgcaccctggatgagaacctgaacagaaccctggaccccaaccaggtgtccctgcacccccaggtgctgcccctgccccacagcagcagccctgagcacaaccggcccacagaccaccccaccagcatcctgagcagccctgaggaccggggcagcagcctgagcacagccctggagacagctgccccctttgtgagccacaccacccacctgctgagcgccagcctggactacctgcacccccagaccatggtgcacctggagggcttcacagagcagagcagcaccacagatgagcccagcgctgagcaggtgtcctgggaggagagccaggagagccccctgagcagcggcagcgaggtgccctacaaggacagccagctgagcagcgctgacctgagcctcatcagcaagctgggggacaacacaggagagctgcaggagaagatggaccccctgcctgtggcctgccgcctgccccacagcagcagcagcgagaacatcaagagcctgagccacagccctggggtggtgaaggagcgggccaaggagattgagagccgggtggtgttccaggccggcctgaccaagcccagccagatgagaagaagtgccagcctggccaagctgggctacctggacctgtgcaaggactgcctgcctgagcgggagcccgccagctgtgagagcccccacctgaagctgctgcagcccttcctgaggacagacagcggcatgcacgccatggaggaccaggagagcctggagaaccctggggccccccacaaccctgagcccaccaagagctttgtggagcagctgaccaccacagagtgcatcgtgcagagcaagcctgtggagcggcccctggtgcagtatgccaaggagtttggcagcagccagcagtacctgctgccccgggccggcctggagctgaccagcagcgagggcggcctgcctgtgctgcagacccagggcctgcagtgtgcctgcccagcccctggcctggccgtggccccccggcagcagcacggccgcacccaccccctgcggcggctgaagaaggccaatgacaagaagaggaccaccaaccccttctacaacaccatgtag

SEQ ID NO: 100346 - DNA, 4353 bp, Artificial Sequence
  derived and/or modified sequence
atggccctggtgaccgtgcagcggagccccacccccagcaccaccagtagcccttgcgcatctagctctcaccttgaagatagtgagtccgccgccttgctctgctgtgaatgcgaagagtcagaaattttcaccgactctaacgaggccgactctggcgaggaggaatgtcgatcgcagcctcgaagcatcagtgagtctttccttacagtgaagggcgcagcactgttcctccctcgggggaacggcagtagcaccccccgcatcagtcaccgtcgcaacaagcatgctggggatctgcaacagcacctgcaggctatgtttatactgcttcggcccgaagataacattcgactagccgtaagattggagagcacttaccagaaccggactagatacatggtcgttgtaagcacgaacggccgccaggatactgaagagtctatagtcctgggcatggacttctcatccaatgacagctcgacgtgcacaatgggcctggttctgccactgtggtcggataccctcatccacctcgacggggatggcgggtttagtgttagcactgacaatcgcgtacatatctttaagccagtatctgtgcaggcaatgtggtcggctctgcagtctcttcataaggcctgcgaggtggctagagcccacaactactacccgggtagtctgtttctgacctgggtgtcttattatgagtctcacattaattctgatcagtccagcgtgaatgaatggaacgctatgcaagacgtgcagtcacaccggccagactctccagcactcttcaccgacatccccaccgagagggagagaaccgagcgcttgattaaaacaaaactgcgggagatcatgatgcagaaggacctcgagaacatcaccagcaaagaaatccggaccgaactcgaaatgcagatggtgtgtaacctgcgggaatttaaggaattcattgataatgagatgatcgtgatcctgggacaaatggatagccccacccagatcttcgaacatgtattccttggctctgaatggaatgcctctaatctcgaggacctccagaatcgcggcgttcggtacatcttaaatgtcactagggagatagacaatttttttccaggagtattcgaataccataatattcgagtttatgacgaagaagcgactgatctgctggcatattggaatgatacctataagtttatctccaaggccaagaaacacggttcgaaatgtctggtccattgtaagatgggcgtatcgcgctccgcatcaacggtcattgcctacgctatgaaggaatatggatggaatttggatagagcctacgactacgtgaaggaacggcgaactgttaccaaacccaatccctccttcatgcgtcaactcgaagagtatcagggtattcttttagcgtcaaaacagcggcataataaactgtggcgcagccatagtgacagtgatctgtcagatcatcacgaacccatatgtaagcctggcttggaactgaacaagaaagacattaccaccagcgcagaccagatcgccgaggtgaaaaccatggaatctcaccccccgatcccaccggtctttgtggaacatatggttccccaggacgcaaatcagaagggcctgtgcacgaaggaacgaatgatctgtctcgagttcacttctcgagaatttcacgccggccagatagaagacgagctcaacctcaacgacattaatgggtgcagctccggctgctgcttgaatgagagcaaattcccgctggataattgccacgcctcgaaagctctgatacagcctgggcacgtgccggagatggcaaacaagttccccgacctcaccgtcgaggatctcgagactgatgcacttaaagctgatatgaacgtgcacttgcttccgatggaggagttaacatcacctttgaaggaccctcctatgtcccccgatccagagagcccgagcccacagccctcctgccagacggagatttctgacttctcaacggaccgcatagatttcttttctgcacttgagaaattcgtggagctgtcgcaggaaacacgcagtagaagtttctcccatagcagaatggaggagctgggcggggggagaaatgaaagttgccggctatcagttgtcgaggtggccccttcaaaagtgacggccgacgaccagcggagtagctcactctccaatactccgcacgcgagcgaggagtccagcatggatgaggagcagtccaaggccattagcgaactggtgtcccccgacatatttatgcagagccactccgaaaatgccatttctgttaaagagattgtgacagagatcgagagtatttctcaaggtgtcgggcagattcaactaaaaggggacatcctgcccaatccctgccatacacccaagaagaattccatccacgagttgctcctggagagagcccaaactcccgagaataagccaggtcatatggaacaagacgaggactcctgtacggctcaacctgagctggccaaggatagcggtatgtgcaatccagaaggttgtctgacgacccactcttcaattgctgatctggaggagggtgagcccgccgagggcgaacaggagctgcaaggcagcgggatgcaccctggggccaagtggtatcccgggagtgtgaggcgggcgactctcgaatttgaggagcgcctgcgacaggagcaggaacaccacggtgcggccccaacatgtacctccctatccacgcgcaaaaatagtaaaaatgactcttcagtggcagacctcgcaccaaagggtaagtccgacgaggccccaccagagcatagcttcgttctcaaagaacccgaaatgtctaaaggtaagggtaagtactctggctcagaggctggctctctgtctcactcagaacagaatgcaacggtgccggctccacgggttttggaatttgaccacctgcctgatccgcaagagggccccggaagcgacacaggaacacagcaggagggtgtgctgaaggatctccgcaccgtcatcccttaccaagagtctgagacccaggccgtgccactgcccttgccaaaacgtgtagagattatcgagtacacacacattgtgactagtccaaaccatactgggccagggtcagagatcgccaccagcgagaaatctggagagcagggccttaggaaggtgaatatggaaaaaagtgtgactgtgctgtgcacgctggacgagaatctcaaccggactcttgatccaaatcaagtatccctgcatcctcaggttctccccctgccacatagtagctcccctgaacacaaccgccccacggatcatcctactagtatactcagctcccccgaagatcggggatcatccctgtccacagcgctcgagaccgccgcgccattcgtgagccatactactcatcttctctcggccagcctcgattacctccatccccagaccatggtacaccttgaaggcttcactgaacagagcagtaccacggacgagcccagtgctgaacaggtgtcatgggaggaaagtcaagagagtccactctcctctggctcagaggtcccttacaaggatagccaactatcatcagctgatctctcactgatcagtaaactcggtgacaacacaggtgagctccaggaaaagatggacccactgcctgtagcttgccgcttacctcattcttcctcctctgaaaacataaagtctttgagtcactctcccggagtggtgaaagagcgcgctaaggaaatcgaaagcagggtggtgtttcaggctggactaacaaagcctagtcagatgcggagatcagcatccctggccaagctgggttatctcgatctttgcaaggactgccttccagaacgggagcccgcatcgtgcgaatcaccccatctcaagctgctgcagccctttctcaggaccgatagcggcatgcacgcaatggaagaccaggagtctcttgaaaaccccggtgcccctcacaatcctgagccaactaagagcttcgtcgaacaactgacgacgactgagtgcatcgtccagtctaagccagtagagagaccactcgtacagtacgcgaaggaattcgggtcatctcagcagtatctactccccagagccggattggaattgacaagctccgagggtggcctccctgtgctgcagacacaagggctccagtgcgcttgccccgcgccaggtttggctgtggccccacgccaacagcacggtcgcacccacccgctccgtaggctgaagaaggcgaacgataaaaagagaaccacgaaccccttttacaatacaatgtag

SEQ ID NO: 100347 - DNA, 4353 bp, Artificial Sequence
  derived and/or modified sequence
atggccctggtgaccgtccagcggtctcctactccatcaactacaagttcgccctgcgcttccagcagccatctcgaggactctgaatcggctgcattactgtgttgcgaatgcgaagagagcgaaatctttactgattccaatgaggcagattccggggaggaagagtgcaggtcccagcctcgctccatctctgagtcttttctgacagtaaagggagcggctctgttcctcccgcgagggaacggttcgtcaacccctagaataagccaccgcagaaataaacacgctggtgacctacaacagcacctgcaggcaatgttcattctgcttcgtcccgaggataacatccgtctggcagtgagacttgaatcaacttatcagaatagaacccgatacatggtcgtcgtatccacaaacggacgccaggatacagaagagtcaatagtcctgggaatggatttctcatctaacgactcctccacctgtactatgggtcttgtactccccttatggtccgacacactgatccacctggacggggacggcggttttagcgtctccacagacaacagggtacatattttcaagcctgtcagcgtccaggctatgtggtcagccctgcaaagtcttcacaaagcttgtgaggtggcgcgagcccacaactactaccctggtagcctgttccttacttgggtgtcctactacgagtcccatataaattccgaccagtcttctgtgaacgaatggaacgccatgcaggacgtgcagtctcatcgaccagatagtccagctctgtttacagatatcccaacagaacgggaaaggactgaaaggctcataaaaacgaaattgcgcgagattatgatgcagaaagacttggagaacattacttccaaggagatccgaaccgagcttgaaatgcagatggtgtgcaacctcagggagttcaaagaattcatcgacaatgaaatgatcgttatactcgggcagatggactcgcccacgcagatcttcgagcacgtatttttaggcagcgaatggaatgcatcaaatcttgaagatctgcagaaccggggagtacgctacatactgaacgtaaccagagagatcgataatttctttcccggagtcttcgaataccacaacatccgcgtttatgacgaggaagcgaccgacctgctcgcgtactggaacgatacgtacaagttcatttctaaagccaagaaacacggatctaagtgtctggtccactgcaaaatgggcgttagcaggtccgcaagcaccgtgattgcttacgccatgaaggaatatgggtggaatctggaccgggcttatgactacgtgaaggaacgacgtaccgtcacaaaaccaaacccatccttcatgaggcagctggaagaataccaggggatcctattggctagcaaacaacgccacaataaattgtggaggagtcacagcgatagcgatttgagtgatcatcacgagcccatttgtaaacctggtctggaactcaacaagaaggacattaccacctctgccgaccagatagcagaggtaaagacaatggagagtcacccaccaattcccccagttttcgtagagcacatggtgccccaagacgccaatcagaagggcttgtgtaccaaagagagaatgatctgtctagagtttacgagcagggaattccacgccggacagatcgaagatgaattaaacctgaacgacatcaacggctgttccagcggatgctgtctcaatgagtctaagtttcccctggataattgccacgcgagcaaggctttgattcaacccggacatgtccccgaaatggcaaacaagttccccgatctgaccgtagaggacctggagaccgatgccctgaaagctgatatgaacgtacacttgcttccgatggaggaattgaccagccctcttaaggaccctcccatgtctcctgacccggagagccccagcccacagcccagctgccaaaccgaaatctccgacttttccacagacaggatcgacttcttcagtgcccttgagaaattcgtcgagctatctcaagagacaaggagcaggtcctttagccacagcaggatggaagagctcgggggaggacgcaatgagagttgtcgccttagcgtggtggaggtagccccaagtaaagttaccgccgatgatcaaagatcctcttcactgtcaaacacccctcacgcttctgaggaatcctctatggacgaggaacagtcgaaagccatctctgaactcgtgagcccagacatctttatgcagtcccacagtgagaatgctattagtgtcaaggagatcgtgacggaaattgagtctatcagtcaaggcgttggtcagattcaactgaaaggggacatcctcccaaatccttgccatacccccaagaagaattcaattcacgaactactgctggaaagagctcagacacctgagaacaagccaggtcacatggagcaggatgaagacagttgtacagctcagcccgagttagccaaagacagcggtatgtgtaatcctgagggctgcctcacgacccactcctccatcgccgatctggaggaaggcgagcctgccgagggggaacaggagttacagggatctgggatgcatccaggcgctaagtggtatccgggatctgtccggcgtgcaaccctggaatttgaggagcgcctacgtcaggagcaggaacatcacggtgctgctcccacctgtacgtccctgtcaacaaggaagaatagtaagaacgattcctctgtcgctgatctcgctcccaaaggtaagagtgatgaagcacccccagaacactcttttgtgctaaaggagcccgagatgtccaaaggaaaaggcaagtatagtggttccgaagccggtagcttatcccactccgagcagaatgccaccgttcccgctcctcgggtgctggagtttgatcacttgccggacccacaggagggccctgggtctgataccgggacacagcaggaaggggtgctgaaggatctcaggaccgtcattccttaccaggagagcgagacgcaagctgtgcccctgcccctccccaagcgtgtggagataatcgaatacactcacatagttacttccccaaatcacactggcccagggtctgaaatcgctacctccgaaaagtccggcgagcaggggctgcgcaaggtgaacatggaaaaaagcgtcactgtcctctgcactctagacgagaacttgaatcgcactttggatcctaatcaggtgagcctccacccgcaggtcctcccactacctcatagctctagtccagagcataaccggccaacggatcacccaacctctattctctcttctcccgaagatagggggtcgtcactcagcaccgctctggaaaccgcggcaccgttcgttagccataccacccacctcttgtctgcctcattggactatttacaccctcaaacaatggtacatctcgaaggcttcactgagcagtctagcaccacagatgaaccaagtgccgagcaggtgagctgggaagagtcgcaggaaagccctttgagctctggctctgaagtgccatataaagacagtcaactgagctctgcagacctgagcctcatttccaaactgggggataacactggcgaactgcaggagaaaatggacccactgcctgtcgcctgccgcctgcctcacagcagttcttccgagaacattaaatccctgtcgcacagccctggagtggttaaggagcgagctaaggagatcgagtcacgggtggtcttccaggcgggactaactaaaccttcacaaatgagacgcagtgcaagcctggccaagttgggctatctcgacttatgcaaggattgcctccccgagcgggaacccgctagttgtgagtctcctcatctcaagctgctgcagccttttctgcgtactgactctgggatgcatgccatggaagaccaggagtccctggaaaacccaggagcccctcataatcctgagcctaccaaatcgtttgtggagcagttaactacaactgaatgtatcgtccagagtaaacccgtcgagaggcccttagtgcagtacgcaaaggagtttgggtcatcccagcaatacctattacctagagccggattagagctcacaagcagtgaggggggactgcctgtgttgcaaacacagggactgcagtgtgcctgccctgcgccagggttggcagttgccccacgccagcagcatgggaggactcaccccctgcggaggctcaaaaaagccaatgataaaaagcgcacaaccaacccattttataatacaatgtag

SEQ ID NO: 100348 - DNA, 4538 bp, Artificial Sequence
  derived and/or modified sequence
ccgcacccctttccccatcccggctccgtcaccctcccgtcccccacactcaggacaagaatgccctgcccggaacaacccagcagcgcctagatggctttggtcacggtccagcggtcacctacccccagcaccacctccagcccctgcgcctcgagctctcatttggaagacagtgaatcagcagcattactttgctgtgaatgtgaagaatcagaaatctttactgattccaatgaggcagacagtggggaggaagaatgccggtcacagcccaggagcatcagcgagagctttctaactgtcaaaggtgctgccctttttctaccacggggaaatggctcatccacaccaagaatcagccacagacggaacaagcatgcaggcgatctccaacagcatctccaagcaatgttcattttactccgcccagaagacaacatcaggctggctgtaagactggaaagtacttaccagaatcgaacacgctatatggtagtggtttcaactaatggtagacaagacactgaagaaagcatcgtcctaggaatggatttctcctctaatgacagtagcacttgtaccatgggcttagttttgcctctctggagcgacacgctaattcatttggatggtgatggtgggttcagtgtatcgacggataacagagttcacatattcaaacctgtatctgtgcaggcaatgtggtctgcactacagagcttacacaaggcttgtgaagtcgccagagcgcataactactacccaggcagcctatttctcacttgggtgagttattatgagagccatatcaactcagatcaatcctcagtcaatgaatggaatgcaatgcaagatgtacagtcccaccggcccgactctccagctctcttcaccgacatacctactgaacgtgaacgaacagaaaggctaattaaaaccaaattaagggagatcatgatgcagaaggatttggagaatattacatccaaagagataagaacagagttggaaatgcaaatggtgtgcaacttgcgggaattcaaggaatttatagacaatgaaatgatagtgatccttggtcaaatggatagccctacacagatatttgagcatgtgttcctgggctcagaatggaatgcctccaacttagaggacttacagaaccgaggggtacggtatatcttgaatgtcactcgagagatagataacttcttcccaggagtctttgagtatcataacattcgggtatatgatgaagaggcaacggatctcctggcgtactggaatgacacttacaaattcatctctaaagcaaagaaacatggatctaaatgccttgtgcactgcaaaatgggggtgagtcgctcagcctccaccgtgattgcctatgcaatgaaggaatatggctggaatctggaccgagcctatgactatgtgaaagaaagacgaacggtaaccaagcccaacccaagcttcatgagacaactggaagagtatcaggggatcttgctggcaagcaaacagcggcataacaaactatggagatctcattcagatagtgacctctcagaccaccacgaacccatctgcaaacctgggctagaactcaacaagaaggatatcaccacctcagcagaccagattgctgaggtgaagaccatggagagtcacccacccatacctcctgtctttgtggaacatatggtcccacaagatgcaaatcagaaaggcctgtgtaccaaagaaagaatgatctgcttggagtttacttctagggaatttcatgctggacagattgaggatgaattaaacttaaatgacatcaatggatgctcatcagggtgttgtctgaatgaatcaaaatttcctcttgacaattgccatgcatccaaagccttaattcagcctggacatgtcccagaaatggccaacaagtttccagacttaacagtggaagatttggagacagatgcactgaaagcagacatgaatgtccacctactgcctatggaagaattgacatctccactgaaagacccccccatgtcccctgatcctgagtcaccaagcccccaacccagttgccagactgaaatctcagatttcagtacagatcgcattgacttttttagtgccctagagaagtttgtggagctctcccaagaaacccggtcacgatctttttcccattcaaggatggaggaactgggtggaggaaggaatgagagctgtcgactgtcagtggtagaagtagccccttccaaagtgacagctgatgaccagagaagcagctctttgagtaatactccccatgcatcagaagaatcttcaatggatgaggaacagtcaaaggcaatttcagaactggtcagcccagacatcttcatgcagtctcactcggaaaatgcaatttcagtcaaagaaattgtcactgaaattgagtccatcagtcaaggagttgggcagattcaactgaaaggagacatcttacccaacccatgccatacaccaaagaagaacagcatccatgagctgctccttgagagggcccagactccagagaacaaacctggacatatggagcaagatgaggactcctgcacagcccagcctgaactagccaaagactcagggatgtgcaacccagaaggctgcctaaccacacactcatctatagcagacttggaagaaggggaaccagctgagggggaacaagagctccagggctcagggatgcacccaggtgccaagtggtaccctgggtctgtgaggcgagccaccttggagttcgaagagcgcttacggcaggagcaagagcatcatggtgctgccccaacatgtacctcattgtccactcgtaagaattcaaagaatgattcttctgtggcagacctagcaccaaaagggaaaagtgatgaagcccccccagaacattcatttgtcctcaaggaaccagaaatgagcaaaggcaaagggaaatacagtgggtctgaggctggctcactgtcccattctgagcagaatgccactgttccagctcccagggtgctggagtttgaccacttgccagatcctcaggagggcccagggtcagatactggaacacagcaggaaggagtcctgaaggatctgaggactgtgattccataccaggagtctgaaacacaagcagtccctcttccccttcccaagagggtagaaatcattgaatatacccacatagttacatcacccaatcacactgggccagggagtgaaatagccaccagtgagaagagcggagagcaagggctgaggaaagtgaacatggaaaaatctgtcactgtgctctgcacactggatgaaaatctaaacaggactctggaccccaaccaggtttctctgcacccccaagtgctacctctgcctcattcttcctcccctgagcacaacagacccactgaccatccaacctccatcctgagtagccctgaagacagaggcagcagcctgtccacagccctggagacagcagcaccttttgtcagtcatacaacccatttactgtctgccagtttggattacctgcatccccagactatggttcacctggagggcttcacagagcagagcagcactacagatgagccctctgcagaacaggttagctgggaagaaagtcaggagagccctctctccagtggcagtgaggtgccatataaggactcccagctaagtagcgcagacctaagtttaattagcaaacttggtgacaacactggggagttacaggagaaaatggacccattgcctgtagcctgtcgactcccacatagctctagtagtgaaaacataaagagtctcagccacagccccggtgtggtgaaggagcgtgctaaagaaatcgagtctcgagtggttttccaggcagggctcaccaaaccatcccaaatgaggcgctcagcttctctcgccaaattaggttacttggacctctgtaaagactgcttaccagagagggagcctgcctcctgtgaatcccctcatctcaaactgcttcagcctttcctcagaacagactcaggcatgcacgcgatggaggaccaagagtccctagaaaacccaggtgccccccacaacccagagcccaccaagtcttttgtagaacaactcacaacaacagagtgtattgtgcagagcaagccagtggagaggccccttgtgcagtatgccaaagaatttggttctagtcagcagtatttgctccccagggcaggacttgaattgactagttctgaaggaggccttcccgtgctacagacccagggactgcagtgtgcatgcccagctccagggctggccgtggcaccccgtcagcaacacggcagaactcacccccttaggagactgaaaaaggcaaatgacaaaaaacggacaaccaaccccttctataataccatgtgattctgagcctacacatgtgactttctagaagaaatgtttgtaaaaggggcaggtgtaatatgtaaggaacatgcactttattggttaatttt

SEQ ID NO: 100349 - DNA, 4353 bp, Artificial Sequence
  derived and/or modified sequence
atggccctggtgaccgtgcagagaagccccacccccagcaccaccagcagcccctgcgccagcagcagccacctggaggacagcgagagcgccgccctgctgtgctgcgagtgcgaggagagcgagatcttcaccgacagcaacgaggccgacagcggcgaggaggagtgcagaagccagcccagaagcatcagcgagagcttcctgaccgtgaagggcgccgccctgttcctgcccagaggcaacggcagcagcacccccagaatcagccacagaagaaacaagcacgccggcgacctgcagcagcacctgcaggccatgttcatcctgctgagacccgaggacaacatcagactggccgtgagactggagagcacctaccagaacagaaccagatacatggtggtggtgagcaccaacggcagacaggacaccgaggagagcatcgtgctgggcatggacttcagcagcaacgacagcagcacctgcaccatgggcctggtgctgcccctgtggagcgacaccctgatccacctggacggcgacggcggcttcagcgtgagcaccgacaacagagtgcacatcttcaagcccgtgagcgtgcaggccatgtggagcgccctgcagagcctgcacaaggcctgcgaggtggccagagcccacaactactaccccggcagcctgttcctgacctgggtgagctactacgagagccacatcaacagcgaccagagcagcgtgaacgagtggaacgccatgcaggacgtgcagagccacagacccgacagccccgccctgttcaccgacatccccaccgagagagagagaaccgagagactgatcaagaccaagctgagagagatcatgatgcagaaggacctggagaacatcaccagcaaggagatcagaaccgagctggagatgcagatggtgtgcaacctgagagagttcaaggagttcatcgacaacgagatgatcgtgatcctgggccagatggacagccccacccagatcttcgagcacgtgttcctgggcagcgagtggaacgccagcaacctggaggacctgcagaacagaggcgtgagatacatcctgaacgtgaccagagagatcgacaacttcttccccggcgtgttcgagtaccacaacatcagagtgtacgacgaggaggccaccgacctgctggcctactggaacgacacctacaagttcatcagcaaggccaagaagcacggcagcaagtgcctggtgcactgcaagatgggcgtgagcagaagcgccagcaccgtgatcgcctacgccatgaaggagtacggctggaacctggacagagcctacgactacgtgaaggagagaagaaccgtgaccaagcccaaccccagcttcatgagacagctggaggagtaccagggcatcctgctggccagcaagcagagacacaacaagctgtggagaagccacagcgacagcgacctgagcgaccaccacgagcccatctgcaagcccggcctggagctgaacaagaaggacatcaccaccagcgccgaccagatcgccgaggtgaagaccatggagagccacccccccatcccccccgtgttcgtggagcacatggtgccccaggacgccaaccagaagggcctgtgcaccaaggagagaatgatctgcctggagttcaccagcagagagttccacgccggccagatcgaggacgagctgaacctgaacgacatcaacggctgcagcagcggctgctgcctgaacgagagcaagttccccctggacaactgccacgccagcaaggccctgatccagcccggccacgtgcccgagatggccaacaagttccccgacctgaccgtggaggacctggagaccgacgccctgaaggccgacatgaacgtgcacctgctgcccatggaggagctgaccagccccctgaaggacccccccatgagccccgaccccgagagccccagcccccagcccagctgccagaccgagatcagcgacttcagcaccgacagaatcgacttcttcagcgccctggagaagttcgtggagctgagccaggagaccagaagcagaagcttcagccacagcagaatggaggagctgggcggcggcagaaacgagagctgcagactgagcgtggtggaggtggcccccagcaaggtgaccgccgacgaccagagaagcagcagcctgagcaacaccccccacgccagcgaggagagcagcatggacgaggagcagagcaaggccatcagcgagctggtgagccccgacatcttcatgcagagccacagcgagaacgccatcagcgtgaaggagatcgtgaccgagatcgagagcatcagccagggcgtgggccagatccagctgaagggcgacatcctgcccaacccctgccacacccccaagaagaacagcatccacgagctgctgctggagagagcccagacccccgagaacaagcccggccacatggagcaggacgaggacagctgcaccgcccagcccgagctggccaaggacagcggcatgtgcaaccccgagggctgcctgaccacccacagcagcatcgccgacctggaggagggcgagcccgccgagggcgagcaggagctgcagggcagcggcatgcaccccggcgccaagtggtaccccggcagcgtgagaagagccaccctggagttcgaggagagactgagacaggagcaggagcaccacggcgccgcccccacctgcaccagcctgagcaccagaaagaacagcaagaacgacagcagcgtggccgacctggcccccaagggcaagagcgacgaggccccccccgagcacagcttcgtgctgaaggagcccgagatgagcaagggcaagggcaagtacagcggcagcgaggccggcagcctgagccacagcgagcagaacgccaccgtgcccgcccccagagtgctggagttcgaccacctgcccgacccccaggagggccccggcagcgacaccggcacccagcaggagggcgtgctgaaggacctgagaaccgtgatcccctaccaggagagcgagacccaggccgtgcccctgcccctgcccaagagagtggagatcatcgagtacacccacatcgtgaccagccccaaccacaccggccccggcagcgagatcgccaccagcgagaagagcggcgagcagggcctgagaaaggtgaacatggagaagagcgtgaccgtgctgtgcaccctggacgagaacctgaacagaaccctggaccccaaccaggtgagcctgcacccccaggtgctgcccctgccccacagcagcagccccgagcacaacagacccaccgaccaccccaccagcatcctgagcagccccgaggacagaggcagcagcctgagcaccgccctggagaccgccgcccccttcgtgagccacaccacccacctgctgagcgccagcctggactacctgcacccccagaccatggtgcacctggagggcttcaccgagcagagcagcaccaccgacgagcccagcgccgagcaggtgagctgggaggagagccaggagagccccctgagcagcggcagcgaggtgccctacaaggacagccagctgagcagcgccgacctgagcctgatcagcaagctgggcgacaacaccggcgagctgcaggagaagatggaccccctgcccgtggcctgcagactgccccacagcagcagcagcgagaacatcaagagcctgagccacagccccggcgtggtgaaggagagagccaaggagatcgagagcagagtggtgttccaggccggcctgaccaagcccagccagatgagaagaagcgccagcctggccaagctgggctacctggacctgtgcaaggactgcctgcccgagagagagcccgccagctgcgagagcccccacctgaagctgctgcagcccttcctgagaaccgacagcggcatgcacgccatggaggaccaggagagcctggagaaccccggcgccccccacaaccccgagcccaccaagagcttcgtggagcagctgaccaccaccgagtgcatcgtgcagagcaagcccgtggagagacccctggtgcagtacgccaaggagttcggcagcagccagcagtacctgctgcccagagccggcctggagctgaccagcagcgagggcggcctgcccgtgctgcagacccagggcctgcagtgcgcctgccccgcccccggcctggccgtggcccccagacagcagcacggcagaacccaccccctgagaagactgaagaaggccaacgacaagaagagaaccaccaaccccttctacaacaccatgtag

SEQ ID NO: 100350 - protein, 202 aa, Artificial Sequence
  derived and/or modified sequence
MTLSTLARKRKAPLACTCSLGGPDMIPYFSANAVISQNAINQLISESFLTVKGAALFLPRGNGSSTPRISHRRNKHAGDLQQHLQAMFILLRPEDNIRLAVRLESTYQNRTRYMVVVSTNGRQDTEESIVLGMDFSSNDSSTCTMGLVLPLWSDTLIHLDGDGGFSVSTDNRVHIFKPVSVQAMWVDRDSRNKHCDVLLVEE

SEQ ID NO: 100351 - DNA, 609 bp, Artificial Sequence
  derived and/or modified sequence
atgacactctcaacgcttgcgaggaaaaggaaagctcccttggcatgtacatgttccctgggtggtccggacatgatcccctacttcagcgccaacgcagtgatctctcaaaatgccatcaatcaactgattagcgaaagcttcctgacagttaaaggggcggccttattcttgcctcgggggaatggttcctcaactcccaggatcagccaccgaaggaataagcatgctggcgacctacagcaacatcttcaggctatgtttattctgctgaggccagaggataatatcaggctggccgtgaggttggaatccacgtatcagaaccggaccagatatatggtcgtggttagtacgaacggcaggcaggacacggaggaatccattgttctggggatggacttcagcagcaacgacagctctacttgcactatgggcttagtgttacccctgtggagtgatactctgatccacttagacggagacggaggcttctccgtatcaacagataatcgagtgcatatcttcaagcctgtgtccgtacaggctatgtgggttgatcgggacagtcggaacaagcactgcgacgtgcttttggtcgaggaatag

SEQ ID NO: 100352 - DNA, 609 bp, Artificial Sequence
  derived and/or modified sequence
atgaccctgagcaccctggccaggaagaggaaggcccccctggcctgcacctgcagcctgggcggccctgacatgatcccctacttcagcgccaatgctgtgatcagccagaatgccatcaaccagctgatcagcgagagcttcctgactgtgaagggggccgccctcttcctgcccagaggaaatggcagcagcaccccccgcatcagccacagaagaaacaagcatgctggggacctgcagcagcacctgcaggccatgttcatcctgctgcggcctgaggacaacatccggctggccgtgcggctggagagcacctaccagaacagaacccgctacatggtggtggtgtccaccaacggccggcaggacacagaggagagcatcgtgctgggcatggacttcagcagcaatgacagcagcacctgcaccatgggcctggtgctgcccctgtggagcgacaccctcatccacctggatggagatggcggcttctctgtgtccacagacaacagagtgcacatcttcaagcctgtgtctgtgcaggccatgtgggtggaccgggacagcaggaacaagcactgtgatgtgctgctggtggaggagtag

SEQ ID NO: 100353 - DNA, 609 bp, Artificial Sequence
  derived and/or modified sequence
atgaccctgagcaccctggcccggaagcggaaggcccccctggcctgcacctgtagcttgggagggccggatatgattccatatttctctgcgaatgccgtcataagccagaatgccatcaatcagctaattagtgaaagctttctcaccgtcaaaggcgctgctctgtttttacctagggggaacggcagttcgacgccacgcatttcgcatagaaggaacaaacatgctggcgacttacaacagcacctgcaggcgatgtttattctgctgcggccagaggacaatattagactcgctgtgcggctggagtccacttaccaaaacagaacacgctacatggtggtggtcagtactaacggacgccaggacaccgaagagtctattgtgttgggtatggattttagttccaatgatagctctacctgcacaatgggtctggtgctccctctctggagtgacactttaatccacttagacggagacggcggctttagcgtgagcactgacaaccgggtgcacattttcaaacctgtgagcgtccaagccatgtgggtagatcgggacagcagaaacaagcactgtgatgtactgttggtcgaagagtag

SEQ ID NO: 100354 - DNA, 609 bp, Artificial Sequence
  derived and/or modified sequence
atgactctgtccacattggcaaggaaacgcaaagcacctttagcctgcacttgcagcctgggagggccagatatgattccctatttctcagccaacgctgtgatctcgcagaacgccatcaatcagttaattagcgagtctttcctgacagttaagggggcagctctcttcctcccccgaggcaatggctcctccacccccagaatttcacacagacgaaataaacacgcgggtgacttacaacagcacctgcaggccatgttcatactcctcagaccggaagataatatccggctggccgtcagactcgaatcaacatatcagaatcgcactaggtacatggtagtcgtgagcacaaatggcagacaggatacagaggagtccatcgtgctgggcatggacttctcctccaacgactcatccacatgcaccatgggattagtgctgccactgtggtccgacaccctcatccatctggacggggatgggggtttttctgtttcgaccgacaatagagtccatatcttcaaacctgttagcgtacaggccatgtgggttgacagggactcaaggaacaagcactgcgatgtgctgctggttgaggaatag

SEQ ID NO: 100355 - DNA, 795 bp, Artificial Sequence
  derived and/or modified sequence
atgaccctgagcacgttggcccgcaagaggaaggcgcccctcgcttgcacctgcagcctcggtggccccgacatgattccttacttctccgccaacgcggtcatctcgcagaacgccatcaaccagctcatcagcgagagctttctaactgtcaaaggtgctgccctttttctaccacggggaaatggctcatccacaccaagaatcagccacagacggaacaagcatgcaggcgatctccaacagcatctccaagcaatgttcattttactccgcccagaagacaacatcaggctggctgtaagactggaaagtacttaccagaatcgaacacgctatatggtagtggtttcaactaatggtagacaagacactgaagaaagcatcgtcctaggaatggatttctcctctaatgacagtagcacttgtaccatgggcttagttttgcctctctggagcgacacgctaattcatttggatggtgatggtgggttcagtgtatcgacggataacagagttcacatattcaaacctgtatctgtgcaggcaatgtgggttgacagggattcaaggaacaaacactgtgatgtactattggtggaagaatgaactggagcagcctttctggagagtgatttgccaatatgccttatcattttgcatgatctttgtcctagtaactctatttctatggatttactctaagtttgtaaacatggatgtgtgcaaagattttagctctaagaatgtttgtcagtgttctaataatagcaaaaaataaaaaacaaatgattg

SEQ ID NO: 100356 - DNA, 609 bp, Artificial Sequence
  derived and/or modified sequence
atgaccctgagcaccctggccagaaagagaaaggcccccctggcctgcacctgcagcctgggcggccccgacatgatcccctacttcagcgccaacgccgtgatcagccagaacgccatcaaccagctgatcagcgagagcttcctgaccgtgaagggcgccgccctgttcctgcccagaggcaacggcagcagcacccccagaatcagccacagaagaaacaagcacgccggcgacctgcagcagcacctgcaggccatgttcatcctgctgagacccgaggacaacatcagactggccgtgagactggagagcacctaccagaacagaaccagatacatggtggtggtgagcaccaacggcagacaggacaccgaggagagcatcgtgctgggcatggacttcagcagcaacgacagcagcacctgcaccatgggcctggtgctgcccctgtggagcgacaccctgatccacctggacggcgacggcggcttcagcgtgagcaccgacaacagagtgcacatcttcaagcccgtgagcgtgcaggccatgtgggtggacagagacagcagaaacaagcactgcgacgtgctgctggtggaggagtag

SEQ ID NO: 100357 - protein, 969 aa, Artificial Sequence
  derived and/or modified sequence
MWAMESGHLLWALLFMQSLWPQLTDGATRVYYLGIRDVQWNYAPKGRNVITNQPLDSDIVASSFLKSDKNRIGGTYKKTIYKEYKDDSYTDEVAQPAWLGFLGPVLQAEVGDVILIHLKNFATRPYTIHPHGVFYEKDSEGSLYPDGSSGPLKADDSVPPGGSHIYNWTIPEGHAPTDADPACLTWIYHSHVDAPRDIATGLIGPLITCKRGALDGNSPPQRQDVDHDFFLLFSVVDENLSWHLNENIATYCSDPASVDKEDETFQESNRMHAINGFVFGNLPELNMCAQKRVAWHLFGMGNEIDVHTAFFHGQMLTTRGHHTDVANIFPATFVTAEMVPWEPGTWLISCQVNSHFRDGMQALYKVKSCSMAPPVDLLTGKVRQYFIEAHEIQWDYGPMGHDGSTGKNLREPGSISDKFFQKSSSRIGGTYWKVRYEAFQDETFQEKMHLEEDRHLGILGPVIRAEVGDTIQVVFYNRASQPFSMQPHGVFYEKDYEGTVYNDGTFEIYCQAGSHREAGMRAIYNVSQCPGHQATPRQRYQAARIYYIMAEEVEWDYCPDRSWEREWHNQSEKDSYGYIFLSNKDGLLGSRYKKAVFREYTDGTFRIPRPRTGPEEHLGILGPLIKGEVGDILTVVFKNNASRPYSVHAHGVLESTTVWPLAAEPGEVVTYQWNIPERSGPGPNDSACVSWIYYSAVDPIKDMYSGLVGPLAICQKGILEPHGGRSDMDREFALLFLIFDENKSWYLEENVATHGSQDPGSINLQDETFLESNKMHAINGKLYANLRGLTMYQGERVAWYMLAMGQDVDLHTIHFHAESFLYRNGENYRADVVDLFPGTFEVVEMVASNPGTWLMHCHVTDHVHAGMETLFTVFSRTEHLSPLTVITKETEKAVPPRDIEEGNVKMLGMQIPIKNVEMLASVLVAISVTLLLVVLALGGVVWYQHRQRKLRRNRRSILDDSFKLLSFKQ

SEQ ID NO: 100358 - DNA, 2910 bp, Artificial Sequence
  derived and/or modified sequence
atgtgggctatggagtcaggacacctcctgtgggcactcttgttcatgcagagtctatggcctcagctgaccgatggcgccacacgggtctattacttagggattcgggacgtgcaatggaactatgctcctaagggcagaaacgtgatcactaaccagccactcgatagtgacatagtggcctcctcattcctgaagtctgacaaaaaccgcatcggcggcacatataagaagaccatctacaaggaatacaaagatgacagttatacggacgaagtggcacagcccgcttggctcggtttcttgggaccagtgcttcaggctgaagtcggagacgtgatcttgattcacctcaagaacttcgcgactcgcccttacactattcatcctcatggcgtgttttacgaaaaagactctgagggctctctgtatccagacgggtcaagcgggcctctgaaggcagacgatagtgttccacctggggggtcccacatatacaattggactattccagaagggcatgccccaactgacgcggatcccgcttgtctgacctggatttaccactcacacgtagacgcccccagagacattgctactggcctcataggtcccctgataacatgcaagagaggggccctcgatggtaacagccctcctcagcggcaggacgtcgaccatgactttttcttgttattttctgtcgtggatgagaatctcagctggcatctgaatgagaacatcgcaacgtattgtagcgacccagcaagtgtggataaagaggacgaaacattccaggagagtaaccggatgcacgcaatcaacggcttcgtttttggtaacctgcctgagctgaatatgtgtgcccagaagagggtcgcctggcacctcttcgggatggggaatgagatcgacgtccacactgcctttttccatggacagatgctcactactcgaggacatcacaccgatgtggctaacatttttcccgctaccttcgtcacagccgagatggtaccctgggaaccggggacatggctaatttcctgccaggtcaacagccacttccgcgacggcatgcaggccctatacaaagtgaaatcctgctctatggctcccccagtcgacctgctgacagggaaggtgcgccaatatttcatcgaggcccatgagatacagtgggactacggtcctatgggacacgatgggtctacagggaagaacctgagagaaccggggagtattagcgacaagtttttccagaaatccagctccagaattggcgggacctactggaaggtacgctacgaagccttccaggatgagacatttcaggagaagatgcatctggaggaggataggcaccttgggatcttaggacccgtgatccgggcggaggtgggagacaccatccaggtagtgttttataatcgcgcttcacagcccttcagcatgcagcctcatggggtcttttacgagaaggactacgagggcacagtatataacgatggcacttttgaaatatattgccaggctggatcccatcgggaagcaggtatgcgtgccatctacaatgtaagccagtgtcctggccaccaggccacgccgaggcaacggtatcaggctgcacgtatctattatattatggcagaggaggtggaatgggactactgtcctgacagatcttgggagcgagaatggcacaaccagagcgagaaggactcatatggctatattttcttgtctaacaaagatggactgctcggttccagatacaagaaggctgtgtttagggaatacaccgacggtacattccgaattccgaggccgagaaccggtccggaggagcacctggggatcctgggcccactgattaagggtgaggtgggcgatatattgaccgtggtatttaaaaataacgcgtctcgaccttattccgtgcacgcacatggggtgcttgaatcgaccaccgtttggccgctcgcagcggagcccggcgaggtcgtcacctaccaatggaatattcctgaaagatcagggcccggccctaatgacagtgcatgtgtctcttggatctactactctgccgtggatccgatcaaagacatgtattccggacttgttggtcccctagcaatatgccaaaaagggatcctagagccccatggagggcggagcgacatggaccgagaattcgccctattattcttaatcttcgatgagaataaatcctggtacttggaggaaaacgttgctacccatgggtctcaggaccccggctccatcaacctgcaggatgagacctttctggaaagcaataaaatgcacgctattaacggcaagctctacgctaatctccgaggcctaactatgtaccagggcgagcgcgtcgcttggtacatgctggcaatggggcaggatgtagacctccatacaattcatttccatgctgagtctttcctgtatcggaatggagagaactatagagccgacgttgtggatctatttcccggcacgtttgaggtagttgagatggtagcgtcaaatccaggaacttggctcatgcattgtcacgttacggaccacgtacatgccgggatggaaactttgttcacagtgttcagccgaaccgagcatttgtcgcccctcacggtcattactaaagagacagagaaagctgtccctccgcgggatatcgaggaaggtaacgttaaaatgctcgggatgcagattcctattaaaaacgtggagatgctcgcttctgtgctcgtggccatatcagtcaccctccttctggtggtattggccctgggcggggtggtttggtatcagcacagacagcggaagctcagacggaacagaagaagtatcttagatgactcctttaagctactgtcgttcaaacagtag

SEQ ID NO: 100359 - DNA, 627 bp, Artificial Sequence
  derived and/or modified sequence
atggagtctggccacctcttatgggcactgctgttcatgcagtccctgtggcctcagctcacggatggtgccactcgcgtctattatctcggtatcagggatgttcagtggaactatgcccctaaagggcgcaatgttatcactaatcaaccactggattccgacatagtagccagcagctttctcaaatccgataaaaaccggattgggggaacctacaaaaaaactatctacaaggaatacaaggacgactcgtatacagacgaggtggcgcagcccgcttggttaggcttcctgggccctgtcctgcaagccgaggtaggggacgtcatcctgatacacttaaagaacttcgctacacggccctatacgatccacccacacggcgttttttacgagaaagattcagagggcagcctgtatcccgatggctcttcaggccccctcaaggctgatgatagtgtgccaccgggcgggtctcacatatacaactggacaattcctgagggtcacgccccaacagatgccgatcctgcttgtcttacctggatctatcattcccacgtggatgctccaagggacatcgctacgggcttgattggacctctgataacctgtaagcggtag

SEQ ID NO: 100360 - DNA, 3694 bp, Artificial Sequence
  derived and/or modified sequence
gtaaccaagatactgactgaacatggctggcggactcaggctggggtctgcagtgcagcattaatgggccgctgacatgaatatggagtagttttctctagcaaagagtaatgtgggccatggagtcaggccacctcctctgggctctgctgttcatgcagtccttgtggcctcaactgactgatggagccactcgagtctactacctgggcatccgggatgtgcagtggaactatgctcccaagggaagaaatgtcatcacgaaccagcctctggacagtgacatagtggcttccagcttcttaaagtctgacaagaaccggatagggggaacctacaagaagaccatctataaagaatacaaggatgactcatacacagatgaagtggcccagcctgcctggttgggcttcctggggccagtgttgcaggctgaagtgggggatgtcattcttattcacctgaagaattttgccactcgtccctataccatccaccctcatggtgtcttctacgagaaggactctgaaggttccctatacccagatggctcctctgggccactgaaagctgatgactctgttcccccggggggcagccatatctacaactggaccattccagaaggccatgcacccaccgatgctgacccagcgtgcctcacctggatctaccattctcatgtagatgctccacgagacattgcaactggcctaattgggcctctcatcacctgtaaaagaggagccctggatgggaactcccctcctcaacgccaggatgtagaccatgatttcttcctcctcttcagtgtggtagatgagaacctcagctggcatctcaatgagaacattgccacttactgctcagatcctgcttcagtggacaaagaagatgagacatttcaggagagcaataggatgcatgcaatcaatggctttgtttttgggaatttacctgagctgaacatgtgtgcacagaaacgtgtggcctggcacttgtttggcatgggcaatgaaattgatgtccacacagcatttttccatggacagatgctgactacccgtggacaccacactgatgtggctaacatctttccagccacctttgtgactgctgagatggtgccctgggaacctggtacctggttaattagctgccaagtgaacagtcactttcgagatggcatgcaggcactctacaaggtcaagtcttgctccatggcccctcctgtggacctgctcacaggcaaagttcgacagtacttcattgaggcccatgagattcaatgggactatggcccgatggggcatgatgggagtactgggaagaatttgagagagccaggcagtatctcagataagtttttccagaagagctccagccgaattgggggcacttactggaaagtgcgatatgaagcctttcaagatgagacattccaagagaagatgcatttggaggaagataggcatcttggaatcctggggccagtgatccgggctgaggtgggtgacaccattcaggtggtcttctacaaccgtgcctcccagccattcagcatgcagccccatggggtcttttatgagaaagactatgaaggcactgtgtacaatgatgggacatttgagatttattgccaggcaggcagccatcgagaagcagggatgagggcaatctataatgtctcccagtgtcctggccaccaagccacccctcgccaacgctaccaagctgcaagaatctactatatcatggcagaagaagtagagtgggactattgccctgaccggagctgggaacgggaatggcacaaccagtctgagaaggacagttatggttacattttcctgagcaacaaggatgggctcctgggttccagatacaagaaagctgtattcagggaatacactgatggtacattcaggatccctcggccaaggactggaccagaagaacacttgggaatcttgggtccacttatcaaaggtgaagttggtgatatcctgactgtggtattcaagaataatgccagccgcccctactctgtgcatgctcatggagtgctagaatctactactgtctggccactggctgctgagcctggtgaggtggtcacttatcagtggaacatcccagagaggtctggccctgggcccaatgactctgcttgtgtttcctggatctattattctgcagtggatcccatcaaggacatgtatagtggcctggtggggcccttggctatctgccaaaagggcatcctggagccccatggaggacggagtgacatggatcgggaatttgcattgttgttcttgatttttgatgaaaataagtcttggtatttggaggaaaatgtggcaacccatgggtcccaggatccaggcagtattaacctacaggatgaaactttcttggagagcaataaaatgcatgcaatcaatgggaaactctatgccaaccttaggggtcttaccatgtaccaaggagaacgagtggcctggtacatgctggccatgggccaagatgtggatctacacaccatccactttcatgcagagagcttcctctatcggaatggcgagaactaccgggcagatgtggtggatctgttcccagggacttttgaggttgtggagatggtggccagcaaccctgggacatggctgatgcactgccatgtgactgaccatgtccatgctggcatggagaccctcttcactgttttttctcgaacagaacacttaagccctctcaccgtcatcaccaaagagactgaaaaagcagtgccccccagagacattgaagaaggcaatgtgaagatgctgggcatgcagatccccataaagaatgttgagatgctggcctctgttttggttgccattagtgtcacccttctgctcgttgttctggctcttggtggagtggtttggtaccaacatcgacagagaaagctacgacgcaataggaggtccatcctggatgacagcttcaagcttctgtctttcaaacagtaacatctggagcctggagatatcctcaggaagcacatctgtagtgcactcccagcaggccatggactagtcactaaccccacactcaaaggggcatgggtggtggagaagcagaaggagcaatcaagcttatctggatatttctttctttatttattttacatggaaataatatgatttcactttttctttagtttctttgctctacgtgggcacctggcactaagggagtaccttattatcctacatcgcaaatttcaacagctacattatatttccttctgacacttggaaggtattgaaatttctagaaatgtatccttctcacaaagtagagaccaagagaaaaactcattgattgggtttctacttctttcaaggactcaggaaatttcactttgaactgaggccaagtgagctgttaagataacccacacttaaactaaaggctaagaatataggcttgatgggaaattgaaggtaggctgagtattgggaatccaaattgaattttgattctccttggcagtgaactactttgaagaagtggtcaatgggttgttgctgccatgagcatgtacaacctctggagctagaagctcctcaggaaagccagttctccaagttcttaacctgtggcactgaaaggaatgttgagttacctcttcatgttttag

SEQ ID NO: 100361 - DNA, 838 bp, Artificial Sequence
  derived and/or modified sequence
aaagagggcacccagcccttccccctccctcatcctcccatcccagtaaaccctgccaaattggaatcctggacttaatttaggagaaaggccctgtaaccaagatactgactgaacatggctggcggactcaggctggggtctgcagtgcagcattaatgggccgctgacatgaatatggagtagttttctctagcaaagagtaatgtgggccatggagtcaggccacctcctctgggctctgctgttcatgcagtccttgtggcctcaactgactgatggagccactcgagtctactacctgggcatccgggatgtgcagtggaactatgctcccaagggaagaaatgtcatcacgaaccagcctctggacagtgacatagtggcttccagcttcttaaagtctgacaagaaccggatagggggaacctacaagaagaccatctataaagaatacaaggatgactcatacacagatgaagtggcccagcctgcctggttgggcttcctggggccagtgttgcaggctgaagtgggggatgtcattcttattcacctgaagaattttgccactcgtccctataccatccaccctcatggtgtcttctacgagaaggactctgaaggttccctatacccagatggctcctctgggccactgaaagctgatgactctgttcccccggggggcagccatatctacaactggaccattccagaaggccatgcacccaccgatgctgacccagcgtgcctcacctggatctaccattctcatgtagatgctccacgagacattgcaactggcctaattgggcctctcatcacctgtaaaaga

SEQ ID NO: 100362 - DNA, 2910 bp, Artificial Sequence
  derived and/or modified sequence
atgtgggccatggagagcggccacctgctgtgggccctgctcttcatgcagagcctgtggccccagctgacagatggagccaccagggtgtactacctgggcatcagagatgtgcagtggaactatgcccccaagggcagaaatgtcatcaccaaccagcccctggacagcgacatcgtggccagcagcttcctgaagagtgacaagaaccgcatcggcggcacctacaagaagaccatctacaaggagtacaaggatgacagctacacagatgaggtggcccagcctgcctggctgggcttcctgggccctgtgctgcaggccgaggtgggagatgtgatcctgatccacctgaagaactttgccacccggccctacaccatccacccccatggagtcttctatgagaaggacagcgagggcagcctgtacccagatggcagcagcggccccctgaaggcagatgattctgtgcccccaggcggcagccacatctacaactggaccatccctgagggccacgcccccacagatgctgaccctgcctgcctgacctggatctaccacagccacgtggatgccccccgggacatcgccaccggcctgattggccccctcatcacctgcaagagaggagccctggatggcaacagccccccccagaggcaggatgtggaccatgacttcttcctgctcttctctgtggtggatgagaacctgtcctggcacctgaatgaaaacatcgccacctactgcagcgaccctgcctctgtggacaaggaggatgagaccttccaggagagcaacaggatgcacgccatcaatggatttgtgtttggaaacctgcctgagctgaacatgtgtgcccagaagagggtggcctggcacctgtttggcatgggaaatgaaattgatgtgcacacagccttcttccacggccagatgctgaccacccggggccaccacacagatgtggccaacatcttccctgccacctttgtgacagctgagatggtgccctgggagcccggcacctggctgatcagctgccaggtgaacagccacttcagagatggcatgcaggccctgtacaaggtgaagagctgcagcatggcccctcctgtggacctgctgaccgggaaggtgcggcagtacttcatcgaggcccacgagatccagtgggactatggccccatgggccatgatggcagcacaggcaagaacctgcgggagcccggcagcatcagtgacaagttcttccagaagagcagcagcagaattggaggcacctactggaaggtgcgctatgaggccttccaggatgagaccttccaggagaagatgcacctggaggaggacagacacctgggcatcctgggccctgtgatccgggcagaggtgggggacaccatccaggtggtgttctacaacagagccagccagcccttctccatgcagccccacggcgtcttctatgagaaggactatgagggcaccgtgtacaatgatggcacctttgagatctactgccaggccggcagccaccgggaggccggcatgagggccatctacaacgtgtcccagtgccccggccaccaggccaccccccggcagcgctaccaggccgcccgcatctactacatcatggccgaggaggtggagtgggactactgcccagaccgctcctgggagcgggagtggcacaaccagagcgagaaggacagctatggctacatcttcctgagcaacaaggatggcctgctgggcagccgctacaagaaggctgtgttccgggagtacacagatggcaccttccgcatcccccggcccaggacaggccctgaggagcacctgggcatcctgggccccctcatcaagggggaggtgggggacatcctgactgtggtgttcaagaacaatgccagccggccctacagcgtgcacgcccacggcgtgctggagagcaccaccgtgtggcccctggccgctgagcctggagaggtggtgacctaccagtggaacatccctgagaggagcggccctggccccaatgacagcgcctgtgtgtcctggatctactacagcgctgtggaccccatcaaggacatgtacagcggcctggtgggccccctggccatctgccagaagggcatcctggagccccacggcggccgcagtgacatggaccgggagtttgccctgctcttcctgatctttgatgagaacaagtcctggtacctggaggagaatgtggccacccacggcagccaggaccccggcagcatcaacctgcaggatgagaccttcctggagagcaacaagatgcacgccatcaatggcaagctgtatgccaacctgcggggcctgaccatgtaccagggcgagcgggtggcctggtacatgctggccatgggccaggatgtggacctgcacaccatccacttccacgccgagagcttcctgtacagaaatggagagaactacagagcagatgtggtggacctcttccctggcacctttgaggtggtggagatggtggccagcaaccctggcacctggctgatgcactgccacgtgacagaccacgtgcatgctggcatggagaccctcttcaccgtcttcagcaggacagagcacctgagccccctgaccgtcatcaccaaggagacagagaaggctgtgcccccccgggacatcgaggagggcaatgtgaagatgctgggcatgcagatccccatcaagaatgtggagatgctggcctctgtgctggtggccatctctgtgaccctgctgctggtggtgctggccctgggcggcgtggtgtggtaccagcaccggcagaggaagctgcggaggaacagaagaagcatcctggatgacagcttcaagctgctgtccttcaagcagtag

SEQ ID NO: 100363 - DNA, 627 bp, Artificial Sequence
  derived and/or modified sequence
atggagagcggccacctgctgtgggccctgctcttcatgcagagcctgtggccccagctgacagatggagccaccagggtgtactacctgggcatcagagatgtgcagtggaactatgcccccaagggcagaaatgtcatcaccaaccagcccctggacagcgacatcgtggccagcagcttcctgaagagtgacaagaacagaattggaggcacctacaagaagaccatctacaaggagtacaaggatgacagctacacagatgaggtggcccagcctgcctggctgggcttcctgggccctgtgctgcaggccgaggtgggagatgtgatcctgatccacctgaagaactttgccacccggccctacaccatccacccccacggcgtcttctatgagaaggacagcgagggcagcctgtacccagatggcagcagcggccccctgaaggcagatgacagcgtgcccccaggcggcagccacatctacaactggaccatccctgagggccacgcccccacagatgctgaccctgcctgcctgacctggatctaccacagccacgtggatgccccccgggacatcgccaccggcctcatcggccccctcatcacctgcaagaggtag

SEQ ID NO: 100364 - DNA, 2910 bp, Artificial Sequence
  derived and/or modified sequence
atgtgggccatggagagcggccacctgctgtgggccctgctgttcatgcagtctctgtggcctcaattgacggacggtgcaaccagagtctactatctggggataagggatgtgcagtggaactatgcaccaaaggggcgcaacgttattactaaccagcccttggattctgatatagtggcctcgtcattcctgaagtctgacaaaaaccgcattggaggaacctacaaaaagacgatttacaaagaatataaagatgactcctataccgacgaagtggcccagcccgcatggctgggtttcttgggccccgtgctacaggcagaggtgggagatgtgattctgattcacctaaagaatttcgcgactagaccgtacacgatccatcctcacggggtattctatgagaaagacagcgagggatccctttacccggatggctctagtgggccacttaaggccgatgactccgtgcctccgggtgggtcacacatttacaattggactataccggaaggtcacgcacctacggatgcggatcccgcttgcctaacctggatttaccacagccacgtagatgcccctcgcgacatcgctacaggcctgatagggccgctcatcacctgcaaacggggagctctcgatggaaactcccccccacaacgtcaggacgtcgatcacgatttctttctgttgttcagcgtggtcgatgaaaatctgtcctggcacttaaacgagaacatcgctacatattgttcggatcctgcgagcgtggacaaggaggacgagacatttcaggaatcaaatcgtatgcacgccatcaatggattcgtcttcgggaatctgccagagttgaacatgtgcgcccaaaaaagggtggcttggcacctttttggcatgggaaatgaaatagatgtccataccgcattttttcatggccagatgctgacaaccaggggtcaccatacggatgtagccaatatttttccggccacctttgtaacggcagaaatggtgccctgggagccggggacatggctgatcagctgccaggtgaattctcattttagggatggcatgcaggccctgtataaagttaagagctgctcaatggcacctcccgtagatctcctgacaggaaaagtgaggcaatatttcatcgaggcacacgagatccagtgggattacggcccaatgggtcacgacggtagcacaggaaagaaccttcgcgaacccggtagtataagcgataaattttttcagaagagctcctcaaggatcggggggacctattggaaggtgagatacgaagccttccaggacgagaccttccaggagaagatgcacctcgaggaagacagacacctgggcattctgggacctgtcattcgggcagaagtgggggacacaatacaagtggtgttttacaatagggcctcgcaaccattcagtatgcagccacacggggtcttctacgaaaaggattatgaagggacagtgtataacgacggcacattcgaaatctactgtcaagccggttcacaccgtgaagcaggaatgcgggccatttataacgtctcccagtgccctgggcatcaggcaaccccccgccagcggtatcaggctgcccgcatttactacataatggccgaggaggtcgagtgggattactgccccgaccgatcatgggaaagggaatggcacaatcagtctgagaaagactcatacgggtatatctttctctccaataaggacggcctcctggggtccagatataagaaagccgtcttcagggaatacacagatggcaccttcaggatcccacgcccccgtacagggccagaggagcacctcggaatcttggggcctttgattaagggggaggttggcgacattctaaccgtagtcttcaagaataatgcctcacggccctatagcgtgcatgcccatggggtgctggagtctacaacagtctggcctctggcggcagagcccggggaggtggtcacatatcagtggaacatccccgaacgctctggacccggacctaacgactctgcctgcgttagttggatttattattcggccgtggacccaattaaggacatgtactcgggcctggtaggcccacttgcgatctgccagaagggtatactggagccccatggcgggaggagcgacatggatcgcgaatttgcactcctgtttttaatatttgatgaaaataagtcctggtacctggaggagaacgtggcaacccatggctcccaagaccccggctccatcaacctgcaagacgaaactttcctagaatcaaataagatgcatgctattaacggaaaactgtacgctaacctgcgcgggctgactatgtatcaaggtgagagggtggcctggtatatgttggcgatgggccaggacgtggatctgcacaccatccatttccatgccgagtcattcctctacaggaatggcgagaactaccgagctgatgttgtggatctgttccctggcacattcgaggtcgttgagatggtggcctccaaccccggtacatggctcatgcattgtcatgttaccgaccatgtgcacgcaggcatggaaacactgttcaccgtgttcagtcgcaccgagcatctgtctccgctaactgtcatcacaaaggagaccgagaaggctgttcctcccagagacattgaggaaggcaacgtaaagatgctcgggatgcagatccctattaagaacgtcgagatgcttgcttctgtgttggtagctatatctgttacactgctgcttgtggttctcgctctcggcggtgttgtctggtatcagcatcgacagcgcaagcttcggaggaaccggcggtccatcctcgacgatagcttcaagctgctgtcctttaagcagtag

SEQ ID NO: 100365 - DNA, 627 bp, Artificial Sequence
  derived and/or modified sequence
atggagagcggccacctgctgtgggccctgctgttcatgcagagcctgtggccacaattgactgacggggcaacacgcgtatattatctgggaatccgggacgtgcaatggaactatgcaccaaagggaagaaatgtgattacgaatcagccactcgattcggacatcgtagcgtcaagttttctgaaatccgacaagaaccggataggaggaacatacaaaaagacaatctacaaggaatataaagacgacagttacactgacgaggtggcccagcccgcgtggctgggcttcttgggccccgtgcttcaggccgaagtgggcgacgtcatcctgatccatctgaagaactttgcaactagaccatatacgatccatccccacggtgtgttttatgagaaagactctgaaggatccttgtatcctgatggaagcagcggaccactgaaagctgatgactctgttccccccggaggcagccatatttacaactggactattcccgaagggcatgccccaacagacgcagacccagcctgcctgacatggatatatcacagccatgtggacgcccccagagatatcgccacagggcttataggtccacttattacgtgcaaacggtag

SEQ ID NO: 100366 - DNA, 2910 bp, Artificial Sequence
  derived and/or modified sequence
atgtgggcgatggagagtggacacctactgtgggcactgctgttcatgcagagtttatggccacagctgaccgatggggctacaagagtatattaccttggaattagggatgtacaatggaactacgcccctaaagggaggaacgtcataactaatcaaccactcgactcagacattgttgcatcgagtttcctgaaaagcgacaaaaatcggatcggtggaacatacaaaaaaacaatctacaaagaatataaggatgattcctacaccgatgaagttgcgcagcccgcttggctcggattcctcgggcctgtactgcaggccgaggttggcgacgttatcctgatccatctgaagaattttgctaccaggccgtacactattcatccacatggggtattctatgagaaagacagtgaaggaagcctgtaccccgatggatcttctggacccctcaaggcggatgatagcgtcccaccaggagggtcacacatctacaattggactattcctgagggacatgcccctaccgacgcagatcccgcttgtctcacctggatctaccacagtcacgtcgacgcgcctcgggacattgctacggggctcattggcccactgatcacctgtaaacgaggagcactagatggcaactccccgccacaacggcaagacgtagatcatgactttttcttgctgttctctgtcgtggacgagaacctttcttggcacctgaacgagaacatcgccacctattgcagcgatccagccagtgtagacaaggaagatgagacttttcaggagtccaacagaatgcatgccatcaacggatttgtcttcggtaacttaccggagttgaacatgtgcgcccagaaacgcgtagcatggcacctgtttggtatgggcaatgagattgatgtccatacagccttcttccatgggcagatgctgaccactaggggacatcacaccgacgtcgcaaacatatttcctgctacatttgttacagcagaaatggtcccctgggagcctgggacatggctgattagttgccaggtgaattctcactttagagacggcatgcaggcgttatacaaagtcaaatcatgtagtatggcccctcctgtagacctgttaacaggaaaagtgcgacagtacttcatcgaggcccacgaaattcagtgggactatggaccaatgggacacgacggcagcacaggcaagaatctccgggaaccgggttcgatatccgataagttttttcagaaaagttcttccaggattggcggaacatattggaaggtacgctacgaggcctttcaagatgaaacctttcaggagaagatgcacctcgaagaggataggcacctgggaatccttggcccagttatcagagcagaagtgggggacacaatccaggtagttttttataatcgcgcatctcagccattctctatgcagcctcacggcgtcttctacgaaaaagactatgaaggaactgtatacaatgacggaaccttcgagatttattgccaggctggcagtcaccgggaagccggaatgcgtgctatatataacgtgagtcaatgccccggtcatcaggcaacgccacggcagcgttaccaagcggctcgtatctattacatcatggctgaggaagtggagtgggactactgtcccgaccgaagttgggaacgagagtggcacaaccagtccgaaaaagatagttacgggtacatattcttgtccaacaaggatggcctccttgggtcccgatataagaaggctgtgttcagagagtataccgatggtacgtttaggattccacggcctcgtactggtcccgaggaacacctcgggatcctgggcccattgatcaaaggggaagtcggtgatatcctcacagtggtgttcaagaataatgcgtcccgcccttattcagtgcacgcccatggggtcctcgagtctacaactgtgtggcccctggccgctgaacctggcgaggtggtgacctaccagtggaatatccctgagaggagcggacccggacctaatgattctgcgtgtgtaagctggatttattactcagccgtggatccaattaaagacatgtactccggtctagttgggcctttggctatttgccagaaaggcattctagaaccacatgggggtaggtcagacatggaccgcgagtttgccctgctatttctaatcttcgatgagaataagagttggtacctggaggaaaacgtggccacacatggttctcaagatcccggaagcataaacttacaggatgagacatttctagaatccaacaagatgcacgctataaacggcaaactgtacgccaatcttcggggactcacaatgtatcaaggagagagggtagcttggtatatgcttgcaatgggacaagatgtggatctgcataccatccatttccacgcagagtccttcctctataggaacggcgagaattacagagccgatgtggtggatctgtttcctggcacatttgaagtggtggagatggttgcgtctaaccccggaacctggctcatgcattgccacgtaactgaccacgttcacgccggaatggaaaccctcttcacggtcttcagtagaactgagcacctcagcccccttaccgttataaccaaggaaaccgaaaaagcggtcccacctcgggatatcgaagaaggtaatgtgaaaatgctcgggatgcagattccaatcaaaaatgtcgagatgctggcctccgtgcttgtggctataagtgtgacccttcttctggtcgtgctggcattgggcggagtggtgtggtaccagcacagacagcggaagcttaggcgcaatcgacggagtattctggatgactcttttaagttactgagctttaaacagtag

SEQ ID NO: 100367 - DNA, 627 bp, Artificial Sequence
  derived and/or modified sequence
atggaatccgggcatctgctttgggccctgctgttcatgcagtcactatggcctcagcttacggatggtgcaaccagagtgtattacctggggatacgcgatgtgcaatggaactacgcacccaaaggcaggaatgtaattacaaatcaacctctggattctgatatagtggcatcttctttcctgaaatcggacaaaaaccgcatcggtggtacgtacaaaaaaaccatttacaaggagtacaaggatgattcttatacagatgaggttgcacagcctgcctggctcggttttctgggacctgtcctgcaggcagaggtgggcgatgtcatcttgattcacttgaagaactttgccactaggccctacaccatccaccctcacggagtattttacgagaaagattctgagggctccctgtatccggatggttccagcggacctctcaaggccgacgactcagtcccacctggtggcagccacatctataactggaccatccctgaaggccatgccccaactgatgcagatcccgcatgcctcacctggatctaccactcacacgtggacgcgccacgagatatagccaccggactaatcgggccactgatcacatgcaagcgctag

SEQ ID NO: 100368 - DNA, 2910 bp, Artificial Sequence
  derived and/or modified sequence
atgtgggccatggagagcggccacctgctgtgggccctgctgttcatgcagagcctgtggccccagctgaccgacggcgccaccagagtgtactacctgggcatcagagacgtgcagtggaactacgcccccaagggcagaaacgtgatcaccaaccagcccctggacagcgacatcgtggccagcagcttcctgaagagcgacaagaacagaatcggcggcacctacaagaagaccatctacaaggagtacaaggacgacagctacaccgacgaggtggcccagcccgcctggctgggcttcctgggccccgtgctgcaggccgaggtgggcgacgtgatcctgatccacctgaagaacttcgccaccagaccctacaccatccacccccacggcgtgttctacgagaaggacagcgagggcagcctgtaccccgacggcagcagcggccccctgaaggccgacgacagcgtgccccccggcggcagccacatctacaactggaccatccccgagggccacgcccccaccgacgccgaccccgcctgcctgacctggatctaccacagccacgtggacgcccccagagacatcgccaccggcctgatcggccccctgatcacctgcaagagaggcgccctggacggcaacagccccccccagagacaggacgtggaccacgacttcttcctgctgttcagcgtggtggacgagaacctgagctggcacctgaacgagaacatcgccacctactgcagcgaccccgccagcgtggacaaggaggacgagaccttccaggagagcaacagaatgcacgccatcaacggcttcgtgttcggcaacctgcccgagctgaacatgtgcgcccagaagagagtggcctggcacctgttcggcatgggcaacgagatcgacgtgcacaccgccttcttccacggccagatgctgaccaccagaggccaccacaccgacgtggccaacatcttccccgccaccttcgtgaccgccgagatggtgccctgggagcccggcacctggctgatcagctgccaggtgaacagccacttcagagacggcatgcaggccctgtacaaggtgaagagctgcagcatggccccccccgtggacctgctgaccggcaaggtgagacagtacttcatcgaggcccacgagatccagtgggactacggccccatgggccacgacggcagcaccggcaagaacctgagagagcccggcagcatcagcgacaagttcttccagaagagcagcagcagaatcggcggcacctactggaaggtgagatacgaggccttccaggacgagaccttccaggagaagatgcacctggaggaggacagacacctgggcatcctgggccccgtgatcagagccgaggtgggcgacaccatccaggtggtgttctacaacagagccagccagcccttcagcatgcagccccacggcgtgttctacgagaaggactacgagggcaccgtgtacaacgacggcaccttcgagatctactgccaggccggcagccacagagaggccggcatgagagccatctacaacgtgagccagtgccccggccaccaggccacccccagacagagataccaggccgccagaatctactacatcatggccgaggaggtggagtgggactactgccccgacagaagctgggagagagagtggcacaaccagagcgagaaggacagctacggctacatcttcctgagcaacaaggacggcctgctgggcagcagatacaagaaggccgtgttcagagagtacaccgacggcaccttcagaatccccagacccagaaccggccccgaggagcacctgggcatcctgggccccctgatcaagggcgaggtgggcgacatcctgaccgtggtgttcaagaacaacgccagcagaccctacagcgtgcacgcccacggcgtgctggagagcaccaccgtgtggcccctggccgccgagcccggcgaggtggtgacctaccagtggaacatccccgagagaagcggccccggccccaacgacagcgcctgcgtgagctggatctactacagcgccgtggaccccatcaaggacatgtacagcggcctggtgggccccctggccatctgccagaagggcatcctggagccccacggcggcagaagcgacatggacagagagttcgccctgctgttcctgatcttcgacgagaacaagagctggtacctggaggagaacgtggccacccacggcagccaggaccccggcagcatcaacctgcaggacgagaccttcctggagagcaacaagatgcacgccatcaacggcaagctgtacgccaacctgagaggcctgaccatgtaccagggcgagagagtggcctggtacatgctggccatgggccaggacgtggacctgcacaccatccacttccacgccgagagcttcctgtacagaaacggcgagaactacagagccgacgtggtggacctgttccccggcaccttcgaggtggtggagatggtggccagcaaccccggcacctggctgatgcactgccacgtgaccgaccacgtgcacgccggcatggagaccctgttcaccgtgttcagcagaaccgagcacctgagccccctgaccgtgatcaccaaggagaccgagaaggccgtgccccccagagacatcgaggagggcaacgtgaagatgctgggcatgcagatccccatcaagaacgtggagatgctggccagcgtgctggtggccatcagcgtgaccctgctgctggtggtgctggccctgggcggcgtggtgtggtaccagcacagacagagaaagctgagaagaaacagaagaagcatcctggacgacagcttcaagctgctgagcttcaagcagtag

SEQ ID NO: 100369 - DNA, 627 bp, Artificial Sequence
  derived and/or modified sequence
atggagagcggccacctgctgtgggccctgctgttcatgcagagcctgtggccccagctgaccgacggcgccaccagagtgtactacctgggcatcagagacgtgcagtggaactacgcccccaagggcagaaacgtgatcaccaaccagcccctggacagcgacatcgtggccagcagcttcctgaagagcgacaagaacagaatcggcggcacctacaagaagaccatctacaaggagtacaaggacgacagctacaccgacgaggtggcccagcccgcctggctgggcttcctgggccccgtgctgcaggccgaggtgggcgacgtgatcctgatccacctgaagaacttcgccaccagaccctacaccatccacccccacggcgtgttctacgagaaggacagcgagggcagcctgtaccccgacggcagcagcggccccctgaaggccgacgacagcgtgccccccggcggcagccacatctacaactggaccatccccgagggccacgcccccaccgacgccgaccccgcctgcctgacctggatctaccacagccacgtggacgcccccagagacatcgccaccggcctgatcggccccctgatcacctgcaagagatag

SEQ ID NO: 100370 - protein, 816 aa, Artificial Sequence
  derived and/or modified sequence
MSRPQGLLWLPLLFTPVCVMLNSNVLLWLTALAIKFTLIDSQAQYPVVNTNYGKIRGLRTPLPNEILGPVEQYLGVPYASPPTGERRFQPPEPPSSWTGIRNTTQFAAVCPQHLDERSLLHDMLPIWFTANLDTLMTYVQDQNEDCLYLNIYVPTEDDIHDQNSKKPVMVYIHGGSYMEGTGNMIDGSILASYGNVIVITINYRLGILGFLSTGDQAAKGNYGLLDQIQALRWIEENVGAFGGDPKRVTIFGSGAGASCVSLLTLSHYSEGLFQKAIIQSGTALSSWAVNYQPAKYTRILADKVGCNMLDTTDMVECLRNKNYKELIQQTITPATYHIAFGPVIDGDVIPDDPQILMEQGEFLNYDIMLGVNQGEGLKFVDGIVDNEDGVTPNDFDFSVSNFVDNLYGYPEGKDTLRETIKFMYTDWADKENPETRRKTLVALFTDHQWVAPAVATADLHAQYGSPTYFYAFYHHCQSEMKPSWADSAHGDEVPYVFGIPMIGPTELFSCNFSKNDVMLSAVVMTYWTNFAKTGDPNQPVPQDTKFIHTKPNRFEEVAWSKYNPKDQLYLHIGLKPRVRDHYRATKVAFWLELVPHLHNLNEIFQYVSTTTKVPPPDMTSFPYGTRRSPAKIWPTTKRPAITPANNPKHSKDPHKTGPEDTTVLIETKRDYSTELSVTIAVGASLLFLNILAFAALYYKKDKRRHETHRRPSPQRNTTNDIAHIQNEEIMSLQMKQLEHDHECESLQAHDTLRLTCPPDYTLTLRRSPDDIPLMTPNTITMIPNTLTGMQPLHTFNTFSGGQNSTNLPHGHSTTRV

SEQ ID NO: 100371 - DNA, 2451 bp, Artificial Sequence
  derived and/or modified sequence
atgagcagaccccagggcctgctgtggctgcccctgctgttcacccccgtgtgcgtgatgctgaacagcaacgtgctgctgtggctgaccgccctggccatcaagttcaccctgatcgacagccaggcccagtaccccgtggtgaacaccaactacggcaagatcagaggcctgagaacccccctgcccaacgagatcctgggccccgtggagcagtacctgggcgtgccctacgccagcccccccaccggcgagagaagattccagccccccgagccccccagcagctggaccggcatcagaaacaccacccagttcgccgccgtgtgcccccagcacctggacgagagaagcctgctgcacgacatgctgcccatctggttcaccgccaacctggacaccctgatgacctacgtgcaggaccagaacgaggactgcctgtacctgaacatctacgtgcccaccgaggacgacatccacgaccagaacagcaagaagcccgtgatggtgtacatccacggcggcagctacatggagggcaccggcaacatgatcgacggcagcatcctggccagctacggcaacgtgatcgtgatcaccatcaactacagactgggcatcctgggcttcctgagcaccggcgaccaggccgccaagggcaactacggcctgctggaccagatccaggccctgagatggatcgaggagaacgtgggcgccttcggcggcgaccccaagagagtgaccatcttcggcagcggcgccggcgccagctgcgtgagcctgctgaccctgagccactacagcgagggcctgttccagaaggccatcatccagagcggcaccgccctgagcagctgggccgtgaactaccagcccgccaagtacaccagaatcctggccgacaaggtgggctgcaacatgctggacaccaccgacatggtggagtgcctgagaaacaagaactacaaggagctgatccagcagaccatcacccccgccacctaccacatcgccttcggccccgtgatcgacggcgacgtgatccccgacgacccccagatcctgatggagcagggcgagttcctgaactacgacatcatgctgggcgtgaaccagggcgagggcctgaagttcgtggacggcatcgtggacaacgaggacggcgtgacccccaacgacttcgacttcagcgtgagcaacttcgtggacaacctgtacggctaccccgagggcaaggacaccctgagagagaccatcaagttcatgtacaccgactgggccgacaaggagaaccccgagaccagaagaaagaccctggtggccctgttcaccgaccaccagtgggtggcccccgccgtggccaccgccgacctgcacgcccagtacggcagccccacctacttctacgccttctaccaccactgccagagcgagatgaagcccagctgggccgacagcgcccacggcgacgaggtgccctacgtgttcggcatccccatgatcggccccaccgagctgttcagctgcaacttcagcaagaacgacgtgatgctgagcgccgtggtgatgacctactggaccaacttcgccaagaccggcgaccccaaccagcccgtgccccaggacaccaagttcatccacaccaagcccaacagattcgaggaggtggcctggagcaagtacaaccccaaggaccagctgtacctgcacatcggcctgaagcccagagtgagagaccactacagagccaccaaggtggccttctggctggagctggtgccccacctgcacaacctgaacgagatcttccagtacgtgagcaccaccaccaaggtgcccccccccgacatgaccagcttcccctacggcaccagaagaagccccgccaagatctggcccaccaccaagagacccgccatcacccccgccaacaaccccaagcacagcaaggacccccacaagaccggccccgaggacaccaccgtgctgatcgagaccaagagagactacagcaccgagctgagcgtgaccatcgccgtgggcgccagcctgctgttcctgaacatcctggccttcgccgccctgtactacaagaaggacaagagaagacacgagacccacagaagacccagcccccagagaaacaccaccaacgacatcgcccacatccagaacgaggagatcatgagcctgcagatgaagcagctggagcacgaccacgagtgcgagagcctgcaggcccacgacaccctgagactgacctgcccccccgactacaccctgaccctgagaagaagccccgacgacatccccctgatgacccccaacaccatcaccatgatccccaacaccctgaccggcatgcagcccctgcacaccttcaacaccttcagcggcggccagaacagcaccaacctgccccacggccacagcaccaccagagtgtag

SEQ ID NO: 100372 - DNA, 2451 bp, Artificial Sequence
  derived and/or modified sequence
atgtcacgacctcagggtctgctgtggctccctctgctatttacccctgtgtgtgtaatgcttaactcaaacgttctattatggcttacggcactcgccatcaagtttaccctgatcgattctcaggctcaatatcccgtggtcaacaccaactacgggaaaatcagaggtctcaggacgcccctaccaaatgaaattctgggacctgtggagcagtacttgggagtgccttatgcttctccaccaaccggcgaaaggcgatttcagcccccagagcccccttccagctggaccggaattaggaacactacacagttcgccgcggtgtgtccgcagcacctagacgaacggtctctgctgcacgacatgctgcctatctggtttacggccaatctagacaccttgatgacatatgtgcaggaccagaatgaagactgcttatatctgaatatttacgtacccaccgaagacgatatccacgaccagaactctaagaagccagtcatggtgtacattcatgggggatcctacatggaggggacgggcaacatgattgatgggtcaattctggcatcttacggcaatgtcattgttataacaataaactaccggttaggcatactgggctttctgtccaccggagatcaggctgcaaaaggtaactatggcctgttggatcagatacaggccctacgatggattgaagagaacgtaggtgctttcgggggcgatcccaagcgcgtcactatttttggaagcggtgctggtgctagttgtgtatctctgctcaccctaagccattacagtgagggtctgttccaaaaggcaataatccagtcggggaccgccctgtcctcttgggctgtgaactaccaacccgccaagtacaccaggattctggctgacaaagttgggtgcaatatgctggacaccacagacatggtggaatgtctgcggaataaaaactacaaggaacttatccagcaaactattactcccgccacctatcacattgctttcggcccagtcatagatggcgacgttattccggatgaccctcagatactgatggagcagggagaattcctgaattatgatatcatgctgggtgttaatcagggcgaagggctgaagttcgtggacggcattgttgataatgaagatggagttacacccaatgacttcgacttctccgtcagtaactttgtcgataatctgtatggctaccccgaaggcaaggatacactgcgagagactatcaaatttatgtacactgattgggctgacaaagaaaacccagaaacccgccggaagacactcgtggctctgtttacagaccaccagtgggtcgctcctgcggttgcaactgcagatctgcatgcccagtacggttccccaacctatttttacgccttttaccatcactgccagtcggagatgaagccatcgtgggccgactctgcacacggcgacgaggttccgtacgtttttggtatccctatgatcggtccaaccgagttgttttcctgcaacttcagcaaaaatgatgtgatgcttagtgccgtggtcatgacttactggaccaatttcgcaaagacaggtgatccgaaccagccggtgccacaggatactaaatttatacatacaaagccaaatagattcgaggaggttgcttggtcaaagtataatcccaaggaccagctttatctgcacataggactgaagcctcgagttagagaccactaccgggcaactaaggtggctttttggctcgagctggtgccgcatctgcacaacctaaatgagattttccagtacgtgtccaccaccaccaaagtgcctcctcccgacatgacatcattcccgtatggaaccaggcgctcccccgccaaaatctggcccaccactaagcgccctgcgattactcccgccaacaaccctaaacattcaaaggaccctcacaagacaggcccagaagatacaaccgtgctgatagagacaaagcgtgactattccacagagctgagtgtgaccatcgccgtgggcgcctctctgctatttctgaatatcctagcctttgccgccctttactataaaaaggataaacgccggcatgaaacacatagacgtccttccccacaacgcaataccacaaacgatatcgcacacatccaaaacgaggagataatgagtctccaaatgaagcaactggagcacgatcacgagtgcgaatcgctgcaagcccatgacacgctccgcctcacatgtcctcctgactacaccttgactctgcgtagatcacctgacgatatacccctgatgacgcctaacactattactatgatacctaatacactgacagggatgcagccgctacacactttcaataccttctctggcggccaaaactcgacaaatctcccacacggacactccactacccgcgtctag

SEQ ID NO: 100373 - DNA, 2451 bp, Artificial Sequence
  derived and/or modified sequence
atgtcacgcccccagggtctgctctggcttcccttactgtttacacctgtatgtgtaatgctaaactccaacgtgctgctgtggcttaccgccctggcaattaaattcactctaattgatagccaggctcagtacccggtcgtgaacacaaattatggaaaaatacgcggattaagaacgcccctccccaacgagattttaggccccgttgaacaatatttgggcgtgccctacgcctcaccaccgactggcgagaggaggttccagccccctgagccgccctctagctggactggaattcggaatacaacgcagtttgccgcggtctgccctcagcacttagacgagaggtccctcttacacgacatgctccccatttggttcacagcaaacctggatactctgatgacatacgtgcaggatcaaaatgaagattgtctttatttgaatatttacgtgcctacagaggacgatattcacgaccagaatagcaagaaaccggttatggtttacatccatggaggttcctacatggagggtaccggaaacatgatcgatggatcaatcctggcgagctatggaaatgtgatagtcattaccataaactatcggctcggtatcctgggctttctgagcactggggatcaggctgctaaaggaaattacggcctgctggatcagatccaggccctcagatggattgaggagaacgtcggagcgttcggcggcgacccaaaaagggtgaccatattcggcagcggggccggcgcgtcctgtgtgagcctgctgaccctttcccactatagtgaagggttatttcagaaagccattatacagagcgggacagcgctttcgagctgggctgtcaactatcagcctgccaagtatacaaggattttggctgacaaagttggctgcaacatgctggacacaaccgacatggtggagtgtctgcgtaacaaaaattacaaggagctcatacaacaaacaattactccggctacttaccatatagcctttggtccggtcattgacggcgatgtgattcctgatgaccctcaaatattgatggagcaaggggaattcctgaactatgatatcatgcttggcgtgaaccagggggagggccttaaattcgtagacgggattgtggacaatgaggatggcgtgacgcctaacgactttgacttttccgttagcaacttcgtggacaatctatacggctaccctgaaggcaaggacacactgagggagaccataaagtttatgtacactgactgggccgataaagagaatcctgagaccagaagaaaaacacttgtcgcgctcttcaccgaccatcaatgggtcgctccagctgtagcaaccgcggacttgcacgcgcaatatgggagccctacctacttttacgcattctaccaccactgtcaaagtgagatgaaaccaagctgggctgactccgcccatggagatgaggtgccctacgtgttcggcatccctatgataggcccgaccgagctttttagttgcaacttcagcaaaaacgacgtaatgcttagcgccgtagtgatgacttactggactaactttgccaaaactggcgatcccaatcagcctgttcctcaggacaccaagtttattcacacaaagcccaataggttcgaggaagtggcctggagcaagtacaacccaaaggaccaactctacttgcatattgggctgaaacctagagttcgtgatcactaccgcgccactaaagtggccttctggctcgagttggtaccacatctccacaatttgaacgaaatctttcagtacgtaagtactacaactaaggtgcctccacctgatatgacttcttttccctatggaacaaggcgtagtccagccaaaatctggccaacgaccaagagacccgccattactcccgccaataatccaaaacactccaaggatccacacaaaaccgggccagaagatacaacagttctgatcgaaacaaagagggattactcaaccgaactgagcgttactatcgctgtgggggcctctctcctgtttctgaatatcctggcttttgccgccttgtattataagaaagacaaaaggcgccatgaaacacatcggcggccgagcccccaacgtaatactacaaatgacatcgctcatatacagaacgaagagattatgagcctccagatgaagcagttagagcatgaccacgagtgtgaatcattacaggcacatgatacactgcggttgacctgtcctccggattacacattgactctccgtcgtagtccagatgacattccccttatgacaccgaataccatcacaatgattcccaacaccctgacgggtatgcagcctctgcatactttcaataccttctccggcggtcagaatagcactaatctcccacacggacattctaccacacgtgtatag

SEQ ID NO: 100374 - DNA, 2451 bp, Artificial Sequence
  derived and/or modified sequence
atgtctaggccgcaagggctcctgtggctgcccttgctgttcacaccagtgtgcgtgatgttaaattccaacgtcctactgtggctcacagccctagctatcaaattcaccctaatcgatagccaggcccaatatcctgtggtgaacactaattacggcaagatccgcggactgcgaactcctctccctaatgagatcctggggcccgtcgagcaatacttgggcgttccctatgcttcaccacccacaggggagcgccggttccagccacctgagccccccagctcatggacaggtatacgcaatactacccagttcgccgccgtttgtccccaacacctcgatgagaggtcacttctgcatgacatgttacccatttggttcacagcaaacttagacaccctgatgacctacgtacaggatcagaacgaggactgtctgtacttaaatatctatgtgcctactgaggatgatatccatgaccagaattcaaaaaagccggtgatggtttacattcacgggggttcatacatggagggaaccgggaacatgatagacggttccattctggcctcttatgggaatgtgattgtgatcactatcaattaccggctggggatcctgggattcctttccacaggtgaccaagcagccaagggcaattacggacttctagaccagatccaggcactgcgctggattgaagagaacgtcggagctttcgggggggacccaaagcgtgtgacaattttcggaagcggggcgggagctagctgtgtgtctctcctgactctatctcattactccgaagggctgtttcagaaagcaatcatccagagcggtacagccctctcttcctgggccgtgaactaccagccagcaaaatacactcggattctggccgataaggtgggctgcaatatgctggacacgacagatatggtggaatgccttcggaataagaactataaagagcttatccagcagacaattacccccgcaacataccatattgcgttcgggcccgtcatcgacggggacgtgattcccgatgatcctcaaattttaatggagcagggcgaatttctaaattacgacatcatgctgggggtaaaccagggcgagggccttaagttcgttgacggtattgtggacaacgaggacggagtgacacctaatgattttgacttctcagtgtccaacttcgtggataatctttacggctatcccgaagggaaagacacgctaagggaaacaatcaaattcatgtatactgactgggcagataaggaaaatccagaaaccagaaggaagactttggtcgcactttttacggatcaccagtgggtagcgcctgccgtcgctaccgcggatctgcatgcccagtatgggtctcctacctacttctacgctttctaccaccactgtcagagcgagatgaagccgagttgggccgacagtgctcacggggacgaagtgccatatgtgtttggaattccgatgatcggccctaccgaactcttttcttgtaacttttcgaaaaatgacgttatgctcagcgccgtggtgatgacctactggaccaactttgctaagaccggggaccccaatcaaccagtcccccaggatactaaattcattcacaccaagcctaataggtttgaggaggtggcttggtcgaagtacaaccccaaggatcagctctatcttcatatcggactcaagcctagagtacgggaccattaccgtgctacaaaggtggctttctggttggagctcgtcccccacctccataatctgaacgagatttttcaatacgtctcaacaaccaccaaggtgccaccacctgatatgaccagcttcccatacgggaccagaagatctcccgcaaagatttggcccacgaccaaaaggcctgccataacgcctgccaataacccaaaacattccaaggatccgcataagacaggacccgaggacacaactgtgcttattgagaccaaaagggattattccaccgagctgtcagtgaccatcgcagtgggtgccagtctgctttttctgaatatcttagcgttcgctgcactgtactacaaaaaagataagaggaggcacgagacacacagaaggcccagcccccagagaaacacgaccaatgacatcgcacacattcagaacgaagagataatgtcactgcagatgaaacagttggaacatgaccacgaatgtgaatccctgcaggcccacgacactctgagactgacatgcccaccggattatacgctgacgctacgccgaagccccgatgatattccccttatgacccctaatactattacgatgataccaaatacgctgacagggatgcagcctttgcacacgttcaacaccttctctgggggccagaattccacaaaccttccccatggacattctactacaagagtgtag

SEQ ID NO: 100375 - DNA, 2451 bp, Artificial Sequence
  derived and/or modified sequence
atgtcccgtcctcaagggttattgtggctacctcttctcttcacacccgtgtgcgtgatgctcaatagtaatgtcctgctctggctgactgctctggctattaagttcactctcattgactctcaagcacagtaccccgtggttaatactaactatggaaaaattagaggcctcagaacccctttacctaacgagatactgggccccgtcgagcagtacctgggcgtcccctatgcaagtcctccgaccggagaaagacggtttcagccgccagaacctccatcatcttggacaggaatcagaaacacaacgcagtttgccgccgtttgccctcagcacctggatgagcgaagcctactgcacgatatgctgccaatttggtttacggcaaacctggatacgctgatgacctatgtccaggaccaaaatgaagactgcctgtatctaaatatctacgttccaacagaggacgatattcacgatcagaactctaaaaaacccgtgatggtgtacattcatgggggctcttacatggagggtactgggaacatgattgatggctccattttggcatcatatggaaatgtcatcgttatcactatcaactataggctaggcatcttgggttttcttagtactggcgatcaagccgctaagggcaattacggattgctggaccagattcaggctctccggtggattgaagagaacgttggcgcgtttggcggcgaccctaaacgcgttaccattttcggaagtggcgccggagcttcttgtgtctcactgctgacgctgtcgcattattcggaagggttgttccagaaggcaatcatccaaagcggaacagccctgtcaagctgggccgtcaattaccagcctgccaaatatactcggattctcgccgacaaggtgggctgcaatatgctcgacactacggacatggtcgagtgtttacgaaataagaattacaaggaactgatccagcagacaatcacacctgcgacctaccatattgccttcggacctgtgatcgacggagacgtaatccccgatgatccccagatccttatggagcagggagagttcctgaactacgatatcatgctgggggtcaaccaaggagagggccttaagtttgtagacggtatcgttgacaatgaagatggggttaccccaaatgactttgacttctccgtgagtaactttgtggacaacctgtacgggtatcctgagggcaaggataccttgcgggagaccattaaatttatgtatacagattgggccgacaaagaaaatcctgaaaccagacggaaaaccctcgtcgcattgttcacagaccaccaatgggtggctcctgcagtcgcaactgccgatctccatgcccagtatggaagcccgacatacttctacgctttttatcaccactgccagtccgaaatgaagccctcatgggccgactccgcccacggcgacgaggttccttacgtcttcggtatcccgatgattggcccaacggagctgttcagttgcaacttttcaaagaacgacgtgatgctgtccgccgttgtgatgacatattggactaacttcgctaagacaggagatcccaatcagccagtgccacaggacacaaagttcatccacaccaaaccaaataggtttgaggaagtcgcttggtccaaatataatccaaaagaccagctgtacttgcatatcggtctcaagcctcgcgtgcgagaccattaccgagccacgaaggtggccttctggctcgagctagtgccccaccttcataatctaaacgagatttttcaatacgttagcactactaccaaggttccaccaccggacatgaccagtttcccatatggaacacgcaggtcacctgcgaagatttggcccacaacaaagcggcctgccatcacccccgccaacaatccgaaacattccaaggatcctcacaaaaccggacctgaagacactactgtgcttatcgaaaccaaaagggactatagcaccgagctctccgtgacaatcgccgttggtgcgtctctactctttttaaacattctcgcttttgcggctctttattacaaaaaagacaagcggcggcacgaaacccatcggcgcccctcgcctcaacgcaacaccaccaatgacatagcacatatccagaatgaagagataatgtcactccagatgaagcagctggagcatgatcacgagtgcgagtccctgcaggcacatgatacccttagacttacctgtccgcccgactatactcttaccctgcggaggagtcctgacgacatccccttgatgacccccaacactataaccatgattcctaatacgctgaccggcatgcagcccttacacacttttaatacattttccggaggtcaaaacagtaccaatcttccacatgggcactctaccacccgggtgtag

SEQ ID NO: 100376 - DNA, 2451 bp, Artificial Sequence
  derived and/or modified sequence
atgagccggccccagggcctgctgtggctgcccctgctcttcacccctgtgtgtgtgatgctgaacagcaatgtgctgctgtggctgacagccctggccatcaagttcaccctgattgacagccaggcccagtaccctgtggtgaacaccaactacggcaagatccggggcctgcggacccccctgcccaatgagatcctgggccctgtggagcagtacctgggcgtgccctatgccagccccccaactggagagcggcgcttccagcccccagagccccccagctcctggacaggcatccggaacaccacccagtttgctgctgtgtgcccccagcacctggatgagaggagcctgctgcatgacatgctgcccatctggttcaccgccaacctggacaccctgatgacctacgtgcaggaccagaatgaagactgcctgtacctgaacatctacgtgcccacagaagatgacatccatgaccagaacagcaagaagcctgtgatggtgtacatccatggaggcagctacatggagggcactggaaacatgattgatggcagcatcctggccagctatggaaatgtgattgtcatcaccatcaactaccgcctgggcatcctgggcttcctgagcactggagaccaggccgccaagggcaactacggcctgctggaccagatccaggccctgcgctggattgaggagaatgtgggcgcctttggaggagaccccaagagggtgaccatctttggaagtggagctggggccagctgtgtgtccctgctgaccctgagccactacagcgagggcctcttccagaaggccatcatccagagcggcacagccctgagctcctgggccgtgaactaccagcctgccaagtacacccgcatcctggccgacaaggtgggctgcaacatgctggacaccacagacatggtggagtgcctgaggaacaagaactacaaggagctgatccagcagaccatcaccccagccacctaccacatcgccttcggccctgtgattgatggagatgtgatcccagatgacccccagatcctgatggagcagggcgagttcctgaactatgacatcatgctgggcgtgaaccagggcgagggcctgaagtttgtggatggcatcgtggacaatgaagatggagtgaccccaaatgactttgacttctctgtgagcaactttgtggacaacctgtatggctacccagagggcaaggacaccctgcgggagaccatcaagttcatgtacacagactgggccgacaaggaaaatcctgagaccaggaggaagaccctggtggccctcttcacagaccaccagtgggtggccccagctgtggccacagctgacctgcacgcccagtatggcagccccacctacttctacgccttctaccaccactgccagagcgagatgaagcccagctgggccgacagcgcccatggagatgaggtgccctacgtgtttggcatccccatgattggccccacagagctgttcagctgcaacttcagcaagaatgatgtgatgctgtctgctgtggtgatgacctactggaccaactttgccaagacaggagaccccaaccagcctgtgccccaggacaccaagttcatccacaccaagcccaacagatttgaggaggtggcctggagcaagtacaaccccaaggaccagctgtacctgcacatcggcctgaagccccgggtgcgggaccactaccgggccaccaaggtggccttctggctggagctggtgccccacctgcacaacctgaatgagatcttccagtatgtgtccaccaccaccaaggtgcccccaccagacatgaccagcttcccctacggcacccggcgcagccctgccaagatctggcccaccaccaagaggcctgccatcaccccagccaacaaccccaagcacagcaaggacccccacaagacaggccctgaggacaccaccgtgctgattgagaccaagagggactacagcacagagctgtctgtgaccatcgctgtgggcgccagcctgctcttcctgaacatcctggcctttgctgccctgtactacaagaaggacaagagaagacatgagacccacagaagacccagcccccagaggaacaccaccaatgacatcgcccacatccagaatgaggagatcatgagcctgcagatgaagcagctggagcatgaccatgaatgtgagagcctgcaggcccatgacaccctgcggctgacctgccccccagactacaccctgaccctgcggcgcagcccagatgacatccccctgatgacccccaacaccatcaccatgatccccaacaccctgaccggcatgcagcccctgcacaccttcaacaccttcagcggcggccagaacagcaccaacctgccccacggccacagcaccaccagggtgtag

SEQ ID NO: 100377 - DNA, 5454 bp, Artificial Sequence
  derived and/or modified sequence
atttaagcgattttttttccctccttcatctccgggcctcggataagatgacggcttgggtgatgcacgaaataacgcacgtgattgattagacctggcttggcttggctagggaacgatccaggcgcgctggagaccccgcgtgaagatgaaatgacggctgccttggagttttcataagaaattgtccctggaggtgttggatgatcacagcttccttggagcattgcagttgctggaatccagtttcaggattaagggagggctgcctccttgcaatgggctgccaagaaaacggctgtgcttgttcttaacctcaggctctgtctgtgatcagtctgagagtctctcccaggtctactgctccctggaaagccctatctctctgcaggctcgcctctgggctttgtctccttggagccacatcactgggacagctgtggatgtggatgcagatttgaaccatgtcacggccccagggactgctatggcttcctttgttgttcaccccggtctgcgtcatgttaaactccaatgtcctcctgtggttaactgctcttgccatcaagttcaccctcattgacagccaagcacagtatccagttgtcaacacaaattatggcaaaatccggggcctaagaacaccgttacccaatgagatcttgggtccagtggagcagtacttaggggtcccctatgcctcaccccccactggagagaggcggtttcagcccccagaacccccgtcctcctggactggcatccgaaatactactcagtttgctgctgtgtgcccccagcacctggatgagagatccttactgcatgacatgctgcccatctggtttaccgccaatttggatactttgatgacctatgttcaagatcaaaatgaagactgcctttacttaaacatctacgtgcccacggaagatgatattcatgatcagaacagtaagaagcccgtcatggtctatatccatgggggatcttacatggagggcaccggcaacatgattgacggcagcattttggcaagctacggaaacgtcatcgtgatcaccattaactaccgtctgggaatactagggtttttaagtaccggtgaccaggcagcaaaaggcaactatgggctcctggatcagattcaagcactgcggtggattgaggagaatgtgggagcctttggcggggaccccaagagagtgaccatctttggctcgggggctggggcctcctgtgtcagcctgttgaccctgtcccactactcagaaggtctcttccagaaggccatcattcagagcggcaccgccctgtccagctgggcagtgaactaccagccggccaagtacactcggatattggcagacaaggtcggctgcaacatgctggacaccacggacatggtagaatgcctgcggaacaagaactacaaggagctcatccagcagaccatcaccccggccacctaccacatagccttcgggccggtgatcgacggcgacgtcatcccagacgacccccagatcctgatggagcaaggcgagttcctcaactacgacatcatgctgggcgtcaaccaaggggaaggcctgaagttcgtggacggcatcgtggataacgaggacggtgtgacgcccaacgactttgacttctccgtgtccaacttcgtggacaacctttacggctaccctgaagggaaagacactttgcgggagactatcaagttcatgtacacagactgggccgataaggaaaacccggagacgcggcggaaaaccctggtggctctctttactgaccaccagtgggtggcccccgccgtggccaccgccgacctgcacgcgcagtacggctcccccacctacttctatgccttctatcatcactgccaaagcgaaatgaagcccagctgggcagattcggcccatggtgatgaggtcccctatgtcttcggcatccccatgatcggtcccaccgagctcttcagttgtaacttttccaagaacgacgtcatgctcagcgccgtggtcatgacctactggacgaacttcgccaaaactggtgatccaaatcaaccagttcctcaggataccaagttcattcacacaaaacccaaccgctttgaagaagtggcctggtccaagtataatcccaaagaccagctctatctgcatattggcttgaaacccagagtgagagatcactaccgggcaacgaaagtggctttctggttggaactcgttcctcatttgcacaacttgaacgagatattccagtatgtttcaacaaccacaaaggttcctccaccagacatgacatcatttccctatggcacccggcgatctcccgccaagatatggccaaccaccaaacgcccagcaatcactcctgccaacaatcccaaacactctaaggaccctcacaaaacagggcctgaggacacaactgtcctcattgaaaccaaacgagattattccaccgaattaagtgtcaccattgccgtcggggcgtcgctcctcttcctcaacatcttagcttttgcggcgctgtactacaaaaaggacaagaggcgccatgagactcacaggcgccccagtccccagagaaacaccacaaatgatatcgctcacatccagaacgaagagatcatgtctctgcagatgaagcagctggaacacgatcacgagtgtgagtcgctgcaggcacacgacacactgaggctcacctgcccgccagactacaccctcacgctgcgccggtcgccagatgacatcccacttatgacgccaaacaccatcaccatgattccaaacacactgacggggatgcagcctttgcacacttttaacaccttcagtggaggacaaaacagtacaaatttaccccacggacattccaccactagagtatagctttgccctatttcccttcctatccctctgccctacccgctcagcaacatagaagagggaaggaaagagagaaggaaagagagagagaaagaaagtctccagaccaggaatgtttttgtcccactgacttaagacaaaaatgcaaaaaggcagtcatcccatcccggcagacccttatcgttggtgttttccagtattacaagatcaacttctgaccctgtgaaatgtgagaagtacacatttctgttaaaataactgctttaagatctctaccactccaatcgatgtttagtgtgataggacatcaccatttcaaggccccgggtgtttccaacgtcatggaagcagctgacacttctgaaactcagccaaggacacttgatattttttaattacaatggaagtttaaacatttctttctgtgccacacaatggatggctctccttaagtgaagaaagagtcaatgagattttgcccagcacatggagctgtaatccagagagaaggaaacgtagaaatttattattaaaagaatggactgtgcagcgaaatctgtacggttctgtgcaaagaggtgttttgccagcctgaactatatttaagagactttgtaaaaaagaaaaatgtatatagctgtgagtttaaacaaaaaccacaaacagacaaacaagaaaaaaagcttttattggtgttttcactttgaaagagcttttagcaaggttgtgcttttcattgtgctctgtacgtatataaatatatatatatatacacacacacacacacattagtcatatcacctctgtttcctccccaacaaaagaggcttttcttcttaattacttgtggtaaacaaagacatgggattttcttacatgagattctcatttgtaggaggatgtgatgtcccacagaagacccagacggtctgtgtggcctatttcccccgtcaggttgcacaggtgcatgcaagagcattcttaggagaccactgttttgaaaaacttttgacttgtacgtgttagccttcatgaaattgcagtacagagatgggtccccaaagtggagtgtatttacagcttgttaaattagagacatgcacacacaaagaatcagtagggagaaacaaaaatacaagtcccgttctgtagctctggccctttgaatatgtttaggaagagttgcttcccatttcagggccctgccaaaaaaagaagaaagcttgcctttggtggggctatgccccttggagtaaatacggctctgtgttccctagcagctgcgggagggtttggccgatgaagtacctgctcagcttagctaatcagattgaaggaagacatgtgtctttcctttttgtttaagcactcggtcccttatttatcagtaagcaggtttttaaaaatcttttatatcatttatgggatcaaacatatgattgtctgaaaacatcactttttgtggatttgtgtatccggtcaccaaacggtgaatattatagaagaatgggggaagaaaggatagaatattaaaactgctttgcatgggttttctgggaaattaggataacttcactgagaagacattgaatggaaattattcacccattttaaattggtgacctagggatcagagatttgtctttccaacagcttgtcattttttcatttctcttctcatttttcaggaaagttttgagtgttataaggtggaaggaaacatagtagcaatggatacttttttgaaaaattattgcattaccaagaaacagtagccaaagatatttgaagatcatgttcctcggctccattgtgggttattctagaaatccagtcttaaatctctccgctaaagtggacattccccataaaaattgtccagctgcctggctcttttgcaataacaacctttgattactgaatccctacactcaaactatagtgatatatcagtgtttgagagtgacctctagaaaaaagaaaagtgtttttagaaatgcgtacaagtcacccccaaatcctattgcttatcttgggttaaatttgagagtgattctctgtatataaatatgtgaaatattattatctcaacttagcacacgtgaagcaacatttctttcctacagagaggtgtcatggtaagatttcattccgaattcattgtttcatagagctatgatcaggccatttctgcaagcaatgtatgaccccacctgagcaaccacaaataggctctctgtgaaactacaaaggaagttatgtgtggcatccatgttggtttcgtctgtctgtaatgtgaattccagtatttgtttagtatttccagttgtctcctgctagcaatatgtacagtaacgcgtcaggcttgtgacatttgaataaggaaaaacagagttcctgttaagtgaataactttagcttttacaggggattatgatcaaaagtgattttagtacatcttaaatgatatcttatttctacatggaaagaagttatagaatcttcatagagttctatgagaaaaaatatacttgctatctat

SEQ ID NO: 100378 - DNA, 3750 bp, Artificial Sequence
  derived and/or modified sequence
gtttcgggttccctagaaaaatctggacgtgtaaaaagaactcttaacggccgatgcagctcttccaaagctaagggaccattcccctccaaaatcctacaaggtgggtccatgacatctgctagagaaaaagagggacatgttggagcgataggattcccatgggcactgacatactggcctctggggataggaagattaatgcttagtacaagaaagaaggaaaagaaggccttggcgaggactgttttatctcagcatttctcagaagctccttcagtggagacttcgcctgggaccttcgccccaccttcttctaatggcacttcctccctgtggggctccacgcgggacattacgtcggtgatgcgtagggcatcgggctgccttggagttttcataagaaattgtccctggaggtgttggatgatcacagcttccttggagcattgcagttgctggaatccagtttcaggattaagggagggctgcctccttgcaatgggctgccaagaaaacggctgtgcttgttcttaacctcaggctctgtctgtgatcagtctgagagtctctcccaggtctactgctccctggaaagccctatctctctgcaggctcgcctctgggctttgtctccttggagccacatcactgggacagctgtggatgtggatgcagatttgaaccatgtcacggccccagggactgctatggcttcctttgttgttcaccccggtctgcgtcatgttaaactccaatgtcctcctgtggttaactgctcttgccatcaagttcaccctcattgacagccaagcacagtatccagttgtcaacacaaattatggcaaaatccggggcctaagaacaccgttacccaatgagatcttgggtccagtggagcagtacttaggggtcccctatgcctcaccccccactggagagaggcggtttcagcccccagaacccccgtcctcctggactggcatccgaaatactactcagtttgctgctgtgtgcccccagcacctggatgagagatccttactgcatgacatgctgcccatctggtttaccgccaatttggatactttgatgacctatgttcaagatcaaaatgaagactgcctttacttaaacatctacgtgcccacggaagatgatattcatgatcagaacagtaagaagcccgtcatggtctatatccatgggggatcttacatggagggcaccggcaacatgattgacggcagcattttggcaagctacggaaacgtcatcgtgatcaccattaactaccgtctgggaatactagggtttttaagtaccggtgaccaggcagcaaaaggcaactatgggctcctggatcagattcaagcactgcggtggattgaggagaatgtgggagcctttggcggggaccccaagagagtgaccatctttggctcgggggctggggcctcctgtgtcagcctgttgaccctgtcccactactcagaaggtctcttccagaaggccatcattcagagcggcaccgccctgtccagctgggcagtgaactaccagccggccaagtacactcggatattggcagacaaggtcggctgcaacatgctggacaccacggacatggtagaatgcctgcggaacaagaactacaaggagctcatccagcagaccatcaccccggccacctaccacatagccttcgggccggtgatcgacggcgacgtcatcccagacgacccccagatcctgatggagcaaggcgagttcctcaactacgacatcatgctgggcgtcaaccaaggggaaggcctgaagttcgtggacggcatcgtggataacgaggacggtgtgacgcccaacgactttgacttctccgtgtccaacttcgtggacaacctttacggctaccctgaagggaaagacactttgcgggagactatcaagttcatgtacacagactgggccgataaggaaaacccggagacgcggcggaaaaccctggtggctctctttactgaccaccagtgggtggcccccgccgtggccaccgccgacctgcacgcgcagtacggctcccccacctacttctatgccttctatcatcactgccaaagcgaaatgaagcccagctgggcagattcggcccatggtgatgaggtcccctatgtcttcggcatccccatgatcggtcccaccgagctcttcagttgtaacttttccaagaacgacgtcatgctcagcgccgtggtcatgacctactggacgaacttcgccaaaactggtgatccaaatcaaccagttcctcaggataccaagttcattcacacaaaacccaaccgctttgaagaagtggcctggtccaagtataatcccaaagaccagctctatctgcatattggcttgaaacccagagtgagagatcactaccgggcaacgaaagtggctttctggttggaactcgttcctcatttgcacaacttgaacgagatattccagtatgtttcaacaaccacaaaggttcctccaccagacatgacatcatttccctatggcacccggcgatctcccgccaagatatggccaaccaccaaacgcccagcaatcactcctgccaacaatcccaaacactctaaggaccctcacaaaacagggcctgaggacacaactgtcctcattgaaaccaaacgagattattccaccgaattaagtgtcaccattgccgtcggggcgtcgctcctcttcctcaacatcttagcttttgcggcgctgtactacaaaaaggacaagaggcgccatgagactcacaggcgccccagtccccagagaaacaccacaaatgatatcgctcacatccagaacgaagagatcatgtctctgcagatgaagcagctggaacacgatcacgagtgtgagtcgctgcaggcacacgacacactgaggctcacctgcccgccagactacaccctcacgctgcgccggtcgccagatgacatcccacttatgacgccaaacaccatcaccatgattccaaacacactgacggggatgcagcctttgcacacttttaacaccttcagtggaggacaaaacagtacaaatttaccccacggacattccaccactagagtatagctttgccctatttcccttcctatccctctgccctacccgctcagcaacatagaagagggaaggaaagagagaaggaaagagagagagaaagaaagtctccagaccaggaatgtttttgtcccactgacttaagacaaaaatgcaaaaaggcagtcatcccatcccggcagacccttatcgttggtgttttccagtattacaagatcaacttctgaccctgtgaaatgtgagaagtacacatttctgttaaaataactgctttaagatctctaccactccaatcgatgtttagtgtgataggacatcaccatttcaaggccccgggtgtttccaacgtcatggaagcagctgacacttctgaaactcagccaaggacacttgatattttttaattacaatggaagtttaaacatttctttctgtgccacacaatggatggctctccttaagtgaagaaagagtcaatgagattttgcccagcacatggagctgtaatccagagagaaggaaacgtagaaatttattattaaaagaatggactgtgcagcgaaatctgtacggttctgtgcaaagaggtgttttgccagcctgaactatatttaagagactttg

SEQ ID NO: 100379 - DNA, 5870 bp, Artificial Sequence
  derived and/or modified sequence
aaccgtctctctcccttctctgtctcttagcacagagctcttattcagccactagcttggcccttcctgcttcaattgtaatgcttgttctgcccgtccacagactattggcggcagaaacaacgaatttcctccaaactaggcggtgttggtggctcttgcattcctctggatgaggaaatctagttggggggttccagaaggggaaggctcctgggctttcaatacatcctcctgaatcatacctcgtttcgggttccctagaaaaatctggacgtgtaaaaagaactcttaacggccgatgcagctcttccaaagctaaggctgccttggagttttcataagaaattgtccctggaggtgttggatgatcacagcttccttggagcattgcagttgctggaatccagtttcaggattaagggagggctgcctccttgcaatgggctgccaagaaaacggctgtgcttgttcttaacctcaggctctgtctgtgatcagtctgagagtctctcccaggtctactgctccctggaaagccctatctctctgcaggctcgcctctgggctttgtctccttggagccacatcactgggacagctgtggatgtggatgcagatttgaaccatgtcacggccccagggactgctatggcttcctttgttgttcaccccggtctgcgtcatgttaaactccaatgtcctcctgtggttaactgctcttgccatcaagttcaccctcattgacagccaagcacagtatccagttgtcaacacaaattatggcaaaatccggggcctaagaacaccgttacccaatgagatcttgggtccagtggagcagtacttaggggtcccctatgcctcaccccccactggagagaggcggtttcagcccccagaacccccgtcctcctggactggcatccgaaatactactcagtttgctgctgtgtgcccccagcacctggatgagagatccttactgcatgacatgctgcccatctggtttaccgccaatttggatactttgatgacctatgttcaagatcaaaatgaagactgcctttacttaaacatctacgtgcccacggaagatgatattcatgatcagaacagtaagaagcccgtcatggtctatatccatgggggatcttacatggagggcaccggcaacatgattgacggcagcattttggcaagctacggaaacgtcatcgtgatcaccattaactaccgtctgggaatactagggtttttaagtaccggtgaccaggcagcaaaaggcaactatgggctcctggatcagattcaagcactgcggtggattgaggagaatgtgggagcctttggcggggaccccaagagagtgaccatctttggctcgggggctggggcctcctgtgtcagcctgttgaccctgtcccactactcagaaggtctcttccagaaggccatcattcagagcggcaccgccctgtccagctgggcagtgaactaccagccggccaagtacactcggatattggcagacaaggtcggctgcaacatgctggacaccacggacatggtagaatgcctgcggaacaagaactacaaggagctcatccagcagaccatcaccccggccacctaccacatagccttcgggccggtgatcgacggcgacgtcatcccagacgacccccagatcctgatggagcaaggcgagttcctcaactacgacatcatgctgggcgtcaaccaaggggaaggcctgaagttcgtggacggcatcgtggataacgaggacggtgtgacgcccaacgactttgacttctccgtgtccaacttcgtggacaacctttacggctaccctgaagggaaagacactttgcgggagactatcaagttcatgtacacagactgggccgataaggaaaacccggagacgcggcggaaaaccctggtggctctctttactgaccaccagtgggtggcccccgccgtggccaccgccgacctgcacgcgcagtacggctcccccacctacttctatgccttctatcatcactgccaaagcgaaatgaagcccagctgggcagattcggcccatggtgatgaggtcccctatgtcttcggcatccccatgatcggtcccaccgagctcttcagttgtaacttttccaagaacgacgtcatgctcagcgccgtggtcatgacctactggacgaacttcgccaaaactggtgatccaaatcaaccagttcctcaggataccaagttcattcacacaaaacccaaccgctttgaagaagtggcctggtccaagtataatcccaaagaccagctctatctgcatattggcttgaaacccagagtgagagatcactaccgggcaacgaaagtggctttctggttggaactcgttcctcatttgcacaacttgaacgagatattccagtatgtttcaacaaccacaaaggttcctccaccagacatgacatcatttccctatggcacccggcgatctcccgccaagatatggccaaccaccaaacgcccagcaatcactcctgccaacaatcccaaacactctaaggaccctcacaaaacagggcctgaggacacaactgtcctcattgaaaccaaacgagattattccaccgaattaagtgtcaccattgccgtcggggcgtcgctcctcttcctcaacatcttagcttttgcggcgctgtactacaaaaaggacaagaggcgccatgagactcacaggcgccccagtccccagagaaacaccacaaatgatatcgctcacatccagaacgaagagatcatgtctctgcagatgaagcagctggaacacgatcacgagtgtgagtcgctgcaggcacacgacacactgaggctcacctgcccgccagactacaccctcacgctgcgccggtcgccagatgacatcccacttatgacgccaaacaccatcaccatgattccaaacacactgacggggatgcagcctttgcacacttttaacaccttcagtggaggacaaaacagtacaaatttaccccacggacattccaccactagagtatagctttgccctatttcccttcctatccctctgccctacccgctcagcaacatagaagagggaaggaaagagagaaggaaagagagagagaaagaaagtctccagaccaggaatgtttttgtcccactgacttaagacaaaaatgcaaaaaggcagtcatcccatcccggcagacccttatcgttggtgttttccagtattacaagatcaacttctgaccctgtgaaatgtgagaagtacacatttctgttaaaataactgctttaagatctctaccactccaatcgatgtttagtgtgataggacatcaccatttcaaggccccgggtgtttccaacgtcatggaagcagctgacacttctgaaactcagccaaggacacttgatattttttaattacaatggaagtttaaacatttctttctgtgccacacaatggatggctctccttaagtgaagaaagagtcaatgagattttgcccagcacatggagctgtaatccagagagaaggaaacgtagaaatttattattaaaagaatggactgtgcagcgaaatctgtacggttctgtgcaaagaggtgttttgccagcctgaactatatttaagagactttgtaaaaaagaaaaatgtatatagctgtgagtttaaacaaaaaccacaaacagacaaacaagaaaaaaagcttttattggtgttttcactttgaaagagcttttagcaaggttgtgcttttcattgtgctctgtacgtatataaatatatatatatatacacacacacacacacattagtcatatcacctctgtttcctccccaacaaaagaggcttttcttcttaattacttgtggtaaacaaagacatgggattttcttacatgagattctcatttgtaggaggatgtgatgtcccacagaagacccagacggtctgtgtggcctatttcccccgtcaggttgcacaggtgcatgcaagagcattcttaggagaccactgttttgaaaaacttttgacttgtacgtgttagccttcatgaaattgcagtacagagatgggtccccaaagtggagtgtatttacagcttgttaaattagagacatgcacacacaaagaatcagtagggagaaacaaaaatacaagtcccgttctgtagctctggccctttgaatatgtttaggaagagttgcttcccatttcagggccctgccaaaaaaagaagaaagcttgcctttggtggggctatgccccttggagtaaatacggctctgtgttccctagcagctgcgggagggtttggccgatgaagtacctgctcagcttagctaatcagattgaaggaagacatgtgtctttcctttttgtttaagcactcggtcccttatttatcagtaagcaggtttttaaaaatcttttatatcatttatgggatcaaacatatgattgtctgaaaacatcactttttgtggatttgtgtatccggtcaccaaacggtgaatattatagaagaatgggggaagaaaggatagaatattaaaactgctttgcatgggttttctgggaaattaggataacttcactgagaagacattgaatggaaattattcacccattttaaattggtgacctagggatcagagatttgtctttccaacagcttgtcattttttcatttctcttctcatttttcaggaaagttttgagtgttataaggtggaaggaaacatagtagcaatggatacttttttgaaaaattattgcattaccaagaaacagtagccaaagatatttgaagatcatgttcctcggctccattgtgggttattctagaaatccagtcttaaatctctccgctaaagtggacattccccataaaaattgtccagctgcctggctcttttgcaataacaacctttgattactgaatccctacactcaaactatagtgatatatcagtgtttgagagtgacctctagaaaaaagaaaagtgtttttagaaatgcgtacaagtcacccccaaatcctattgcttatcttgggttaaatttgagagtgattctctgtatataaatatgtgaaatattattatctcaacttagcacacgtgaagcaacatttctttcctacagagaggtgtcatggtaagatttcattccgaattcattgtttcatagagctatgatcaggccatttctgcaagcaatgtatgaccccacctgagcaaccacaaataggctctctgtgaaactacaaaggaagttatgtgtggcatccatgttggtttcgtctgtctgtaatgtgaattccagtatttgtttagtatttccagttgtctcctgctagcaatatgtacagtaacgcgtcaggcttgtgacatttgaataaggaaaaacagagttcctgttaagtgaataactttagcttttacaggggattatgatcaaaagtgattttagtacatcttaaatgatatcttatttctacatggaaagaagttatagaatcttcatagagttctatgagaaaaaatatacttgctatctataaaaaagagaaaaaagaaaaaaaatgagaaaaaagtaagaaaaaaaaaaatcctgtcctaggcttttactcttgatcttcaaaggcacgcagggtttaatggttccttgggttattattttgcagttttgttttttattttgccttaagtaatgatagaagatatatatggccggacacatatgtataaacttttcagcagcatttttaataataaaatatcacagtattttctaatgctttgtgcaaataa

SEQ ID NO: 100380 - DNA, 3251 bp, Artificial Sequence
  derived and/or modified sequence
agaactgatggagaagatccgccaagcgcgcagccggcggcggaggagacagtgcggggtgggcgaggggcttcgagaccacgcagagagagagtgaacttcagtcctgacccctccccaaggccgcggctggggcgcccacagcccgcgctggcacccgcgtggcctgacctgcggaagcgcgagcggggatgaggctgccttggagttttcataagaaattgtccctggaggtgttggatgatcacagcttccttggagcattgcagttgctggaatccagtttcaggattaagggagggctgcctccttgcaatgggctgccaagaaaacggctgtgcttgttcttaacctcaggctctgtctgtgatcagtctgagagtctctcccaggtctactgctccctggaaagccctatctctctgcaggctcgcctctgggctttgtctccttggagccacatcactgggacagctgtggatgtggatgcagatttgaaccatgtcacggccccagggactgctatggcttcctttgttgttcaccccggtctgcgtcatgttaaactccaatgtcctcctgtggttaactgctcttgccatcaagttcaccctcattgacagccaagcacagtatccagttgtcaacacaaattatggcaaaatccggggcctaagaacaccgttacccaatgagatcttgggtccagtggagcagtacttaggggtcccctatgcctcaccccccactggagagaggcggtttcagcccccagaacccccgtcctcctggactggcatccgaaatactactcagtttgctgctgtgtgcccccagcacctggatgagagatccttactgcatgacatgctgcccatctggtttaccgccaatttggatactttgatgacctatgttcaagatcaaaatgaagactgcctttacttaaacatctacgtgcccacggaagatgatattcatgatcagaacagtaagaagcccgtcatggtctatatccatgggggatcttacatggagggcaccggcaacatgattgacggcagcattttggcaagctacggaaacgtcatcgtgatcaccattaactaccgtctgggaatactagggtttttaagtaccggtgaccaggcagcaaaaggcaactatgggctcctggatcagattcaagcactgcggtggattgaggagaatgtgggagcctttggcggggaccccaagagagtgaccatctttggctcgggggctggggcctcctgtgtcagcctgttgaccctgtcccactactcagaaggtctcttccagaaggccatcattcagagcggcaccgccctgtccagctgggcagtgaactaccagccggccaagtacactcggatattggcagacaaggtcggctgcaacatgctggacaccacggacatggtagaatgcctgcggaacaagaactacaaggagctcatccagcagaccatcaccccggccacctaccacatagccttcgggccggtgatcgacggcgacgtcatcccagacgacccccagatcctgatggagcaaggcgagttcctcaactacgacatcatgctgggcgtcaaccaaggggaaggcctgaagttcgtggacggcatcgtggataacgaggacggtgtgacgcccaacgactttgacttctccgtgtccaacttcgtggacaacctttacggctaccctgaagggaaagacactttgcgggagactatcaagttcatgtacacagactgggccgataaggaaaacccggagacgcggcggaaaaccctggtggctctctttactgaccaccagtgggtggcccccgccgtggccaccgccgacctgcacgcgcagtacggctcccccacctacttctatgccttctatcatcactgccaaagcgaaatgaagcccagctgggcagattcggcccatggtgatgaggtcccctatgtcttcggcatccccatgatcggtcccaccgagctcttcagttgtaacttttccaagaacgacgtcatgctcagcgccgtggtcatgacctactggacgaacttcgccaaaactggtgatccaaatcaaccagttcctcaggataccaagttcattcacacaaaacccaaccgctttgaagaagtggcctggtccaagtataatcccaaagaccagctctatctgcatattggcttgaaacccagagtgagagatcactaccgggcaacgaaagtggctttctggttggaactcgttcctcatttgcacaacttgaacgagatattccagtatgtttcaacaaccacaaaggttcctccaccagacatgacatcatttccctatggcacccggcgatctcccgccaagatatggccaaccaccaaacgcccagcaatcactcctgccaacaatcccaaacactctaaggaccctcacaaaacagggcctgaggacacaactgtcctcattgaaaccaaacgagattattccaccgaattaagtgtcaccattgccgtcggggcgtcgctcctcttcctcaacatcttagcttttgcggcgctgtactacaaaaaggacaagaggcgccatgagactcacaggcgccccagtccccagagaaacaccacaaatgatatcgctcacatccagaacgaagagatcatgtctctgcagatgaagcagctggaacacgatcacgagtgtgagtcgctgcaggcacacgacacactgaggctcacctgcccgccagactacaccctcacgctgcgccggtcgccagatgacatcccacttatgacgccaaacaccatcaccatgattccaaacacactgacggggatgcagcctttgcacacttttaacaccttcagtggaggacaaaacagtacaaatttaccccacggacattccaccactagagtatagctttgccctatttcccttcctatccctctgccctacccgctcagcaacatagaagagggaaggaaagagagaaggaaagagagagagaaagaaagtctccagaccaggaatgtttttgtcccactgacttaagacaaaaatgcaaaaaggcagtcatcccatcccggcagacccttatcgttggtgttttccagtattacaagatcaacttctgaccctgtgaaatgtgagaagtacacatttctgttaaaataactgctttaagatctctaccactccaatcgatgtttagtgtgata

SEQ ID NO: 100381 - DNA, 2451 bp, Artificial Sequence
  derived and/or modified sequence
atgagccggccccagggcctgctgtggctgcccctgctgttcaccccggtgtgtgtgatgctcaatagcaacgttctgctgtggctgacagctctggccattaagtttaccctgatcgattctcaggcacagtatccagttgtcaatacgaattatggaaaaattcggggtctccggacacccctgcccaacgagattctgggaccggtagaacagtaccttggggtcccctacgcttccccgcccactggggagcgtaggtttcagccacccgaacccccatcctcctggacggggatcaggaataccacacagttcgcggccgtgtgcccacagcacctggacgagcgaagcttactgcacgacatgttgcctatctggtttaccgccaacctggataccctgatgacatacgttcaggaccagaatgaggattgcctttacctcaacatttatgttcctaccgaggatgacatccatgaccagaatagtaaaaagccggttatggtttacattcacggaggttcctatatggaagggactgggaatatgattgatggctctattcttgcctcatatggcaatgtgatagtgataactataaactacagactgggcatattggggtttctgagtacaggcgaccaagctgccaaaggaaactatgggttgctcgaccagattcaggctctgcgctggatcgaagagaacgtgggggcctttggcggtgaccctaaacgagttactatattcggtagtggggccggggcctcttgcgtgtcactcctcaccctatctcattattctgagggtctcttccagaaggcaattattcagtcaggtacggccctgtcaagttgggctgtcaactaccagcctgccaagtacacacgtatcctggccgataaggtaggatgtaatatgttggataccacagacatggtcgagtgcctccggaataagaactataaagaactcattcagcagaccattacacccgctacatatcacattgccttcggtcctgttatcgacggagatgtcatccctgatgacccacaaatacttatggaacaaggagagtttctgaattatgatatcatgcttggggtcaaccagggagaggggctgaaatttgtagacggcattgtggacaatgaggacggggtgacaccaaatgattttgactttagtgtcagtaactttgtggataacctgtatggctaccctgagggcaaagacactcttcgcgagacgatcaaattcatgtatactgactgggctgacaaggaaaacccagagacgcgacgcaaaaccctggtagctttattcacagatcatcaatgggttgcccccgccgtcgctacagctgatctacatgcccagtatgggtcccctacttatttctatgcattttatcatcattgtcagagtgagatgaagccctcttgggcagattctgcacacggagacgaggtcccctacgtgtttgggattccaatgatagggcctactgagctgttctcctgcaacttctctaagaacgatgtgatgctttctgccgtagttatgacgtattggaccaactttgccaagacaggtgatccaaatcagccagtgccccaggacacaaaatttatacatacgaagccaaaccgattcgaagaggtggcttggtctaagtacaatcctaaggatcagctctacctccacatagggctgaaacccagagtgagagaccactatagggctactaaagtcgctttctggctggaacttgttccccatttgcacaacctaaatgaaatctttcagtatgtgagcaccactaccaaagttcccccccctgatatgacgtcatttccatacggtaccaggagaagccccgcaaaaatctggcctaccacgaaaaggcccgctatcacaccagcaaacaatcctaaacattcaaaggacccccataagacaggccctgaagataccaccgtgctgatcgaaacgaagcgagactactccaccgagctgtccgtgaccattgcagtgggagcaagccttctttttctgaacatcttggcctttgccgcactatattataaaaaggacaagaggcgacacgaaactcaccgccggcccagccctcaaagaaataccaccaatgacatcgctcatatccaaaacgaagaaattatgtctctccagatgaagcagctagaacacgatcatgagtgcgaatccttacaggcccatgacaccctgagactaacatgtccccccgactacactctgaccctgaggaggagcccagatgatataccacttatgacccctaatacaataaccatgatccctaacacgttaacggggatgcagcccctccacacatttaatacgttcagcggggggcaaaactcaacaaatctcccacatgggcattctactacacgcgtatag

SEQ ID NO: 100382 - DNA, 2451 bp, Artificial Sequence
  derived and/or modified sequence
atgagccggccccagggcctgctgtggctgcccctgctgttcacccctgtctgtgtgatgctcaatagtaatgttctactttggcttacagccctagctattaagtttacgctcatagattcccaggctcagtaccctgttgtgaacaccaattacggaaaaatacgcgggctgcgaacccctttgccgaacgagattctgggtccagtagaacagtatctgggcgtgccctatgctagtccacctactggcgagagacgctttcagcccccagagccaccatccagttggacaggaatacgtaacacaacccagtttgccgcagtttgcccacagcatttggacgaaagatcgttacttcacgacatgctgcccatttggttcacagccaatctcgacacactcatgacctacgtccaggatcaaaacgaagactgcctctacttgaacatctatgtccctaccgaagatgacatccatgatcaaaactcaaaaaagcccgtaatggtgtacatccatggtggttcttacatggaaggtaccggcaatatgatcgacggctccatattggccagttatggcaacgtcattgtaatcactattaattaccggctgggaattctcggcttcctctccactggcgaccaggccgctaagggaaactacggcttgctggatcagatacaggccctgcgctggatagaggaaaatgtgggcgccttcgggggcgatccgaagcgggtgacaattttcggaagcggcgcaggggcttcatgtgtgtcacttctcaccctcagccactattccgagggactcttccagaaagctattatccagtccggaacggccttgagttcgtgggccgtaaattatcagcctgcaaagtacacacgcattctggctgataaggttggatgcaatatgctggatacaacggatatggtggaatgtttacgaaacaagaattacaaagagctgattcagcaaactattacccccgctacttaccacatcgccttcggccctgtgatcgacggtgacgtgattccagatgatcctcaaatcttgatggagcagggtgagtttttaaattacgacattatgctgggggtgaaccaaggcgagggattgaagttcgtcgatggcatcgtcgacaacgaggacggcgtgactccaaatgacttcgatttctcggtgtccaactttgtggataacctgtacggatacccggaagggaaggatacactaagagaaaccattaaattcatgtatacagattgggctgataaggaaaaccctgagactagaagaaagactcttgtagcactgtttactgatcaccagtgggtggcacctgctgtcgccacggctgatttgcacgcccaatacggttctccaacttatttttatgccttttatcatcactgtcagagcgagatgaagccatcttgggctgattccgcccacggagacgaagtcccctatgtgttcggaattccaatgatcggaccaaccgaattgttttcgtgtaacttttctaaaaatgatgttatgctgtccgcggtggtcatgacttattggacaaactttgcaaagacaggggatcctaaccagcctgtcccccaggataccaaattcatacataccaagcccaatcgctttgaggaagtggcctggtctaaatataatcctaaggaccagctttatctgcacattggcctcaagcctcgggtgagagaccattaccgtgccactaaagttgcgttctggcttgaactagtgccgcacctccataacctgaatgaaatcttccagtacgtgtcgaccactacgaaagtacctccacctgacatgacatcatttccctatggaaccaggcgctctcccgcaaagatatggcccactactaagagacctgccattacacccgccaacaatccaaagcactccaaggacccacataaaacaggccccgaggataccactgtgctgattgaaaccaagagggactacagcacagagctgtcagttaccattgccgtgggggcttcactgctttttctaaatattctggccttcgctgcattatactacaaaaaggataagaggcggcatgagacacacaggagaccctctccgcaaagaaacaccaccaatgatatcgcacatatccagaatgaggagatcatgtcactgcaaatgaaacagttggaacacgaccacgaatgcgagtccctgcaagcgcatgacaccctcagattgacatgtcccccagattatactctcacactacggaggagcccagatgatattcctctgatgacaccaaatacgataacaatgattccaaataccctcacaggaatgcagcctcttcacaccttcaacacattcagcggaggacagaattctacaaacttaccgcatggtcactccacaaccagggtttag

SEQ ID NO: 100383 - DNA, 2451 bp, Artificial Sequence
  derived and/or modified sequence
atgagccggccccagggcctgctgtggctgcccctgctgttcacccctgtgtgtgtcatgctgaactctaacgtcttattatggctcacagcgttggccatcaagttcacacttatcgattcccaggctcagtatcccgtcgtaaatacgaactacggcaagatacgcggtctgagaacccccctgcccaatgagatcctgggccccgtggagcagtatctcggggtgccttatgcttcgccccccacaggagaacgaaggttccagcctccagagccccctagcagttggaccggaatcagaaacaccacccagttcgccgccgtgtgtccccagcacctggacgaaaggtctctgctgcatgatatgctacccatttggttcacggcaaacctagacacactcatgacttatgtccaagatcagaacgaagactgcttgtatctgaatatttacgtcccaaccgaagacgatattcacgaccaaaacagtaaaaaacctgtgatggtgtacatccacggagggagctacatggaaggcacagggaacatgatcgacggtagtatcctggcctcttacgggaacgtcatcgtcattacaattaattatcgacttggtatcctcggttttctgtctaccggggatcaggctgcaaaagggaactacgggctcctggaccagattcaagctttaaggtggatagaggaaaatgtgggagcgttcgggggggatcccaaaagagtcacaatatttggatccggcgcaggagctagttgcgtgtctctactaacgctcagtcactactccgaggggttattccagaaggccataattcagtccggaacagccctgagtagttgggctgtgaattaccaacccgctaagtacacaaggatccttgccgacaaagtgggctgcaatatgctggacacgacagacatggtcgaatgtctgcgaaacaaaaactacaaggaattgatacagcagacaatcacccccgcgacctaccacattgcctttggccccgttatagatggcgacgtgattccagatgacccccaaatactgatggaacagggagaatttcttaattacgatattatgctgggcgtgaatcagggcgaggggttgaaattcgtcgatggtatagtcgataatgaggacggagtgactcccaacgatttcgactttagcgtgtcaaattttgtggataatctgtatggttacccagagggaaaagacacattaagagagactatcaagtttatgtatacagattgggccgataaggaaaaccctgaaacccgaaggaagacattagtggccttatttactgatcaccagtgggtggcccccgcggtggctacggctgacctccacgcgcagtacggcagccctacatatttttatgccttttaccaccattgtcaatccgaaatgaagccaagttgggcagacagtgcccacggcgatgaagtcccttatgtgtttgggattcctatgataggccctaccgagttatttagctgcaacttcagtaagaatgacgtaatgctgagcgccgtggtcatgacttactggactaactttgcgaaaactggtgatccaaatcaacccgtgccgcaggacactaagttcattcataccaagcctaacagattcgaggaagttgcttggtctaagtataaccccaaagatcagctgtacctccatatcggactcaaacccagggtgagggatcactaccgggccactaaggttgcattctggttagaacttgtgccccatcttcataatttgaacgagatttttcagtacgtgagtaccaccacgaaggtgccgcctcccgacatgacctcatttccttacggcaccagacgatcccctgcgaaaatatggccaaccacaaagaggcctgcgattacaccggctaacaaccctaagcactctaaggatcctcacaagacagggcccgaggacacaaccgtgctcatcgagactaagcgcgactactctacagagctgtcggtcactattgccgttggtgcctcactgctgttcttaaatattctggcattcgcagctctgtattacaagaaggacaaacgcagacacgaaacccatcggagacctagccctcagagaaatacaacaaacgacatcgcccatatccagaatgaggagatcatgtcactccagatgaaacagctcgaacacgaccacgagtgtgagagcctccaggcccacgatactctgcgcttaacttgcccaccagattacacactaaccctgagaagatctcccgacgatattcccctcatgacacccaacactataaccatgattccaaacacactaaccggaatgcagcctctccacacgttcaacaccttctctggagggcagaattcaactaatctgcctcacggacacagcactacaagggtttag

SEQ ID NO: 100384 - DNA, 2451 bp, Artificial Sequence
  derived and/or modified sequence
atgagccggccccagggcctgctgtggctgcccctgctgttcaccccagtctgcgtcatgcttaacagtaatgtcttactctggctcaccgcgctggccattaagttcacactcatagatagtcaggcacagtatcccgtcgtgaataccaattacggtaagatcaggggtctgcgcacacctctgcctaatgagattctcgggcctgtcgagcaatacctgggagtcccctacgcatcccctcctacgggcgagagaagattccagccccccgagcccccgtcaagctggacagggatcagaaatacgacccagttcgctgcagtgtgcccgcagcatttggacgaacgaagtctcctgcacgacatgcttcctatctggttcaccgccaacctagatacgctgatgacctatgtccaggatcagaatgaagattgtctttacctcaacatatatgtgcccactgaagacgacattcacgaccagaactctaagaagccagtgatggtgtacattcacggtggcagctatatggaagggactgggaacatgatcgatggaagcatactcgcctcctacggcaacgttattgtgattacaattaattaccgattgggcatcctaggtttcctctcaactggcgatcaagcagccaagggaaactacggtttgctcgaccagatacaagctctgcggtggatagaagagaatgtcggggcgtttggtggtgaccctaaaagggtgacaatattcggttccggcgctggagcgagctgtgtgtcactgcttactctcagtcattacagtgagggcctgtttcagaaggcaatcattcagtccgggactgccctgagttcgtgggctgtaaattaccagcctgcgaaatatacacgaattctcgctgataaagtcggctgcaacatgctggataccacagatatggtggagtgcctgcgtaacaagaactacaaggaactcattcaacagactattacccctgctacataccacatagcgtttggaccggtcatcgatggggacgtgattccagatgacccccagatcctaatggaacagggcgagttcttgaactacgatattatgctgggggtgaaccagggcgaagggcttaaattcgtcgatggtatagttgataacgaagacggagtcacaccaaacgattttgacttcagtgtgagcaatttcgtggacaatctgtacggctatcctgaggggaaagatacactgcgcgagactatcaaattcatgtacactgactgggcagataaagaaaacccggagactaggagaaagacactggttgccctgttcaccgaccaccaatgggtggccccagccgtcgcaaccgccgacttgcacgcacagtatggcagccctacctatttttacgcattttaccatcattgtcagagtgaaatgaagcccagctgggccgatagcgctcatggggatgaggtgccatacgtgtttgggatccccatgattggcccaactgagctgttctcctgcaatttcagcaaaaacgatgtcatgctgagcgccgtggtaatgacttactggactaacttcgccaagactggagacccgaatcaaccagtgccacaggacacgaagtttattcacacaaagcccaataggtttgaagaggtggcatggtcaaagtacaaccccaaggatcaactgtacctgcatattggactcaagcctagagtgcgcgaccattaccgagccacaaaagtggccttctggttggagctagtgccgcaccttcacaacctgaacgaaattttccagtacgttagcacaactacgaaggtgccaccgccggatatgacatcattcccctatggcacccgtcggtctccggctaagatttggccgacaaccaagaggccggctattaccccggcaaacaaccctaagcacagtaaggatccgcataagaccggtccagaggataccaccgtgctgatcgaaacgaagcgagactatagtaccgagctgtctgtcacaattgccgtgggagccagcctgttattcctgaatatcctcgcgtttgctgccctctactataaaaaggacaagcgccggcacgagacacaccgaaggccttccccccagcggaatacaaccaatgacatcgcccacattcagaatgaagagatcatgtcattgcagatgaagcagcttgagcatgaccacgagtgcgaatcacttcaagcacatgataccctgagattaacctgtccaccagattatacactgacactgcgccggagcccggacgatattccgttaatgacccctaacacaatcaccatgattcccaatacattaaccggaatgcagcccttacacaccttcaacaccttttcgggaggccagaactctacgaaccttccccacggccactccactacgagagtttag

SEQ ID NO: 100385 - DNA, 2451 bp, Artificial Sequence
  derived and/or modified sequence
atgagtcggccacagggactgctctggctgcccctgctctttacacccgtatgcgtgatgctcaacagcaacgtgcttctgtggctgactgcgctcgcaattaaatttaccctgatagatagccaggcacagtatccagtggtcaacacaaactatgggaagatccggggattgagaaccccattacccaacgagattctaggtcccgtggagcaatatctgggagtgccctacgcttccccgcctactggtgagcgcagattccaaccccctgagccaccttcatcatggactggtatcagaaacactacccagtttgccgctgtctgcccacagcatttagatgagagatccttattgcatgacatgctgcctatatggttcactgctaatctagacactctcatgacttacgtgcaggaccagaatgaagactgcctttacctcaacatttatgttccaaccgaggacgatattcatgaccagaactctaagaagcccgtgatggtttacatccatggtgggagctacatggaagggactggcaacatgattgacgggagtatcctggcatcatatgggaatgtgattgtgataaccataaactatcgactaggaatccttggcttcctgagcacaggggaccaggctgcgaagggcaactacggtttattggatcagatccaagccttgcggtggatcgaggagaatgtcggagcatttggcggagacccgaagcgggtgaccatttttgggtcgggggctggggcatcatgcgtgagcctgctgaccctctcccattactctgaggggctcttccagaaagccataattcagtccgggactgcactgtcatcatgggccgtgaactaccaacccgcaaaatacacacgcattctggccgataaagtcgggtgtaatatgctcgatactaccgatatggtcgagtgtctgcgaaacaaaaattacaaggaactgatccagcagacaatcactccagcgacctatcatatcgccttcggacccgtgattgacggcgatgtcatccccgatgatccccagattcttatggaacaaggcgagtttttaaactacgacatcatgctgggagttaaccagggcgagggcctgaagtttgtggacggaattgtcgacaacgaggatggcgtcacccctaacgactttgacttctccgttagcaacttcgttgataacctgtatggctatccagagggtaaggacactctgcgtgagactatcaagttcatgtacaccgattgggctgataaggaaaacccagagaccagacggaagacgcttgtcgctctgttcacagaccatcagtgggtcgcacccgctgttgctactgccgacttacacgcacagtacggcagcccaacctatttttacgcattctaccaccattgccagtcagagatgaagccatcttgggccgattccgcacatggggacgaggtcccatatgtgtttggtatcccaatgataggtccaactgaacttttttcctgtaactttagcaagaatgatgtgatgctgtctgccgttgtgatgacctactggactaattttgcaaaaacaggagacccaaaccagcctgtgcctcaagataccaaatttatccacaccaaacccaacaggttcgaggaagtggcgtggtctaaatacaacccgaaagaccaactctacttgcacattggcctgaaaccgagagttagggatcactatagggctacgaaggtggctttctggctcgaacttgtgccgcatctgcacaatctcaacgagatattccagtacgtgtctactactacgaaggtgccccctcctgacatgacctcctttccgtacggcacaagaaggtcgcctgctaagatctggcctacaacaaaacgccctgcgattaccccggctaataaccctaaacactctaaggatccccacaagacgggcccagaggatacgactgtgctcatcgagacaaaaagagattacagcacggagctcagcgtaaccatcgcggtcggagcctctctcctgtttcttaacatcctagcattcgccgcactctattacaaaaaggataagaggcggcatgagacccatagacgccctagcccgcagcgcaacacaactaatgacattgctcatatccagaacgaagagatcatgagtcttcaaatgaagcagttggagcacgaccatgagtgtgaaagtctccaggcacacgatacgttaagactaacctgtcctcctgattacaccctcacactgaggaggagcccggacgacatcccactgatgacgccgaacacaattactatgattccaaacactctgacagggatgcagcctcttcacacattcaatacattttccggtggacaaaacagcacaaacctgccccatggacactcgacgacccgtgtgtag

SEQ ID NO: 100386 - DNA, 2451 bp, Artificial Sequence
  derived and/or modified sequence
atgtccagaccacagggcctactgtggctccccctcctgtttacacctgtgtgcgtaatgctgaacagcaacgttctcctctggttgacagctctggctattaaatttaccctaattgactcccaggcgcagtaccctgtcgtcaacaccaactatggaaagattcgaggcctgcgcactccgcttcctaacgagatattaggcccagtggagcagtacttaggcgtgccatacgcttcacccccaacgggagaacgcagattccagccaccagagccaccgtcttcctggaccggaatccgaaacacgacacagttcgccgcagtctgccctcagcacctggatgagagatccctacttcacgacatgcttcccatttggttcacagccaatttagacacgctcatgacctatgtgcaagaccagaatgaggattgtctttacctgaacatctacgtgccgactgaggacgacatccatgaccagaattccaagaagcccgtaatggtgtatatccacggtggtagctatatggagggaaccggcaacatgatcgatggatccatattagcaagctacggaaatgtaatcgtgattactatcaactaccgactggggatactggggtttttaagcacaggcgatcaggccgctaaaggcaattatggcttactagaccagattcaggccctgcgttggatcgaagagaatgtaggtgcgtttggtggcgaccccaagcgagttaccatttttgggtcaggagccggagcatcgtgtgtgagtctcctgactctcagccactacagcgaaggcctcttccagaaggccattatccaatccgggaccgcactgagcagctgggcagtgaattaccagcccgcaaaatacacacgtattcttgccgataaagtgggttgtaatatgctagacactacagatatggtcgaatgccttaggaataagaattataaggagctaatacagcaaacaataactccagcaacgtaccacatcgcatttgggcctgtcatagacggcgacgtcatccccgacgatcctcagattctgatggaacagggagagttcctaaactacgacatcatgctcggcgtgaatcagggggagggcctgaaatttgtggacggtatagtggataacgaagacggcgtgacgccgaacgacttcgacttttctgtgtcaaatttcgtggacaatttatacggatacccggaaggaaaggacactctgcgggaaactatcaagttcatgtacaccgactgggccgacaaggaaaaccctgagactcggcgtaagactctcgtggccctattcactgaccatcaatgggtggcccctgctgtggccacagccgatctgcatgcccagtacggcagcccaacctacttctacgctttttaccatcattgccaatcggagatgaagccctcatgggcggacagcgcgcacggtgatgaagttccttatgtgtttgggattccgatgattggtcccacagaattatttagctgcaatttctcgaaaaatgacgttatgctcagcgccgtggtaatgacatattggacgaactttgcaaaaaccggcgacccaaatcagcctgtccctcaagataccaaatttatacacacaaagccaaatcggttcgaggaagtggcctggagtaagtacaatccgaaggatcaactgtatcttcacatcgggcttaagccgagggtaagagaccactacagagccacaaaggtggccttctggttggagcttgtgcctcatctacataatctgaatgaaattttccaatacgtctcgacgaccaccaaggtgcccccacccgatatgacttctttcccatatggaaccaggcggtcgcctgctaagatctggccgactacgaagcggccagccataacacccgctaacaatccaaagcacagcaaagaccctcacaagaccggtccagaggacactaccgtcctcattgagactaagcgcgactactccaccgagctgagcgtcacaatcgccgtcggggctagcctactctttctgaacattctagccttcgctgctctgtactacaagaaggataagagacgccacgagactcataggcgccctagtccccagagaaacaccacaaacgacattgcccatatccagaatgaagagataatgtcccttcaaatgaagcaactggagcatgaccatgaatgcgagtcccttcaggcgcacgacacactgagactgacatgcccccctgattacactcttacccttagaaggagcccagacgatatccctctcatgaccccgaacaccatcaccatgattcctaatacgctgacaggcatgcagcctctgcacaccttcaataccttttcgggcggacaaaactctactaatctgccccatgggcactcaacaacaagagtctag

SEQ ID NO: 100387 - DNA, 2451 bp, Artificial Sequence
  derived and/or modified sequence
atgtcaaggccccagggactgctttggctgcccctccttttcactccagtgtgtgtgatgctgaactccaacgtgttactttggctaaccgcactcgccattaagttcactctgatcgattcgcaggcacaatatcctgtggttaataccaattacggcaagatcagaggcctaagaaccccgctgcctaacgagatcttgggtcctgttgagcaataccttggggtcccctatgcctctccaccaacaggcgaaagaagatttcagcctcccgagcccccttctagttggacagggatcagaaatactacgcaattcgccgctgtgtgtccacagcaccttgatgagaggtctttattgcatgacatgttaccgatctggtttaccgctaatcttgatacactgatgacttatgtccaggaccagaatgaagactgcttgtacctcaatatctatgtgcctaccgaagacgatatacatgatcagaacagtaaaaagcccgtcatggtgtatattcatggtggatcatatatggaaggtacaggaaacatgatagacggttccattctggcatcctacggcaatgtcatagtcataactatcaactatcgcctcgggatccttggatttctatctactggtgaccaggctgctaagggcaattatggcttgttggaccagattcaggccttgcgttggattgaggaaaatgttggcgctttcggaggagacccgaagcgggtgactatcttcgggtcaggggctggcgcttcttgtgtgagccttctgaccctgtcacactactccgaaggactgttccaaaaagccatcattcagagtggcacagccttatccagttgggctgtgaattaccagcctgccaaatacaccagaatccttgccgacaaggtggggtgcaacatgctagatacaactgatatggttgagtgtctgcggaataagaactacaaggaactgatccagcagaccatcacccctgctacctatcatatagcctttggcccagtgatcgatggtgacgttatcccggacgatccccagattttaatggagcagggtgagtttctgaattatgacatcatgctgggcgtgaatcagggcgagggcctcaaattcgtcgatgggatagtggataacgaggacggagttactccaaatgacttcgatttctcagtgtcaaattttgtggataacctatacgggtatcccgaaggcaaagacacactaagagaaactattaaattcatgtatacagattgggcagataaggagaaccccgagaccaggaggaagaccctggtagccctcttcaccgatcaccagtgggtcgctccagccgtggccactgctgatctgcatgcccagtacggatcccccacttacttctacgctttttatcatcattgccagagtgaaatgaagccatcttgggctgacagcgcccacggcgacgaagttccctatgtcttcggaatccctatgatcgggccaactgagctcttttcatgcaatttctcgaaaaatgacgtcatgctgagtgcggtggttatgacctattggaccaatttcgcgaaaaccggtgacccaaatcaacccgtgccccaggacaccaaattcatccacaccaaacctaatcggttcgaggaagtggcttggtccaaatacaatcctaaagatcagctgtatctgcacatcggccttaagcccagagttcgggatcactaccgcgcaacgaaagttgccttctggctggaactggtcccacaccttcataacctcaatgagatcttccagtacgtcagtacgaccaccaaagtgccacctccagacatgacctcgtttccttatggcacaaggagatcgcccgctaagatttggcctacaacaaaacggccagccataactcccgctaataaccccaaacactcaaaggacccacacaaaacagggcctgaggacacaactgtcttaattgaaaccaagagagactacagcaccgagctgtctgtcaccatcgctgtaggggcatcgttgctgtttctgaatatcctggctttcgccgcactgtattataagaaggataagagaaggcacgaaacacatcgtcgaccatcacctcaacggaatacaactaatgacattgctcacatccagaatgaggaaatcatgtctctgcagatgaaacagctcgaacatgatcatgaatgtgagtctctgcaggctcatgacacactaagactcacttgccccccagactataccctcacccttcggaggagccccgacgatatccccctgatgacaccaaacactattacaatgatcccaaatacactcacaggcatgcagccgctgcatacatttaataccttctccggtgggcaaaacagcactaaccttccccacggtcactccacaacgagggtgtag

SEQ ID NO: 100388 - DNA, 2451 bp, Artificial Sequence
  derived and/or modified sequence
atgtcccgacctcagggcctgttgtggctgcctctactgtttacaccagtgtgtgtcatgctgaacagcaacgttctgctgtggctgaccgcacttgccataaaattcaccttgattgactcacaagcccagtatcccgtagttaacaccaattacggaaagatccgcggtctgcggacaccattgcctaacgaaattctgggcccagtggagcagtacctgggagtgccatacgccagcccgcctaccggagaacggagattccagcccccagaaccgcctagcagctggacgggaattagaaataccacgcagtttgcggctgtgtgcccgcaacaccttgacgaacggtccctattgcacgatatgctgccaatatggttcaccgccaatctggacaccctgatgacttacgtgcaggatcagaatgaagattgtctgtacctgaatatctacgtacctactgaggatgacattcacgaccaaaactccaaaaagcccgttatggtgtatatacacggcggatcatatatggaggggaccggcaacatgatcgacgggagtattctcgcgtcctacgggaacgtgatcgttataacgataaattacaggctcggtatcctggggtttctgagtaccggcgaccaggccgcaaaaggtaactacggcctattggatcagatccaggctttacgttggattgaggagaacgtgggagccttcggtggggaccccaaacgagtgacaattttcggcagcggcgcaggagcctcatgcgtctctcttttgaccctgtcacattacagcgaagggttattccaaaaagctattattcagagcggaacagctctgagttcttgggcagtgaactatcagcctgccaagtacacaaggatactcgcagataaagttggatgcaacatgctggacaccactgatatggtggaatgccttcggaacaaaaactataaggagctaatccagcagaccattacacctgcaacctatcacatcgcttttggccctgttatcgacggcgatgtgatacctgatgatccccagatactgatggaacagggtgagtttctcaattatgatattatgctgggcgtcaatcagggggaaggcctgaaattcgtggacggaatcgtcgacaacgaagatggcgtgacccctaatgactttgatttcagcgtatctaactttgtggacaacctgtacgggtatccggaggggaaggataccttgagagagacgattaaattcatgtataccgactgggccgataaggagaatcccgagacgagacgaaagaccctcgttgccctgtttactgaccaccagtgggtggccccagccgtggccaccgccgaccttcacgcgcagtacggaagtccaacatatttttacgcgttttatcatcactgccagtctgaaatgaaacccagctgggcggactcagcccacggggacgaggtcccgtacgttttcggtatccccatgattgggccaacagagctgttctcctgtaacttctctaagaacgatgttatgcttagcgccgttgtgatgacttattggactaattttgcgaagaccggcgacccaaatcaaccggtccctcaggataccaagtttattcacactaaacctaatagattcgaggaggtcgcttggtctaagtacaaccctaaggaccagctgtatctgcatatcgggttaaagcccagggtgcgagaccactaccgagcgacaaaggtagctttttggctagagctcgtgcctcatcttcacaatctgaacgagattttccagtatgtgagtaccactactaaggttccccctccggacatgacctctttcccgtacggtacacgcaggtcacccgcaaagatttggcctacaacaaaaagacccgctatcacacctgctaataaccctaaacactccaaagatcctcacaagaccggacccgaggatacaactgtgctgatagaaaccaagcgggactattccaccgagctgagcgtgaccattgccgtcggtgcgagcctgctgttcctgaatatccttgcgttcgcagccctgtattataaaaaggacaagaggaggcatgagacgcatcgcagaccttctccgcagcggaataccaccaacgacatcgctcatatccagaatgaagagatcatgtccctccagatgaaacagctggaacatgaccatgagtgcgaatctctgcaggcacacgacactctgaggttgacctgcccgccagattacactctgacactgcgacgaagccctgacgatatccctttgatgactcccaataccataactatgattccaaacactctcaccgggatgcagcccctgcacaccttcaacaccttttctggaggacagaactctacgaatctgcctcatggtcactctacaactcgggtgtag

SEQ ID NO: 100389 - protein, 641 aa, Artificial Sequence
  derived and/or modified sequence
MEILLIIRFCCNCTYALLYKPIDRVTRSTLVLHDLLKHTPVDHPDYPLLQDALRISQNFLSSINEDIDPRRTAVTTPKGETRQLVKDGFLVEVSESSRKLRHVFLFTDVLLCAKLKKTSAGKHQQYDCKWYIPLADLVFPSPEESEASPQVHPFPDHELEDMKMKISALKSEIQKEKANKGQSRAIERLKKKMFENEFLLLLNSPTIPFRIHNRNGKSYLFLLSSDYERSEWREAIQKLQKKDLQAFVLSSVELQVLTGSCFKLRTVHNIPVTSNKDDDESPGLYGFLHVIVHSAKGFKQSANLYCTLEVDSFGYFVSKAKTRVFRDTAEPKWDEEFEIELEGSQSLRILCYEKCYDKTKVNKDNNEIVDKIMGKGQIQLDPQTVETKNWHTDVIEMNGIKVEFSMKFTSRDMSLKRTPSKKQTGVFGVKISVVTKRERSKVPYIVRQCVEEVEKRGIEEVGIYRISGVATDIQALKAVFDANNKDILLMLSDMDINAIAGTLKLYFRELPEPLLTDRLYPAFMEGIALSDPAAKENCMMHLLRSLPDPNLITFLFLLEHLKRVAEKEPINKMSLHNLATVFGPTLLRPSEVESKAHLTSAADIWSHDVMAQVQVLLYYLQHPPISFAELKRNTLYFSTDV

SEQ ID NO: 100390 - DNA, 1926 bp, Artificial Sequence
  derived and/or modified sequence
atggagatcctcctgatcatcagattctgctgcaactgtacatatgcattactgtacaaacccatagatagagttacaagaagcacactggtgctgcatgaccttctaaaacacacacccgtggaccaccccgactatccactgcttcaagatgctctccgcataagccaaaactttctgtcttcgattaatgaagatattgatccacgccgcacagccgtaacaacccccaaaggtgaaacccgacagctggtgaaggacgggttcttggtggaagtcagtgaaagcagcagaaaattgagacacgtattcctgttcacagatgtgctgctatgcgctaagctgaagaaaacctctgctggcaaacatcagcagtatgactgtaagtggtatatcccattggctgatctcgtctttcccagtcccgaggaaagtgaggcttcacctcaggtccacccgttcccagatcacgaactagaggatatgaaaatgaagatatcagcactgaaatccgaaatccagaaagagaaagctaacaagggacagtcacgtgccatagagcgtctgaaaaaaaagatgtttgagaatgaatttctcctgctgctcaatagcccgacaattccgttcaggattcacaatcgcaacgggaagagctacctgtttctgctctctagcgattacgaacgatcagagtggcgggaggcaattcagaagcttcagaagaaagacctccaagctttcgtgttgtcctccgttgagctccaggtcctcacaggtagctgctttaaactgaggactgtccacaacatccccgtgacttccaataaagacgacgatgagagtccaggcttatacgggtttctgcatgtgatcgtccactccgcaaaggggttcaagcagtccgctaacttgtactgcactctggaagtggatagctttggctactttgtgtccaaggcaaagaccagagtctttagagacactgcggaacctaaatgggacgaggaatttgagattgaactcgagggatcgcaatctctgagaattctttgctatgagaaatgttatgacaaaacaaaggttaataaggataacaacgaaatcgtagataaaatcatggggaaggggcagattcagctggaccctcagaccgtggagacgaaaaactggcacacagacgtgattgagatgaacgggatcaaggtcgagttttcaatgaaattcacatccagagatatgtccttaaaaagaactccgtccaagaagcagaccggggtttttggtgtaaagatctctgtagtgaccaaaagggaacgttctaaagtgccatacatcgtgaggcagtgtgtggaggaagtggagaaacgaggtatagaggaggtcggcatctataggatatcaggggtggcaaccgacatacaggccctcaaggcagtgtttgacgcaaacaacaaggatattctgctgatgctgtccgatatggacattaacgctatcgcaggcactttgaagctctactttcgggaactgcccgagcctcttttgactgatcggctgtatcctgccttcatggagggcattgccctgtctgatcccgccgctaaagagaattgtatgatgcacttactgaggtccctcccggacccaaatctaattacctttctcttcttgctggagcatctaaaacgcgtggcagaaaaagagccaattaataaaatgagcctccacaaccttgctacagtttttggcccgactttgctacgaccgtctgaagtcgaaagcaaagcgcatctgactagcgctgccgatatctggtcacacgacgtgatggctcaggtgcaggtcctgctgtactatttacaacacccgcctatttcctttgctgaactaaaacgcaatactctctacttttctactgacgtgtag

SEQ ID NO: 100391 - DNA, 1926 bp, Artificial Sequence
  derived and/or modified sequence
atggagatcctgctgatcatccgcttctgctgcaactgcacctacgccctgctgtacaagcccatcgacagagtgaccaggagcaccctggtgctgcatgacctgctgaagcacacccctgtggaccacccagactaccccctgctgcaggatgccctgcgcatcagccagaacttcctgagcagcatcaatgaagatattgaccccaggagaacagctgtgaccacccccaagggggagacccggcagctggtgaaggatggcttcctggtggaggtgtctgagagcagcaggaagctgcggcacgtgttcctgttcacagatgtgctgctgtgtgccaagctgaagaagaccagcgctgggaagcaccagcagtatgactgcaagtggtacatccccctggccgacctggtgttccccagccctgaggagagcgaggccagcccccaggtgcaccccttcccagaccacgagctggaggacatgaagatgaagatcagcgccctgaagtctgagatccagaaggagaaggccaacaagggccagagccgggccatcgagcggctgaagaagaagatgtttgaaaatgagttcctgctgctgctgaacagccccaccatccccttccgcatccacaacagaaatggcaagagctacctgttcctgctgagcagtgactatgaaagaagtgagtggagggaggccatccagaagctgcagaagaaggacctgcaggcctttgtgctgagctctgtggagctgcaggtgctgaccggcagctgcttcaagctgaggacagtgcacaacatccctgtgaccagcaacaaggatgatgatgagagccctggcctgtatggcttcctgcacgtgattgtgcacagcgccaagggcttcaagcagagcgccaacctgtactgcaccctggaggtggacagctttggctactttgtgtccaaggccaagaccagggtcttccgggacacagctgagcccaagtgggatgaggagtttgaaattgagctggagggcagccagagcctgcgcatcctgtgctatgagaagtgctatgacaagaccaaggtgaacaaggacaacaatgagatcgtggacaagatcatgggcaagggccagatccagctggacccccagacagtggagaccaagaactggcacacagatgtgattgagatgaatggcatcaaggtggagttctccatgaagttcaccagccgggacatgagcctgaagaggacccccagcaagaagcagacaggagtgtttggagtgaagatctctgtggtgaccaagcgggagaggagcaaggtgccctacatcgtgcggcagtgtgtggaggaggtggagaagaggggcatcgaggaggtgggcatctaccgcatctctggagtggccacagacatccaggccctgaaggctgtgtttgatgccaacaacaaggacatcctgctgatgctgagtgacatggacatcaatgccatcgccggcaccctgaagctgtacttccgggagctgcctgagcccctgctgacagaccggctgtacccagccttcatggagggcatcgccctgagtgaccctgctgccaaggagaactgcatgatgcacctgctgcggagcctgcctgaccccaacctgatcaccttcctgttcctgctggagcacctgaagagggtggccgagaaggagcccatcaacaagatgagcctgcacaacctggccaccgtgtttggccccaccctgctgcggcccagcgaggtggagagcaaggcccacctgaccagcgctgctgacatctggagccatgatgtgatggcccaggtgcaggtgctgctgtactacctgcagcacccccccatcagctttgctgagctgaagaggaacaccctgtacttcagcacagatgtgtag

SEQ ID NO: 100392 - DNA, 1926 bp, Artificial Sequence
  derived and/or modified sequence
atggagatcctgctgatcatccggttctgctgcaactgcacctacgcccttttatataagcccatagatcgtgtgacccgcagtacactggtcctgcacgacctgctgaaacacacccctgtggatcaccctgactaccccctcctacaggatgcgctacgtattagccagaactttctatcctccatcaacgaagatatcgaccctcgacgcaccgctgtgacgacccctaagggggagaccaggcagcttgtcaaggacgggttcctcgtcgaggtttccgaatcatccaggaaactgaggcacgtcttcctcttcaccgacgttctgctgtgtgccaagctcaagaagacaagcgccggcaaacatcagcagtacgactgtaaatggtacattccacttgcagaccttgtctttccctctcccgaggagagcgaagcgagcccccaagtgcatccgttccctgaccacgagttggaggacatgaaaatgaagatctccgctttgaaaagtgagatccaaaaagagaaggctaataaggggcagtctcgggccattgaacggctgaaaaagaaaatgtttgagaatgaatttctgttgttactgaattcacctacaatcccatttcgcatacacaatagaaacggcaaaagctatctgttcctcctctcttccgattatgagcgttctgagtggcgggaagctatacaaaagctacagaagaaagacttgcaggcttttgtcctatcgtccgtcgaactgcaagttcttacagggtcatgctttaagctaagaactgtgcacaacatccccgttacctcgaataaggatgacgacgagtcgccagggctgtacggatttctgcacgtaattgtccatagcgccaagggatttaaacagtcagcgaatctctattgtaccctcgaagtagactcctttggttactttgtgtcaaaggctaagacacgcgttttcagagatacggccgagccgaaatgggatgaagaatttgaaatcgagctggaaggctcacagagtctgcgaatcctgtgttacgaaaagtgttacgacaaaaccaaagtcaacaaggataacaatgagatcgtggataagataatgggtaaaggccagatacaactggacccgcaaacagtggagactaagaactggcatacagatgtaatcgagatgaacgggattaaagtggagttctcaatgaaatttaccagtcgggacatgagtttgaagcgaacacctagcaagaaacagactggcgtgtttggggtgaagatctccgttgtgactaaaagagaacggagcaaagtgccatacatagtgcgacagtgtgtcgaagaggtcgaaaaaagagggattgaggaggtgggcatctatcgaatcagcggtgttgccactgacattcaggctttaaaagcagtgttcgacgccaacaataaggatatactgctgatgctgagtgacatggatataaacgctattgcgggcaccctgaaactgtatttccgtgagctgcccgaaccgcttctgactgacaggctgtatcctgctttcatggaagggatcgccttaagtgacccagccgcgaaggaaaactgcatgatgcacttgctgaggagtctaccagaccccaatctcatcaccttcctgtttctgctcgagcatctcaaaagagtggcagagaaggagcccataaataagatgagcctacataacctggccacagttttcgggcctaccttgctgcgcccttctgaggtggagagtaaggcacacctgacctctgctgcagatatatggtcccacgacgtaatggctcaggtgcaagttcttctttattacctccaacaccctccgatcagttttgcagagctgaaacgaaatacactctacttttctaccgacgtgtag

SEQ ID NO: 100393 - DNA, 1926 bp, Artificial Sequence
  derived and/or modified sequence
atggaaatactgctgattatccgcttttgctgcaactgtacctatgcactgctttacaagcctatcgatagagttacgaggtccacactcgtcctgcatgatcttctcaaacacacgcccgtcgatcatcccgactatcccctgttacaggacgccctgcgtatatctcaaaacttcctgtcatctataaatgaggacatcgatccacggaggaccgctgttactaccccaaagggagagacgagacagctggtgaaggatggattccttgtggaggtgagtgagagctcccgtaagttaaggcacgtgtttctcttcaccgatgtgctcctctgtgccaagttgaagaagacaagtgcaggcaaacatcagcaatatgactgtaagtggtatatccctctcgcggacttggtatttccaagccctgaagaatctgaggcaagtccacaggtgcatccgtttccagatcacgaactggaagacatgaagatgaaaatttccgctctcaagagtgaaattcagaaggaaaaggccaataaaggtcaaagcagggccatagaaagactgaagaagaagatgttcgaaaacgagttcctgctgctgctgaacagccctacaatccctttccgaattcataatcgtaatgggaagtcttatctatttcttctgagttctgattatgaaagaagtgagtggagagaggccatacagaagcttcaaaaaaaggatcttcaggcctttgtgcttagttctgtcgaattacaggtgctaaccggctcctgctttaagctgcgtaccgtgcacaacatacccgtgacatcaaataaggacgacgatgagagtcccggtctgtacgggttcctgcacgtgattgtccactcagccaaaggcttcaagcagagtgctaacctttactgcactctggaagttgattcttttggatactttgtttctaaggcaaaaacccgcgtcttccgcgataccgcggaacctaaatgggacgaggagtttgagattgagctcgaggggtcccagtcgttgagaatactctgctatgaaaagtgttatgacaaaacgaaggtcaataaagataataatgagatcgtggacaagatcatgggaaaggggcaaatacagctggatccccaaacagtagaaaccaaaaactggcatactgacgtaattgaaatgaacggaattaaggtggagttctcaatgaagtttaccagccgcgatatgtctctcaagcgtacgccaagcaaaaagcagactggtgtattcggggtcaaaatttcagtagtgaccaaaagagaaaggagcaaggtgccatacatcgtgagacaatgcgtagaagaggtggagaagcggggtatagaagaggtgggcatttacaggatctcaggggtggcaacagatattcaggctttgaaagcagttttcgacgcaaacaacaaggatatccttttgatgctgtccgacatggatattaacgcaattgccggtaccctgaagctgtactttagggagttacccgagcccctcctgaccgataggctgtatcctgcctttatggaaggtatcgccctgagcgaccctgcagctaaggaaaactgcatgatgcacctgcttagatctcttccggaccccaatctcattacctttctgtttctgctggaacacttaaagcgcgttgcggaaaaggaaccaatcaataaaatgtctctgcataaccttgccactgtcttcgggccaacacttcttaggccctcagaagtcgaatccaaggcccatttgacctcagctgccgacatctggtcccacgatgtgatggctcaagtgcaggtcctgctatattacctgcagcatcccccaattagcttcgcagaacttaaacgtaacaccctctatttctcaaccgatgtttag

SEQ ID NO: 100394 - DNA, 1926 bp, Artificial Sequence
  derived and/or modified sequence
atggagatcctgctgatcatcagattctgctgcaactgcacctacgccctgctgtacaagcccatcgacagagtgaccagaagcaccctggtgctgcacgacctgctgaagcacacccccgtggaccaccccgactaccccctgctgcaggacgccctgagaatcagccagaacttcctgagcagcatcaacgaggacatcgaccccagaagaaccgccgtgaccacccccaagggcgagaccagacagctggtgaaggacggcttcctggtggaggtgagcgagagcagcagaaagctgagacacgtgttcctgttcaccgacgtgctgctgtgcgccaagctgaagaagaccagcgccggcaagcaccagcagtacgactgcaagtggtacatccccctggccgacctggtgttccccagccccgaggagagcgaggccagcccccaggtgcaccccttccccgaccacgagctggaggacatgaagatgaagatcagcgccctgaagagcgagatccagaaggagaaggccaacaagggccagagcagagccatcgagagactgaagaagaagatgttcgagaacgagttcctgctgctgctgaacagccccaccatccccttcagaatccacaacagaaacggcaagagctacctgttcctgctgagcagcgactacgagagaagcgagtggagagaggccatccagaagctgcagaagaaggacctgcaggccttcgtgctgagcagcgtggagctgcaggtgctgaccggcagctgcttcaagctgagaaccgtgcacaacatccccgtgaccagcaacaaggacgacgacgagagccccggcctgtacggcttcctgcacgtgatcgtgcacagcgccaagggcttcaagcagagcgccaacctgtactgcaccctggaggtggacagcttcggctacttcgtgagcaaggccaagaccagagtgttcagagacaccgccgagcccaagtgggacgaggagttcgagatcgagctggagggcagccagagcctgagaatcctgtgctacgagaagtgctacgacaagaccaaggtgaacaaggacaacaacgagatcgtggacaagatcatgggcaagggccagatccagctggacccccagaccgtggagaccaagaactggcacaccgacgtgatcgagatgaacggcatcaaggtggagttcagcatgaagttcaccagcagagacatgagcctgaagagaacccccagcaagaagcagaccggcgtgttcggcgtgaagatcagcgtggtgaccaagagagagagaagcaaggtgccctacatcgtgagacagtgcgtggaggaggtggagaagagaggcatcgaggaggtgggcatctacagaatcagcggcgtggccaccgacatccaggccctgaaggccgtgttcgacgccaacaacaaggacatcctgctgatgctgagcgacatggacatcaacgccatcgccggcaccctgaagctgtacttcagagagctgcccgagcccctgctgaccgacagactgtaccccgccttcatggagggcatcgccctgagcgaccccgccgccaaggagaactgcatgatgcacctgctgagaagcctgcccgaccccaacctgatcaccttcctgttcctgctggagcacctgaagagagtggccgagaaggagcccatcaacaagatgagcctgcacaacctggccaccgtgttcggccccaccctgctgagacccagcgaggtggagagcaaggcccacctgaccagcgccgccgacatctggagccacgacgtgatggcccaggtgcaggtgctgctgtactacctgcagcacccccccatcagcttcgccgagctgaagagaaacaccctgtacttcagcaccgacgtgtag

SEQ ID NO: 100395 - DNA, 2357 bp, Artificial Sequence
  derived and/or modified sequence
ggaagagcactccggagcggctgcccgatgctggagtccgtgcggcagcatcagcaaggtggctgagtggccgggctgctggtgggcgccggggagcctggagcgatggctgcacgctcccgccgcggggacagaggctgccatggagattctcctcattattcgcttctgctgtaactgcacctatgctctgctctacaagcccattgaccgggtcactcggagcaccctagtcctacacgacctgctgaagcacacacctgtggaccaccccgactacccgctgctgcaggatgccctccgcatctcccagaacttcctgtccagcatcaacgaggacatcgacccccgccggactgcagtgacaacgcccaagggggagacgcgacagctggtgaaggacggcttcctggtggaagtgtcagagagctcccggaagctgcggcacgtcttcctctttacagatgtcctactgtgtgccaagctgaagaagacctctgcagggaagcaccagcagtatgactgtaagtggtacatccccctggccgacctggtgtttccatcccccgaggagtctgaggccagcccccaggtgcaccccttcccagaccatgagctggaggacatgaagatgaagatctctgccctcaagagtgaaatccagaaggagaaagccaacaaaggccagagccgggccatcgagcgcctgaagaagaagatgtttgagaatgagttcctgctgctgctcaactcccccacaatcccgttcaggatccacaatcggaatggaaagagttacctgttcctactgtcctcggactacgagaggtcagagtggagagaagcaattcagaaactacagaagaaggatctccaggcctttgtcctgagctcagtggagctccaggtgctcacaggatcctgtttcaagcttaggactgtacacaacattcctgtcaccagcaataaagacgacgatgagtctccaggactctatggcttccttcatgtcatcgtccactctgccaagggatttaagcaatcagccaacctgtactgtaccctggaggtggattccttcggctattttgtcagcaaagccaaaaccagggtgttccgggacacagcggagcccaagtgggatgaggagtttgagatcgagctggagggctcccagtccctgaggatcctgtgctatgagaagtgctatgacaagaccaaggtcaacaaggacaacaatgagatcgtggacaagatcatgggcaaaggacagatccagctggacccacaaaccgtggagaccaagaactggcacacggacgtgattgagatgaacgggatcaaagtggaattttccatgaaattcaccagccgagatatgagcctgaagaggaccccgtccaaaaagcagaccggcgtcttcggtgtgaagatcagcgtggtgacgaagcgggagcgctccaaggtgccctacatcgtccggcagtgtgtggaggaggtggagaagaggggtatcgaggaggttggcatctacaggatatcgggcgtggccacggacatccaggcgctcaaggccgtcttcgatgccaataacaaggacatcctgctgatgctgagtgacatggacatcaacgccatcgccgggacgctcaagctgtacttccgggaactgcccgagccgctcctcacggaccgactctacccagccttcatggagggcatcgccctgtcagaccctgctgccaaggaaaactgcatgatgcacctgctccgctccctgcccgaccccaacctcatcaccttcctcttcctgctggaacacttgaaaagggttgccgagaaggagcccatcaacaaaatgtcacttcacaacctggctaccgtgtttggacccacgttactgagaccctcagaagtggagagcaaagcacacctcacctcggctgcggacatctggtcccatgacgtcatggcgcaggtccaggtcctcctctactacctgcagcacccccccatttccttcgcagaactcaagcggaacacactgtacttctccaccgacgtgtagcccgaggcagggtggctgcgggcgggtggtggaaccagcccctccagcctggggtccaactcagacttgaaagactgcaatagaaaactcccaaacccagcactccagactcgagggaagccagcttccaagaactggaatgcgtacgtcttttgtgccaccttgtacaaagccggctgcccagccccagcctcaccaccgcatcccacctcctgccctccatacctctagttgtgtctgatgctccgtgctgttcgggaattgttttatgtacacttgtcaggcagaa

SEQ ID NO: 100396 - DNA, 1427 bp, Artificial Sequence
  derived and/or modified sequence
acgttcacatcaggtcccggcccgccggaacctgggcgatccacgatgccgagtttgccacgctgcgacagcccataggcttgcccccccgggcattcgggtggactacgaacacaaactgaagccctaggacttgtcgcccgtttgcgctctcgccgaggcacaggctgctcgcggaccaccctgctccgaaaactaagctgtccactgccaaggagatcatccagcactttaagggctgccctgcggacctagtggtgtgtgacggggctcctgatggctctgaacattgctacacatgtcctgaagccagggggctgctttgtggccaagatattccgaggccgggatgtgacgctcctctacagccagctgcaggtcttcttctccagcgtgctgtgtgccaagcccaggagcagccggaactctagcatcgaggccttcgctgtctgtcagggctatgaccctcccgagggcttcatcccggacctgagcaaacccctgctggaccattcttacgacccagatttcaaccagctggatggtcccacccgcatcattgtgccttttgtgacctgtggggacctgagctcctatgattcggaccgcagttacccactggacctagagggcggctcagagtacaagtacactccacccacacagccccccatctcgccaccataccaggaggcctgcacgttgaagaggaaggggcagctggccaaggagatccgcccccaggactgccccatcagcagagtggacacgtttccccagcccctggccgcccctcagtgccacaccctgctggcccctgagatggaagacaatgaaatgagttgttcaccttaacccattacgctggcaaactgatacaactcagaaactgctcaatgtcaggaaaaccggaacttgttgatgaacttgttttcaaaatatcatctcatcaacgaggcctggacaaacaagccctgaggagggatctgcaacaaccctgaagacaacaaggaaagaaaccatgaaagtctgtctgtactgcagtgggaattcttgagtgaggtcttacctcttctttaaacctcttcaggagtgtcctgattatgtccagaattttccctaaaggcagggattcttaacctggatagaagccaggggtaaccatgaacttgatggaagaaaatgttacatctttattttcagcaatgaaactgaaatttagccttactcccaagttataaatgctggcaacaaatcacagtagtaaaagcagtacctgggattttcccaccaatacaaaccagttacagcaactgtaatgtaacataaaaagggcatcttgaagtattgttcatatttgtcacctcttggaatgatagcagatcctgtaagttgatgtattaattaaaaagcccatatattactgc

SEQ ID NO: 100397 - DNA, 579 bp, Artificial Sequence
  derived and/or modified sequence
atggccttgaacatagcaacccacgtattgaaacccggcggctgtttcgtggccaagatatttaggggcagggacgtgacattgctgtactcacagctccaggtgttcttttctagcgtgctgtgtgctaagccgaggagtagcagaaacagtagtatcgaggcatttgcggtgtgtcagggttacgatcctccagaggggttcattcccgacttaagcaaaccgttactggaccactcctatgatcccgactttaatcaactggatggtccaaccagaatcattgtgccatttgtgacttgtggggacttatcttcttatgactccgacagatcctaccctctggacctcgaaggaggctccgaatataaatacaccccccccacgcagccacccatatcacctccctaccaagaggcttgcaccctgaagcggaaaggtcagttagccaaagagatccggccacaagattgtccgattagccgtgtggatacctttccacagcccctcgctgctccgcaatgtcacacactcctagcccctgagatggaagacaacgagatgtcctgttccccctag

SEQ ID NO: 100398 - DNA, 579 bp, Artificial Sequence
  derived and/or modified sequence
atggccctgaacatcgccacccacgtgctgaagccaggcggctgctttgtggccaagatcttccggggcagagatgtgaccctgctgtacagccagctgcaggtgttcttcagctctgtgctgtgtgccaagcccaggagcagcaggaacagcagcattgaggcctttgctgtgtgccagggctatgaccccccagagggcttcatcccagacctgagcaagcccctgctggaccacagctatgaccctgacttcaaccagctggatggccccacccgcatcatcgtgccctttgtgacctgtggggacctgagcagctatgacagcgacaggagctaccccctggacctggagggcggcagcgagtacaagtacaccccacccacccagccccccatcagccccccctaccaggaggcctgcaccctgaagaggaagggccagctggccaaggagatccggccccaggactgccccatcagccgggtggacaccttcccccagcccctggccgccccccagtgccacaccctgctggcccctgagatggaggacaatgagatgagctgcagcccctag

SEQ ID NO: 100399 - DNA, 579 bp, Artificial Sequence
  derived and/or modified sequence
atggccctgaacatcgccacccacgtgctgaagcccggcggctgcttcgtggcaaagatcttcagggggcgggacgtgacacttctgtattctcagctgcaggtattcttctcttccgtactgtgcgcaaagccgcgtagcagtaggaatagctcaatagaagcctttgcggtttgccagggttacgacccaccagaggggtttattcccgatctctctaaacctcttttagaccacagctatgacccagacttcaatcaacttgatggacccacgcggattatcgtgcctttcgtgacctgtggggatctttcttcttatgatagcgatcgcagctaccccttagatctcgaagggggttcggaatacaaatatacaccccctacacaacccccaatttcacccccttatcaggaagcttgcacactgaaacgcaagggccaactggcgaaggagatccggccccaggattgtcccatttcacgggtagataccttcccacaacctcttgcggcgccacagtgtcatacccttctcgccccagagatggaagataacgagatgtcgtgcagtccatag

SEQ ID NO: 100400 - DNA, 579 bp, Artificial Sequence
  derived and/or modified sequence
atggccttgaatattgcaactcacgtactgaaacctgggggttgtttcgtcgcaaagatcttccgaggtcgcgacgttaccctgctatactcgcagctgcaggtattcttcagtagtgtactatgtgcgaagccccgtagctcacggaactcatcaattgaggctttcgctgtttgtcaggggtatgaccccccagagggtttcatacctgacctgtctaagcccctgctcgaccactcctatgaccccgatttcaatcaactggacggacctactagaataatcgtgcccttcgtgacatgcggcgatctgtcttcctacgacagtgacaggagctatccccttgacttggagggaggaagcgaatataagtatactcctcccacccaaccccctataagcccaccataccaagaagcatgcactctcaagcggaagggacaactggctaaagagatacggccacaggattgtccaattagccgcgtcgacacatttcctcaaccccttgcagctccccagtgtcataccctgttggcgcctgagatggaggataacgaaatgagttgcagcccttag

SEQ ID NO: 100401 - DNA, 579 bp, Artificial Sequence
  derived and/or modified sequence
atggccctgaacatcgccacccacgtgctgaagcccggcggctgcttcgtggccaagatcttcagaggcagagacgtgaccctgctgtacagccagctgcaggtgttcttcagcagcgtgctgtgcgccaagcccagaagcagcagaaacagcagcatcgaggccttcgccgtgtgccagggctacgacccccccgagggcttcatccccgacctgagcaagcccctgctggaccacagctacgaccccgacttcaaccagctggacggccccaccagaatcatcgtgcccttcgtgacctgcggcgacctgagcagctacgacagcgacagaagctaccccctggacctggagggcggcagcgagtacaagtacaccccccccacccagccccccatcagccccccctaccaggaggcctgcaccctgaagagaaagggccagctggccaaggagatcagaccccaggactgccccatcagcagagtggacaccttcccccagcccctggccgccccccagtgccacaccctgctggcccccgagatggaggacaacgagatgagctgcagcccctag

SEQ ID NO: 100402 - DNA, 234 bp, Artificial Sequence
  derived and/or modified sequence
atgttccaccccaacgtgtacgccgacggcagcatctgcctggacatcctgcagaacagatggagccccacctacgacgtgagcagcatcctgaccagcatccagagcctgctggacgagcccaaccccaacagccccgccaacagccaggccgcccagctgtaccaggagaacaagagagagtacgagaagagagtgagcgccatcgtggagcagagctggagagactgctag

SEQ ID NO: 100403 - DNA, 234 bp, Artificial Sequence
  derived and/or modified sequence
atgttccatcccaatgtgtatgctgacggaagcatctgtttagacatcctgcagaataggtggtctcccacctacgatgtgtcctcgattctcaccagcatccaatctctcctggatgagccaaaccctaactccccagccaatagtcaggccgcccaactttaccaggagaataaaagggagtacgagaaaagagtgagcgcgatagtggagcagtcctggcgcgattgctag

SEQ ID NO: 100404 - DNA, 234 bp, Artificial Sequence
  derived and/or modified sequence
atgttccaccccaacgtgtatgcagatggcagcatctgcctggacatcctgcagaaccgctggagccccacctatgatgtgagcagcatcctgaccagcatccagagcctgctggatgagcccaaccccaacagccctgccaacagccaggccgcccagctgtaccaggagaacaagcgggagtatgagaagagggtgtctgccatcgtggagcagagctggagggactgctag

SEQ ID NO: 100405 - DNA, 234 bp, Artificial Sequence
  derived and/or modified sequence
atgttccaccccaacgtgtacgccgacggcagcatctgcctggacatattacagaaccggtggtcacctacctatgatgttagttcaatcctgacgtcaattcagtccttgctcgacgagcctaaccctaactcccctgctaattcacaggctgcacagctgtaccaagaaaataaacgggagtacgagaaacgcgtttccgcaattgtggagcaatcttggcgagattgctag

SEQ ID NO: 100406 - DNA, 234 bp, Artificial Sequence
  derived and/or modified sequence
atgtttcatccaaacgtttatgctgacggatcaatctgtctggatattctgcagaatagatggtcccctacgtatgacgtcagttcaatccttactagtatacaatctttgcttgatgaaccaaatcccaactcgccagctaattctcaggccgctcagttatatcaggaaaacaaacgagagtacgagaaacgcgttagcgccattgtggaacagagttggcgagactgctag

SEQ ID NO: 100407 - DNA, 2643 bp, Artificial Sequence
  derived and/or modified sequence
tagtcttctctctttcttaagcagtgataaaccttttaatgagaacaaaaaggaaataaattgctaactctgaaggaaccagtaagaaatacactgaagtatggtctgttgttttagaataatttgttaaatggaccagagtaatatagtggaacatgcatcaccttataccatatagtaactgattcttctaagtttacttgaacagatttcagtcaggaaaaaacattgctcaattgtgttcttcaatttattcaacaaacaattgaaaataatattttaaaggacataatctcttcatatcacatcttaacaattcttgaatgagatccagtttgtccatgccttgtaagtaagtttataacctactatgctttagggcctcctgctaccttaggttgacatatatttaagaaaaataatttcatttcaatagtagcataaacattagaaaaataaatttgctggaaacatgaatgcaatctaaaccaaatgtgattttaaaattatttctgccattaattccctccatatgtgtgaataattgagttgattttatagtgaagtaccttatgagccatacttaagggtttctgagagggactatgaagtttttcctggcttaaattcaattaagttttcattatagggtcactatgacatgaaaaggaaccagtatgaacacttttatacttattcccttctattttaaaaataacttgattatggatttgtattctggcattggtttttgaaccattgtgctttcattctttctagtctgtctaaaaatcactggagcgtttaagatggcagctgactaacataggcctttgaggtcttttggtcttctaaaggaagaaggccaaattttgggcccagtttcttaaggatgttttcaaaatgtacagtggctaaaatcttgtaagcagtaattttgtgtttatgatggctgtctccaagtttgggggaaaataatggcaaaacaaaaaatcacatttgagtagttcttagagcaattcctagagatgtatttcttacctggcctttcctctctaccctgtatctttgcattatttaatacttggaaaaacccacatagcattaaaaacaaagtactactgaacaaagtgataaatacattttcttaaatctttcttttctaaccacaggaacatttaaacttacaatagaattcactgaagaatatccaaataaaccacctacagttagatttgtctctaagatgttccatccaaatgtctatgcagatggtagtatatgtctggacatacttcagaaccgttggagtccaacctatgatgtgtcttccattctaacatccatacagtctctgttggatgaacccaatcccaatagtccagcaaacagccaggctgctcagctgtaccaggagaacaaacgggaatatgaaaagcgtgtttctgcaatagtagaacaaagctggcgtgattgttgaccccgggtacagtttaaagaagctggccataagaaaaatatatattgatgtgtttgtcacctccctactcctgtcattacatttactttattaaaagcaaaataactgttgtgctgtttccatcttccttgccaagttttcctaccccttctaccctctccttaaacatcagaaaacaccctctatgaaatcaaatgtactgtacctgggttacttgcaaaaattactaatgcttcagtttttctgttgtatttcatttccagttttcaggcagttatttttattattgtactttaagcttttaagatgaattgttatacaagaggtgcttatgcttagcttgatgaccaggatgttatttttaacaaaatgattgctgaagtgtttcatcctggctggtccttcacttgtgttggatttagaagtgaatgtgtttggaatatggcctacagagaatagaaacaaatccatgtaaacaattttgaaggaggcatgggagctaaaaatcctgtgatactaagatctcagtcatatgaattacaacgtagtatttactggcaagaaggagaaagttgaaggactcagctaaaggagtacagcaattgtagtaactgacacatcctctctttgcaagctgctgactgggcacactcatgccaagtttcagaattattggtcttctgggtttttgctttttaaaagaggtgtgggagcagaggaatggaaacaatcgtgagtttttgagctagggaaagttggagctcctttaatctttttaaaggatcagtgctgccctaagtgaataaactcaattgtccatctttattttagagttttaatgaattcaaggaagggagcatagcatatctgtggcaaactattttccactcaaatcctgagttattgctgcatgctttaatttcttccctttcagcatctgagaaccttaaagccaatgtctgcgatctttttttggatatttatacttttagatatatagtacctttaagtagcagtatgggacaaggcttgtaaatgttttgtctaatgttctattgtcaccttttatgcatttatcacttccaaatctaactttgcacaagtaacccatgtaaaaaaaaatgtacatttttcaaaagttgtaaataaaaataaccttaaaa

SEQ ID NO: 100408 - DNA, 2241 bp, Artificial Sequence
  derived and/or modified sequence
atggactttctggaggagcctatacccggcgtcggtacctatgatgattttaatactatagactgggtgagagagaagtctagggaccgagatcgccaccgcgagattactaataagtcaaaggaaagtacttgggctctcattcattccgtgtcggatgctttcagtggctggctgctcatgttgttgataggcctactgtctgggtctttggcgggcttgatcgacatctcggcacattggatgactgatttgaaagagggtatctgcaccgggggcttttggttcaatcacgagcattgttgttggaatagcgagcacgtcaccttcgaagagcgggacaagtgtccggaatggaactcctggtcccagctgatcatttcaactgacgagggggccttcgcatacatagtgaattacttcatgtacgtgctttgggccctcctgtttgccttcttggcggtctctctggtgaaagtattcgctccgtacgcatgtggctccgggatccccgaaattaaaacaattttgtcaggtttcatcatccgtggttacctgggcaagtggaccctagtgattaagaccatcaccctcgtgcttgctgtgagttcaggcctctccctggggaaagaaggccccctcgtccacgtggcctgttgctgtggtaatattctgtgccactgttttaataagtataggaagaacgaagccaagagaagggaggtattgagtgccgcagctgccgctggagtgtctgtggcctttggcgccccaatagggggagtcctgtttagcctagaggaggtgagttactactttccactgaaaactctgtggagatcattcttcgccgcactcgtagccgcctttactctgaggtctattaatcccttcggaaattcgcggctggttctgttctatgtcgaattccatacgccgtggcatcttttcgaactggtgccatttattctgctgggaatcttcggtgggctttggggcgccctgttcatcaggactaatattgcttggtgtcgcaaacgcaaaactacccaattaggcaaatatcccgtcattgaagtgttagttgtcacggcgattaccgcgatcctggcattccccaacgagtatacacgaatgtccacttcagaactcatctcggaacttttcaacgattgtggacttctcgattcatccaaactgtgtgactatgaaaatcggtttaatactagcaagggcggtgaactgccagacagacccgctggcgtaggcgtctacagcgctatgtggcagttggccctcaccctgattctgaagattgtaatcaccatcttcactttcgggatgaaaattccatcgggtctgtttattccttcaatggccgtgggggcaatagccggcaggctgctgggcgtagggatggaacagctggcttactaccatcaagaatggacagttttcaatagctggtgcagccaaggagcagattgtattactcctggcctttacgctatggtgggcgcagctgcctgcctgggaggagtgacacggatgaccgtgagccttgtagtcattatgtttgagctgactggtgggcttgagtatatcgtgcctcttatggctgctgccatgacctcaaagtgggtcgcggatgcactgggccgcgaagggatctatgatgcacatatccgtttgaacgggtacccattcctggaggcgaaggaggagttcgcccataagacactggccatggatgtgatgaagcccaggcggaatgacccactacttacagtcttaactcaagattctatgaccgttgaggacgttgaaaccatcatctccgaaactacctattcaggtttccctgttgtggtctccagggagtcccagcgactcgttggctttgttctgagacgggatcttattatctccatcgagaatgcccgaaaaaaacaggatggggtagtgagtacatcaattatttacttcacagagcattctccccccctgcccccctatacgccgcctactctcaagctgcggaatatcctggacctgtccccttttactgttactgacctcacacccatggagatagtcgttgatatctttcggaaactggggctgcggcagtgcctggtgacccacaatggacgcctactcgggatcataaccaaaaaagacgtactaaaacacatcgcacagatggccaatcaggaccccgacagtatcctgtttaattag

SEQ ID NO: 100409 - DNA, 2241 bp, Artificial Sequence
  derived and/or modified sequence
atggacttcctagaggaacctattcctggtgtgggaacttacgacgacttcaacaccatcgattgggttcgggaaaaatcccgggacagagacaggcatcgggagatcacaaataaatccaaagagtcgacttgggccttgattcattcggtgagcgacgccttttccggctggctgcttatgttgctcatcgggctgctaagtggatccctggctggcctaatagatatttcagcccattggatgacagatttgaaggagggtatctgcactggagggttttggttcaaccacgagcattgctgttggaacagcgagcatgtcacatttgaagaaagggacaagtgcccggagtggaatagctggagtcagcttatcatctccacagacgagggagcattcgcctacatcgtgaactattttatgtatgtgttatgggccctactatttgcttttcttgccgtttcactcgtgaaagtctttgcaccttacgcctgcggtagcggcatcccggagataaagacgatcctctctgggtttataattcggggatacctgggcaaatggaccttagtaattaaaactatcaccctggtgcttgctgtctcatcgggcttatcactgggcaaggagggacccttggtgcacgtcgcgtgttgctgcggcaatatattgtgccactgttttaacaaatatagaaagaatgaggcaaaacggagggaagtgctcagtgctgcagccgccgcaggtgtctctgtggccttcggcgcgccaattggaggagtgctcttctccttggaggaggtttcctactattttccccttaaaactctctggcgatccttctttgctgccttggtggctgcctttacccttcgctccataaacccctttggcaattcacgcctagttctgttctacgtggagttccataccccgtggcacctttttgaactcgtgccattcatcctgcttggcatcttcgggggcctgtggggagctctgtttatccgtacaaacatcgcttggtgtcggaaaagaaagactacccagctaggaaagtacccagtgatcgaagtgctggtggtgacggccattaccgccattctcgctttcccaaacgagtatacacgtatgtccacatcggaactgatttccgagctctttaacgattgtggactcctcgacagttccaaactttgtgactacgagaaccggtttaatacttcaaaaggaggagagctgcccgaccggccggcgggagttggtgtgtacagcgctatgtggcagctggccctgaccttgatcctgaagatcgtgatcaccatttttacttttgggatgaagatcccttccggtctttttataccctctatggctgtgggtgccattgccggacgactcctgggcgtgggtatggagcagctggcatactatcatcaagaatggacggtcttcaattcctggtgcagtcagggagccgattgcataacacctggattatacgctatggtcggagcagccgcgtgcttagggggagtcacacggatgacagtgtcattggtggtgatcatgttcgagttgaccgggggcttagaatatattgtgcccctgatggccgctgccatgacatccaaatgggttgcagatgccttaggaagggaagggatttacgacgctcatattaggctgaacggctacccgtttcttgaggcaaaagaggagtttgcgcacaaaacattggccatggatgtaatgaaacctagacgtaatgacccactcttaactgtattgacacaggattcgatgacagtggaggatgtggagactatcatttcagagacaacttactctggatttcctgtagtcgtaagcagagaaagtcagcggttggtgggctttgtgctgcggcgggatcttatcatctcaattgagaacgcccggaagaaacaagacggagtcgtgagtacatccattatttatttcacagagcacagcccacccctccctccctacaccccacccacattgaaactccggaacatcctggacctaagtccatttacagtcactgacctaacacctatggaaatcgtggtggatatttttcgcaagcttggactccgacagtgccttgttactcacaacgggaggttactcggcattataaccaaaaaggacgtgctcaaacacattgcgcaaatggcaaatcaagaccctgacagcattctgtttaattag

SEQ ID NO: 100410 - DNA, 1947 bp, Artificial Sequence
  derived and/or modified sequence
atgaatatcgtggctggtactttatccatgtctccccttaaaagggacaagtgccccgagtggaacagttggtcacagctcattatatctactgacgaaggtgccttcgcgtacatagtcaactacttcatgtatgtgctgtgggcccttctgtttgccttcctggctgtttcactcgtcaaggtctttgcaccctatgcctgtgggtccggaatccccgagatcaaaaccatactttccgggttcatcatcagagggtatttgggtaaatggaccctggtgattaaaaccattacgctggtgctggctgtgtccagcggactgtccctgggcaaagagggccccctggtacatgtggcctgctgctgtggcaacatcttatgtcactgtttcaacaaatatcgcaagaatgaggcgaagcgtagggaagtgttgtctgccgccgcagccgcaggggtgtccgtagcatttggcgctccgatcgggggcgtcctttttagtttagaggaggtgtcatactactttcctttgaagaccctctggcggagtttctttgccgccttggtcgccgcatttacactgaggtccattaatccattcggcaattctcgccttgtgcttttctatgtcgaatttcatactccttggcacctattcgagctagtcccattcattctcctgggcattttcgggggactgtggggtgctttattcattcgcacgaatattgcgtggtgccgaaagaggaaaacaactcagctgggtaaataccctgtgattgaagttctggtggtaacagccatcaccgcgatcctggcattcccaaatgagtatactcggatgtcgacaagtgagttgataagcgaactgttcaacgactgtggactactggacagcagcaaactatgcgattacgagaacaggttcaatacgagtaagggcggggagctgcctgaccgacctgctggagtgggagtgtacagtgctatgtggcagttggctcttacactcatcttgaagatagtcatcactatcttcacatttggcatgaagataccttccgggctgttcataccgtccatggccgtcggggcaattgctggtcgactgttgggtgtggggatggaacaactagcctactaccatcaggagtggaccgtatttaactcttggtgctcacagggagccgactgcattaccccagggctgtacgccatggtcggcgccgccgcttgcttgggcggagtgactaggatgacagtgagcctggttgtcattatgtttgagctaacaggtggcctggaatacatcgtgcctctgatggccgcagccatgactagtaagtgggtcgccgacgcactgggtcgcgagggaatctacgacgcccacattagactgaacggttatccattcttagaagccaaggaagaattcgctcacaagactctggcaatggacgtcatgaagccccgacgcaatgaccccctcctgacagtcctaacccaggattctatgacagttgaggatgtagagacaatcatctcagaaaccacctactcaggatttcccgtagtggtatcacgcgagagccaaagactggtgggctttgtcctccggcgagacctaattatctctattgagaacgcaaggaaaaagcaggacggcgtggtatccacaagtattatttactttactgagcattctcctcccctgcccccatacacccccccgactttgaaactgcggaatattctcgacttaagccctttcacagtgacggatttaacacccatggaaattgtggttgacatcttccggaaactgggccttcgccaatgcctggtgacccacaacggtagactgctgggcattatcacgaaaaaagatgtgctaaaacacattgcccaaatggccaaccaggatccagattctatcttgtttaattag

SEQ ID NO: 100411 - DNA, 2241 bp, Artificial Sequence
  derived and/or modified sequence
atggacttcctggaggagcccatccctggggtgggcacctatgatgacttcaacaccatcgactgggtgcgggagaagagccgggaccgggacagacaccgggagatcaccaacaagagcaaggagagcacctgggccctgatccacagcgtgtctgatgccttcagcggctggctgctgatgctgctgattggcctgctgagcggcagcctggccggcctgattgacatcagcgcccactggatgacagacctgaaggagggcatctgcacaggaggcttctggttcaaccacgagcactgctgctggaacagcgagcacgtgacctttgaggagcgggacaagtgcccagagtggaacagctggagccagctgatcatcagcacagatgagggcgcctttgcctacatcgtgaactacttcatgtatgtgctgtgggccctgctgtttgccttcctggccgtgtccctggtgaaggtgtttgccccctatgcctgtggcagcggcatccctgagatcaagaccatcctgagcggcttcatcatccggggctacctgggcaagtggaccctggtgatcaagaccatcaccctggtgctggccgtgagcagcggcctgagcctgggcaaggagggccccctggtgcacgtggcctgctgctgcggcaacatcctgtgccactgcttcaacaagtacaggaagaatgaggccaagagaagagaggtgctgtctgctgctgctgctgctggggtgtctgtggcctttggagcccccatcggcggcgtgctcttcagcctggaggaggtgtcctactacttccccctgaagaccctgtggaggagcttctttgctgccctggtggccgccttcaccctgcggagcatcaaccccttcggcaacagccggctggtgctcttctacgtggagttccacaccccctggcacctgtttgagctggtgcccttcatcctgctgggcatctttggaggcctgtggggcgccctcttcatccgcaccaacatcgcctggtgcaggaagaggaagaccacccagctgggcaagtaccctgtgattgaggtgctggtggtgacagccatcacagccatcctggccttccccaatgagtacaccaggatgagcaccagcgagctgatcagcgagctgttcaatgactgtggcctgctggacagcagcaagctgtgtgactatgagaaccgcttcaacaccagcaaaggaggagagctgcctgacaggcctgctggggtgggcgtgtacagcgccatgtggcagctggccctgaccctcatcctgaagatcgtcatcaccatcttcaccttcggcatgaagatccccagcggcctcttcatccccagcatggctgtgggcgccatcgccggccgcctgctgggcgtgggcatggagcagctggcctactaccaccaggagtggacagtgttcaacagctggtgcagccagggcgctgactgcatcaccccaggcctgtatgccatggtgggcgccgccgcctgcctgggcggcgtgaccaggatgacagtgtccctggtggtgatcatgtttgagctgactggaggcctggagtacatcgtgcccctgatggctgctgccatgaccagcaagtgggtggctgatgccctgggccgggagggcatctatgatgcccacatccggctgaatggctaccccttcctggaggccaaggaggagtttgcccacaagaccctggccatggatgtgatgaagcccaggagaaatgaccccctgctgactgtgctgacccaggacagcatgacagtggaggatgtggagaccatcatcagcgagaccacctacagcggcttccctgtggtggtgtcccgggagagccagaggctggtgggctttgtgctgcggcgggacctgatcatcagcattgaaaatgccaggaagaagcaggatggagtggtgtccaccagcatcatctacttcacagagcacagcccccccctgcccccctacaccccacccaccctgaagctgaggaacatcctggacctgagccccttcaccgtgacagacctgacccccatggagatcgtggtggacatcttcaggaagctgggcctgcggcagtgcctggtgacccacaacggccgcctgctgggcatcatcaccaagaaggatgtgctgaagcacatcgcccagatggccaaccaggaccctgacagcatcctcttcaactag

SEQ ID NO: 100412 - DNA, 1947 bp, Artificial Sequence
  derived and/or modified sequence
atgaacatcgtggccggcaccctgtccatgagccccctgaagagggacaagtgcccagagtggaacagctggagccagctgatcatcagcacagatgagggcgcctttgcctacatcgtgaactacttcatgtatgtgctgtgggccctgctgtttgccttcctggccgtgtccctggtgaaggtgtttgccccctatgcctgtggcagcggcatccctgagatcaagaccatcctgagcggcttcatcatccggggctacctgggcaagtggaccctggtgatcaagaccatcaccctggtgctggccgtgagcagcggcctgagcctgggcaaggagggccccctggtgcacgtggcctgctgctgcggcaacatcctgtgccactgcttcaacaagtacaggaagaatgaggccaagagaagagaggtgctgtctgctgctgctgctgctggggtgtctgtggcctttggagcccccatcggcggcgtgctcttcagcctggaggaggtgtcctactacttccccctgaagaccctgtggaggagcttctttgctgccctggtggccgccttcaccctgcggagcatcaaccccttcggcaacagccggctggtgctcttctacgtggagttccacaccccctggcacctgtttgagctggtgcccttcatcctgctgggcatctttggaggcctgtggggcgccctcttcatccgcaccaacatcgcctggtgcaggaagaggaagaccacccagctgggcaagtaccctgtgattgaggtgctggtggtgacagccatcacagccatcctggccttccccaatgagtacaccaggatgagcaccagcgagctgatcagcgagctgttcaatgactgtggcctgctggacagcagcaagctgtgtgactatgagaaccgcttcaacaccagcaaaggaggagagctgcctgacaggcctgctggggtgggcgtgtacagcgccatgtggcagctggccctgaccctcatcctgaagatcgtcatcaccatcttcaccttcggcatgaagatccccagcggcctcttcatccccagcatggctgtgggcgccatcgccggccgcctgctgggcgtgggcatggagcagctggcctactaccaccaggagtggacagtgttcaacagctggtgcagccagggcgctgactgcatcaccccaggcctgtatgccatggtgggcgccgccgcctgcctgggcggcgtgaccaggatgacagtgtccctggtggtgatcatgtttgagctgactggaggcctggagtacatcgtgcccctgatggctgctgccatgaccagcaagtgggtggctgatgccctgggccgggagggcatctatgatgcccacatccggctgaatggctaccccttcctggaggccaaggaggagtttgcccacaagaccctggccatggatgtgatgaagcccaggagaaatgaccccctgctgactgtgctgacccaggacagcatgacagtggaggatgtggagaccatcatcagcgagaccacctacagcggcttccctgtggtggtgtcccgggagagccagaggctggtgggctttgtgctgcggcgggacctgatcatcagcattgaaaatgccaggaagaagcaggatggagtggtgtccaccagcatcatctacttcacagagcacagcccccccctgcccccctacaccccacccaccctgaagctgaggaacatcctggacctgagccccttcaccgtgacagacctgacccccatggagatcgtggtggacatcttcaggaagctgggcctgcggcagtgcctggtgacccacaacggccgcctgctgggcatcatcaccaagaaggatgtgctgaagcacatcgcccagatggccaaccaggaccctgacagcatcctcttcaactag

SEQ ID NO: 100413 - DNA, 2241 bp, Artificial Sequence
  derived and/or modified sequence
atggacttcctggaggagcccatccccggcgtgggcacctacgacgatttcaatacaattgattgggtgagggaaaagagtcgcgaccgggaccgccatagggagattaccaataaaagcaaagagtccacgtgggccctgatacacagtgtgtctgacgcttttagcggctggctcctgatgctgctgatcggcctgctgagcggctcgctcgccggcctaattgacatctctgcgcactggatgactgatctgaaggaaggcatctgcacgggagggttctggttcaatcacgaacattgttgttggaacagtgagcacgtgacattcgaggagcgcgacaagtgtcccgaatggaacagctggagtcaactcatcattagcactgatgaaggagcctttgcttacatcgtgaattatttcatgtacgttctgtgggccttactcttcgcattcctggctgtgagcctcgtcaaggtcttcgcaccctacgcctgcggcagtggaatcccggagataaaaacaatcctgtcaggctttataattagaggttatctcggtaagtggaccctggttatcaagacaatcacactagtgctcgccgtaagctccggactcagcttgggtaaggagggccccttagtacacgtggcttgctgctgtggcaatattttgtgccattgtttcaacaagtacaggaaaaacgaggccaagcgacgggaagtgctctccgccgcggcagcggctggagtgagcgttgcgttcggcgcgccaataggcggagtattgttctctctagaggaagtttcttattactttcccctgaaaactctatggcgctcttttttcgccgctctggtggctgcttttacactgcggtcaataaaccccttcgggaattcacggctggtgctcttttacgtagagtttcatacaccttggcacctttttgaactagtcccctttatcctgttggggatttttggagggctctggggtgccctgttcattcggactaacattgcgtggtgccggaaacgcaagaccactcagctcggcaagtatcccgtaatcgaagtgctcgtcgtgactgcgatcaccgcaatcctggccttccccaacgaatacacgcgaatgtcaacttctgagcttatttccgaactgtttaatgattgcggtctgctggactcatcaaagctctgcgactatgagaacaggttcaacacctcaaagggtggggaattgcctgaccggcccgctggtgtgggtgtctattcagccatgtggcagctagcgctgactctgatccttaagatcgtgattactattttcacttttgggatgaaaatcccttctggcttatttatcccatctatggctgtcggcgcaatcgccggccgactgctgggcgtgggcatggaacagctggcctactatcaccaagaatggactgtattcaatagctggtgctcccagggagcagattgcattacaccggggttgtatgccatggtcggcgctgccgcctgtcttggcggagtgactagaatgaccgtttcccttgtcgttataatgtttgagctaactggcggattagagtatatcgtgcctttaatggcagctgcaatgaccagcaaatgggtcgcggatgcattggggagagaaggtatttacgatgctcatattcggcttaatggataccccttcttggaggctaaagaagagtttgcgcacaagaccttggctatggacgtgatgaagcctcgcaggaatgacccgctgcttacagtgttgactcaggatagcatgactgtggaagatgtggagacgatcatctctgaaacgacctattccggattccctgtggtcgtgagtcgcgagagccaaaggctggtcggctttgttttgaggcgagacctgattatttcgatagagaacgccagaaagaaacaagacggtgtagtgagcaccagtattatctattttactgagcacagccctcccctgccgccttacactcccccaacactcaagctgcgcaacatcctggatctcagccccttcaccgtgaccgatctgacccccatggagattgtggtagatatttttcggaaattgggcctgagacagtgtctggtgacgcataacgggagattgctgggcattattaccaagaaggatgtgctgaaacatattgcacaaatggccaaccaggaccccgatagtatccttttcaattag

SEQ ID NO: 100414 - DNA, 2241 bp, Artificial Sequence
  derived and/or modified sequence
atggacttcctggaggagcccatccccggcgtgggcacctacgacgattttaatacgatcgactgggttcgggaaaagtctcgggatagggatagacaccgggagatcaccaataagtcgaaagagtccacctgggctcttattcatagtgtatctgatgctttctctggatggttgcttatgcttttgatcggattactgagtggaagtctggccggattgattgacattagtgcccactggatgaccgaccttaaagaggggatatgtacgggcggcttttggtttaaccatgagcattgttgctggaattctgaacatgttaccttcgaggagcgagataaatgccctgagtggaattcttggtcacaactcatcatctccacggatgagggcgctttcgcttacatagttaactatttcatgtacgtgctgtgggcacttctgtttgctttcctggcagtctcattggttaaggtattcgcaccatacgcatgtggcagcggaatacccgaaattaagactatcctgtcgggattcatcatcaggggttatttagggaaatggactttagttattaaaacaattaccctagtccttgccgttagcagtggcctgtcccttggcaaggagggccctctcgtacacgtagcctgctgctgcggcaatatattgtgtcactgcttcaataagtatcgaaaaaatgaggcaaagagacgcgaggtgctgtcagccgcagccgcagcaggggtaagcgtggcattcggcgctcctatagggggcgtccttttcagtctcgaagaggtgtcctattactttccgctaaagactctttggagatctttttttgctgccttggtggcagccttcactcttagatccatcaatccattcgggaattctcggcttgtgctgttttacgtcgaattccatactccatggcacctctttgagctcgtgcccttcatcctgctgggaatcttcgggggcctgtggggcgccttattcatccgtactaatatcgcatggtgcagaaagaggaagaccacccagcttggaaagtatcctgtaattgaggtcttagtggtgactgctatcacggcgatccttgcgtttccaaatgaatacacaagaatgtctacaagcgaactgattagcgaactatttaatgattgcgggttgttagactcaagtaaactctgtgactatgagaataggttcaacacttcaaaagggggcgaactgccagatcggccagctggggttggtgtgtatagcgctatgtggcagttggcacttacgttgatcctcaagatagtgataaccatcttcacttttggaatgaagatcccatcaggactgtttatccccagtatggcggttggagcaatcgctggcaggctgctgggcgtcggcatggagcaactggcctattatcatcaggaatggacggtcttcaactcgtggtgctcccagggagctgactgtatcactcccgggctatacgcaatggtgggcgccgccgcatgtctcggtggggtgacaagaatgaccgtgtccctggtcgtaattatgtttgagcttacaggaggactcgagtacatagtcccccttatggcagcagccatgacttccaagtgggtggctgatgccctcggccgggaaggcatatacgatgcccacatccgcctgaatgggtatcctttcctcgaggcaaaggaggagttcgcacacaagacgctagccatggatgtcatgaagcccaggcgcaatgacccacttctcactgtcttaacacaagattccatgacagtggaggatgtcgagaccatcataagtgaaacaacatatagcggtttccctgtcgtcgtgtcaagagagagtcagagactcgtgggatttgtgctgaggcgcgatctgattatcagcatcgagaacgcccgtaagaagcaagacggagtggtgtcgacctctattatctacttcactgaacatagtcctcctctccccccctacacaccccctaccctcaaacttagaaacatcttggacctgtcaccattcactgtgaccgatctcactccaatggagatcgtggtggatattttccgcaaactgggactgaggcaatgccttgtgacccacaatgggcgcctgcttggcatcatcaccaaaaaagacgttttgaagcatatcgcacagatggccaaccaggaccccgacagcatcttgtttaactag

SEQ ID NO: 100415 - DNA, 1947 bp, Artificial Sequence
  derived and/or modified sequence
atgaacatcgtggccggcaccctgagcatgagccccctgaagcgggataaatgcccggagtggaacagctggtcacagctcattatctccacggacgagggagcatttgcgtatattgtgaactactttatgtacgtgctctgggcccttctttttgctttcctcgctgttagtctggtcaaggttttcgcaccttacgcgtgcggctccggcatccctgaaataaaaactattttatccgggttcattatccgtgggtatctcggtaaatggactttagttatcaagacaatcacgttggtcctcgctgtaagtagcggcctgagtctcggcaaggagggaccactcgtccacgtcgcctgctgttgcggtaatatactgtgccactgctttaacaagtataggaagaatgaggcaaaacgtagggaagtgctaagcgccgctgctgccgctggcgtctcagtggccttcggggcaccgatcgggggagtgctgttcagcctggaggaggtgtcctactatttccctttgaaaactttgtggcggagcttttttgctgccctggttgctgcctttacgctcagatcaataaacccgtttggaaatagtcgcctggttctgttttatgttgaattccacacaccttggcaccttttcgaactggtcccatttattctgttagggatatttggcggactgtggggtgcactctttattaggactaatattgcctggtgccggaaacgcaaaacaacacagcttggcaaatatcccgtgattgaggtgctggtggttactgccattactgcaattttagccttcccaaatgagtacacccggatgtcaacttcagagctgatctccgaactctttaatgactgtgggctcctggatagttcaaaactctgcgactatgaaaatagatttaacacgagtaagggcggagaactccctgatcgccctgcaggggtgggtgtttacagtgccatgtggcagctggctttaaccctaatcctgaagatcgtgatcacgatatttacatttggaatgaaaattcccagtgggctgtttatacccagcatggccgttggtgcaattgccggcaggctgctcggcgtgggaatggaacagcttgcctattaccaccaggaatggacagttttcaactcctggtgctctcagggcgccgactgcatcacccctggcctttatgccatggttggcgccgcagcatgtttgggaggggtaacaaggatgaccgtcagcctggttgtcattatgttcgaactgaccggaggccttgagtacatcgttccactcatggcagctgccatgacatccaaatgggtggcagacgctctgggccgggaggggatttacgatgcccatatacggcttaatggctaccctttcctggaggccaaagaggagttcgcacataaaaccttagccatggatgtaatgaagcctagaaggaatgaccctcttctgactgtcctgacgcaggactcaatgacggtagaagatgtagagactataataagtgaaacaacttacagcggatttccagtggtggtcagtcgggagtcacaaagacttgtgggatttgtgctgcggcgcgacctgataatcagcatcgaaaatgctcggaaaaaacaggatggagtggtttctacaagtatcatctactttacagagcactcccctccactgcccccttatactcctccgacattgaaactcaggaatatcctggatctgtccccctttacagtgactgatctgactcctatggagattgtggtggacattttccgcaagctgggtctgcggcagtgcctggtcacccacaacggccgcctactgggcataataacgaaaaaggatgtgctgaaacacatcgcacaaatggccaaccaagatccggactctatcctgttcaattag

SEQ ID NO: 100416 - DNA, 2241 bp, Artificial Sequence
  derived and/or modified sequence
atggacttccttgaagaaccgatccctggcgtcggaacgtatgacgacttcaatacaattgattgggtgcgagagaagtctcgggatcgagaccgacaccgcgagataacgaataaatccaaggaaagtacctgggccctgatccacagcgtgtccgacgcatttagcggctggctgcttatgctcctcatcgggttactgtcgggatccctcgctggactcatcgatatctccgcccactggatgactgatctgaaagaaggcatctgcacggggggattctggttcaaccatgaacactgttgctggaactctgagcacgtcacgtttgaggagagggataaatgtcccgagtggaattcatggagccagctgatcattagcacagacgagggcgctttcgcctatatcgttaactatttcatgtacgtcctgtgggctctgctgttcgcctttctagccgtctccttggtaaaggtgttcgccccatacgcctgtgggtcggggatcccagaaatcaagactatcttgtccgggttcattatacgagggtatctggggaagtggacgctcgtcatcaaaaccattacattggtgcttgcagtcagctcaggcttatcccttgggaaggaagggccacttgtccacgtggcctgctgttgtgggaacatactctgccattgcttcaacaagtacagaaaaaacgaggccaagagacgcgaagttctgagcgctgccgctgctgcaggcgttagcgtagcttttggagcccctatcggtggcgtgctattttcactggaggaggtgagttactacttccctcttaaaaccctgtggcggtccttttttgcggctctggtggcagctttcaccttaaggtccattaaccccttcggcaactcccgcctcgtgctgttctacgtggaatttcataccccatggcatctcttcgaattggtcccctttattctccttgggatctttggaggtttgtggggtgcgctcttcatcagaactaatatcgcttggtgtaggaaacgcaaaaccacccagctgggcaagtaccccgtcatcgaggtcctcgtagtgaccgctattacagccattctggcgtttcctaacgaatatacaagaatgagcacaagcgagttgatctcagaactgttcaacgactgcggtctgttagattcaagcaaactctgcgattacgagaatagattcaatacgtccaagggcggtgagctgccagacaggcctgctggtgtgggggtatatagtgcgatgtggcaactcgctctaaccctgattctcaaaatcgtgattactatcttcacttttgggatgaagatccctagcggcctttttatacccagcatggccgtgggggctatagctggccgtctcctgggggttggcatggagcagctggcttattaccaccaggagtggactgtctttaatagctggtgcagccagggcgcagattgcataacgccagggctctacgcaatggtcggagcagccgcatgtctcggaggagtaactcgtatgaccgttagtctggttgtgatcatgttcgaacttactggcggactcgagtacattgtgcccctaatggctgcagctatgacatcgaaatgggtagcagacgccctgggtagagagggcatctacgatgcgcacattcgactcaacggctatccttttctcgaggccaaggaagaatttgcccacaaaaccctagccatggatgtgatgaaaccacgtaggaatgaccccctgttgactgtgctgacccaggattccatgactgtcgaagacgttgaaacgatcatctcagagaccacctattcaggtttcccggtggtggtcagcagggagagccagcgactggtgggatttgtgttgcgtcgagatttgatcatttcgatcgagaacgcccgaaagaaacaggacggcgtagtgagtacgagcatcatctactttaccgagcactccccccctctacctccctatactcccccaacattgaagcttcgcaacatcttagatctcagccccttcaccgtgacagacctgacccccatggagatagtcgtggacattttccgtaagctgggactcaggcagtgcctggtcacacacaacggaagattgctaggcattattaccaagaaagacgtcttgaagcatatcgctcagatggcaaatcaggatccagattccatcctctttaactag

SEQ ID NO: 100417 - DNA, 2241 bp, Artificial Sequence
  derived and/or modified sequence
atggactttttggaggaacccattcctggagtggggacctacgatgactttaacaccattgactgggtccgcgagaagtctagggaccgagatcgccacagggagattaccaacaaatcgaaggaaagtacatgggctctgatacacagcgtaagtgacgctttctcaggctggctgttgatgctcctcataggcctcctctccggctctctggctggccttattgacatatcagctcactggatgaccgacctgaaggaaggaatttgtactggaggtttttggtttaatcacgaacattgttgttggaattcggaacacgttacgttcgaggagcgcgacaagtgtccagagtggaactcctggagtcagttaatcatttccaccgatgagggagcattcgcgtacattgtaaattatttcatgtatgtgctctgggccctgcttttcgcgtttctggccgtgtcgctggtgaaagtgtttgctccgtacgcttgtggtagtggtatccctgagatcaagacaatcctgagcggcttcataattcgaggttacttgggcaagtggacgctggtcatcaaaaccatcaccttagtgctcgcggtcagctcagggctttcacttggaaaggaagggcctttggtacacgtggcctgttgttgtggtaacatcctctgccactgcttcaacaagtatcggaaaaatgaggccaaaaggcgcgaagtactctcagcagcagccgctgctggagtgtcagtagctttcggggcacctatcggcggagtgctattcagcctcgaggaagtaagctattactttccacttaaaaccctctggcgctcattctttgctgcactcgtagctgccttcactctcagaagtatcaaccctttcggcaacagtcggttggtccttttttatgtggaattccacacaccatggcatctgtttgagctggtgcctttcattctgctcggcatatttggcggactttggggcgctctgttcattcgtaccaacattgcctggtgtcggaagcgaaaaaccactcagctgggcaagtaccccgtcattgaagtgcttgtggtcacagcaatcaccgcgattcttgccttccctaacgagtatacgaggatgagcacgtctgagctcatctcagaactgttcaacgattgtgggcttctggattcctctaaactttgtgactacgaaaatagatttaatacctcgaaagggggtgagctgccggacagacccgctggggtaggggtgtattccgcgatgtggcagttagccttgactcttattcttaagatagtcatcacaatattcacattcggtatgaagatcccaagcggacttttcattccctctatggctgtgggagcaattgctggacggctccttggggtgggcatggagcagctggcctactatcaccaagagtggactgtgtttaactcctggtgttcgcagggcgctgattgtattacacccggactatatgccatggttggagcggctgcctgcctgggtggggtgactcgaatgaccgtgagtctggttgtgatcatgtttgagctgactggtggcctggaatatatcgtccctcttatggccgcagccatgacaagtaaatgggtggctgacgcactcggcagagagggcatatacgacgcacatattaggttaaatggctatccttttcttgaggctaaagaggagttcgctcataagactctggcgatggatgtgatgaagccgagacgtaatgacccactgttgaccgttctgactcaggactccatgaccgtggaggatgttgagaccattatatcagaaactacctattcaggtttcccagtcgtggtgagccgcgaatcccagcgacttgtgggctttgttcttagacgggaccttattattagtatcgaaaatgccagaaagaagcaggacggcgtcgtgtcaacctcaatcatttactttacagaacattcgccaccactgccaccctatactcctcccactttaaagctgcggaacatcctcgacctgtctccatttacggtgacagatctcaccccaatggagattgtcgtcgatatattccgaaagttgggcctaaggcagtgtctcgtaacccataatgggaggctgctgggaattattactaagaaagacgtattgaagcacatcgctcagatggcaaatcaggaccctgatagtatacttttcaactag

SEQ ID NO: 100418 - DNA, 1947 bp, Artificial Sequence
  derived and/or modified sequence
atgaatattgtcgccggtaccctctctatgtcacccttaaaacgcgataagtgccctgaatggaacagctggagtcaactaatcatttctaccgacgagggtgcgttcgcatacatcgtaaattatttcatgtacgtgctctgggcccttctttttgctttcctggcagttagtttggtgaaggtgttcgccccttatgcctgcggatctggaattccagaaatcaaaaccatcttgtctggctttattataagaggatatctagggaaatggaccctagtgattaagaccattaccctcgtgctcgcagtttcctccgggctgtctctggggaaggaaggccctctggtccatgtagcctgctgttgcggcaacatcctctgtcactgctttaataagtaccggaagaacgaagccaagcggcgagaagtgctgtctgccgctgctgcggctggcgtctccgtcgcttttggagccccaatcggtggggtgcttttctccttggaggaagtctcttattatttcccactcaaaaccttatggagatccttctttgctgccctcgttgcagcctttaccttacgcagcattaacccttttggaaatagtcgtttagtactcttctacgtggaattccacacgccctggcacttgttcgaacttgtccccttcatcctgctcggcatcttcgggggactgtggggcgctctcttcatcagaaccaatatcgcctggtgccgaaagcgcaagactacgcaactgggaaagtacccagtcattgaagtgcttgtggttactgccatcaccgctatactggcctttccaaatgagtatacgcgaatgagtacatctgagctgataagtgaactatttaacgactgcggactgctcgactcctcaaaattgtgtgattatgaaaatcggttcaatactagtaaaggcggagaattgcccgataggcctgccggtgttggggtctactcagcaatgtggcagctggcactcactctgatcctgaagatcgtcatcactatttttacattcggcatgaagattccatcaggactgtttatcccgtccatggccgttggggctattgccggtaggctgctgggtgtcggtatggagcagctggcctattatcatcaggagtggacagtctttaactcttggtgctcacagggcgctgattgcatcacccctggcctgtacgcaatggtgggggcagctgcctgcttgggtggagttaccaggatgacagtttccctggtggtgatcatgttcgaattgacgggcggtctggaatatatcgtccctctgatggcagccgcaatgacgagcaagtgggtggccgacgcgctcggtcgcgaaggcatatacgacgctcatattcgcctgaacggttatccctttttagaggccaaagaagaatttgcccataagaccttggccatggacgtgatgaagcccagacgtaacgacccgctgctgacggtgctgacgcaggactcaatgacagtcgaggacgtggaaactattatttccgagaccacctattctggctttcctgttgtggtctctcgggagtcccagcggctagtgggattcgttctacgacgcgacctgattatatctatagagaatgccagaaaaaagcaggatggcgtggtgtctacctcaataatttacttcaccgaacactcaccccctctaccaccatatacgccgccaacattgaaactgagaaatatcttggacctatctccgtttactgtcactgacctaactcccatggagatcgtggtcgacattttccggaagctcggcctgcgacagtgtttggtcacccataacggaaggctgctaggcataataaccaaaaaagatgtgctgaaacacattgcccagatggctaaccaggaccccgattctatccttttcaactag

SEQ ID NO: 100419 - DNA, 3177 bp, Artificial Sequence
  derived and/or modified sequence
tgatgtgatatggctgcaagtgcctttgacccttttgtctcccttccataaactgaaatacctaagctgctccaacctcctttttgtcttttgtttcataaatcctttcccattgcacatcaactcctgtctctctttgtactgtcactctcatctgttgctttccattcacactgcctttagccactcatcattttgtgcctacaccacagaaacctctgaatgtaatggatgttcctaccagaggacaagtcgtacaatggtggaggaataggttcttcaaataggatcatggacttcttggaggagccaatccctggtgtagggacctatgatgatttcaatacaattgattgggtgagagagaagtctcgagaccgggataggcaccgagagattaccaataaaagcaaagagtcaacatgggccttaattcacagtgtgagtgatgctttttccggctggttgttgatgctccttattgggcttttatcaggttcgttagctggtttgatagacatctctgctcattggatgacagacttaaaagaaggtatatgcacagggggattctggtttaaccatgaacattgttgctggaactctgagcatgtcacctttgaagagagagacaaatgtccagagtggaatagttggtcccagcttatcatcagcacagatgagggagcctttgcctacatagtcaattatttcatgtacgtcctctgggctctcctatttgccttccttgccgtatctcttgtcaaggtgtttgcgccttatgcctgtggctctggaatccctgagataaaaactatcttgagtggtttcattattaggggctatttgggtaagtggactctggttatcaaaaccatcaccttggtgctggcagtgtcgtctggcttgagcctgggcaaagagggccctctagtgcacgtggcttgctgctgtgggaacatcctgtgccactgcttcaacaaatacaggaagaatgaagccaagcgcagagaggtcttgtcggctgcagcagcagctggtgtatctgtagcctttggagcacctataggtggagtattattcagccttgaagaggtcagctactattttcccctcaaaacattgtggcgttcattctttgctgccttggtggcagcattcactctacgctccatcaatccatttgggaacagccgcctggtactattttatgtggagtttcacaccccatggcatctctttgagctcgtgccattcattctgctgggcatatttggtggtctgtggggagcactgtttatccgcacaaacattgcctggtgtcggaagcgaaagaccacccagttgggcaagtatcctgttatagaggtactcgtcgtgacagccatcactgccatcctggctttccccaatgaatacactcggatgagcacaagtgagctcatttctgagctgtttaatgactgtggccttctggactcctccaagctctgtgattatgagaaccgtttcaacacaagcaaagggggtgaactgcctgacagaccggctggcgtgggagtctacagtgcaatgtggcagctggctttaacactcatactgaaaattgtcattactatattcacctttggcatgaagatcccttctggcctctttatccctagcatggctgttggtgctatagcaggtcgacttctaggagtaggaatggaacagctggcttattaccaccaggaatggaccgtcttcaatagctggtgtagtcagggagctgattgcatcacccccggcctttatgcaatggttggggctgcagcctgcttaggtggggtgactcggatgactgtttctcttgttgtcataatgtttgaactgactggtggcttagaatacatcgtgcctctgatggctgcagccatgacaagcaagtgggtggcagatgctcttgggcgggagggcatctatgatgcccacatccgtctcaatggatacccctttcttgaagccaaagaagagtttgctcataagaccctggcaatggatgtgatgaaaccccggagaaatgatcctttgttgactgtccttactcaggacagtatgactgtggaagatgtagagaccataatcagtgaaaccacttacagtggcttcccagtggtggtatcccgggagtcccaaagacttgtgggctttgtcctccgaagagatctcattatttcaattgaaaatgctcgaaagaaacaggatggggttgttagcacttccatcatttatttcacggagcattctcctccattgccaccatacactccacccactctaaagcttcggaacatcctcgatctcagccccttcactgtgactgaccttacacccatggagatcgtagtggatattttccgaaagctgggactgcggcagtgcctggttacacacaacgggcgattgcttggaatcattaccaaaaaggatgtgttaaagcatatagcacagatggcgaaccaagatcctgattccattctcttcaactagaatcatagagttctggatgtaaagcgggaaggacattacagaccatggatatgttgtattaactgggtacccaaaacacattttccatatttggatggtgaagtcacattagtgtgttgtctctttcctacaagttaaccagttgcactacataatctctggaaattaattttctctttaggagaaattatagttaggcttccatgatgttacattaggaagatatcatgaaagaataaataagattgctatggtttaattatatttgctttttaaaagatttttttaacttaaaaagtagttagccaatatgcaatcactgaaaactatgcaagagaaattccaaccgtcctgacctataacctgtaggaaaccgacgaaaaagtcactcttttgggatctaactgttgttactggaagacgaagtgtaaactaaggggctttgcttttcaaaccagagaaaggaaagccagaaggaaaagagtaatggtattttctagactgtgaagattcagttcaaatgttatccttgttcctgttacaatatttagcattattagtttgttatgtgtgtatgtttatgttaattttaatttctgattataagacaatgctgctttggttaatctcttctaaatgaattta

SEQ ID NO: 100420 - DNA, 2660 bp, Artificial Sequence
  derived and/or modified sequence
gggaacactggtagttctttaggtggcgtttgttgctgtgaaaggcagagaatgcagcaagtgcccttctaaagcacttcagactggggcttcttttgtaaaagctccccaacctgaatgaccaaatgcgggctgccaaggttatttcttccttgaggcagaaaaaaagaaaactgtgattgaagaggacaagtcgtacaatggtggaggaataggttcttcaaataggatcatggacttcttggaggagccaatccctggtgtagggacctatgatgatttcaatacaattgattgggtgagagagaagtctcgagaccgggataggcaccgagagattaccaataaaagcaaagagtcaacatgggccttaattcacagtgtgagtgatgctttttccggctggttgttgatgctccttattgggcttttatcaggttcgttagctggtttgatagacatctctgctcattggatgacagacttaaaagaaggtatatgcacagggggattctggtttaaccatgaacattgttgctggaactctgagcatgtcacctttgaagagagagacaaatgtccagagtggaatagttggtcccagcttatcatcagcacagatgagggagcctttgcctacatagtcaattatttcatgtacgtcctctgggctctcctatttgccttccttgccgtatctcttgtcaaggtgtttgcgccttatgcctgtggctctggaatccctgagataaaaactatcttgagtggtttcattattaggggctatttgggtaagtggactctggttatcaaaaccatcaccttggtgctggcagtgtcgtctggcttgagcctgggcaaagagggccctctagtgcacgtggcttgctgctgtgggaacatcctgtgccactgcttcaacaaatacaggaagaatgaagccaagcgcagagaggtcttgtcggctgcagcagcagctggtgtatctgtagcctttggagcacctataggtggagtattattcagccttgaagaggtcagctactattttcccctcaaaacattgtggcgttcattctttgctgccttggtggcagcattcactctacgctccatcaatccatttgggaacagccgcctggtactattttatgtggagtttcacaccccatggcatctctttgagctcgtgccattcattctgctgggcatatttggtggtctgtggggagcactgtttatccgcacaaacattgcctggtgtcggaagcgaaagaccacccagttgggcaagtatcctgttatagaggtactcgtcgtgacagccatcactgccatcctggctttccccaatgaatacactcggatgagcacaagtgagctcatttctgagctgtttaatgactgtggccttctggactcctccaagctctgtgattatgagaaccgtttcaacacaagcaaagggggtgaactgcctgacagaccggctggcgtgggagtctacagtgcaatgtggcagctggctttaacactcatactgaaaattgtcattactatattcacctttggcatgaagatcccttctggcctctttatccctagcatggctgttggtgctatagcaggtcgacttctaggagtaggaatggaacagctggcttattaccaccaggaatggaccgtcttcaatagctggtgtagtcagggagctgattgcatcacccccggcctttatgcaatggttggggctgcagcctgcttaggtggggtgactcggatgactgtttctcttgttgtcataatgtttgaactgactggtggcttagaatacatcgtgcctctgatggctgcagccatgacaagcaagtgggtggcagatgctcttgggcgggagggcatctatgatgcccacatccgtctcaatggatacccctttcttgaagccaaagaagagtttgctcataagaccctggcaatggatgtgatgaaaccccggagaaatgatcctttgttgactgtccttactcaggacagtatgactgtggaagatgtagagaccataatcagtgaaaccacttacagtggcttcccagtggtggtatcccgggagtcccaaagacttgtgggctttgtcctccgaagagatctcattatttcaattgaaaatgctcgaaagaaacaggatggggttgttagcacttccatcatttatttcacggagcattctcctccattgccaccatacactccacccactctaaagcttcggaacatcctcgatctcagccccttcactgtgactgaccttacacccatggagatcgtagtggatattttccgaaagctgggactgcggcagtgcctggttacacacaacgggcgattgcttggaatcattaccaaaaaggatgtgttaaagcatatagcacagatggcgaaccaagatcctgattccattctcttcaactagaatcatagagttctggatgtaaagcgggaaggacattacagaccatggatatgttgtattaactgggtacccaaaacacattttccatatttggatggtgaagtcacattagtgtgttgtctctttcctacaagttaaccagttgcactacataatctctggaaattaattttctctttaggagaaa

SEQ ID NO: 100421 - DNA, 3353 bp, Artificial Sequence
  derived and/or modified sequence
gtcacatgagccgcgcgcccgcttcgctccccctcctccccggctgggctgtgtgaatgaagctctgccggctacgtggggcgctcactcaacttggtgtcctggacgccagagccgaccgagcgcgctgcccaccggcggcggacacgggctccgccgctccggacctcggcgacagagcaaatcagttgcctggagttcccagtgaagttgtacctgtgcccgtgcgataacgtcagtggaagctgccccgagtaagtgagggaaatctagaagtttggagcataaaaaaccagcacgaatcaactttacataaacttcatacatttattagcaactgctcgggtttaacttcagggatgttaaatttcgcctagtcccacgggacgatgatcattacttcttaactgcacgcgaaataggagaagaaaaaaggcaaatcaaaacagactgtcccaggtctcagagaagtcatcggagcgctttttcctgctgaattcaccctaggagtttgtttggggctttagccccttggagaaaacagggccacatagctgcctttctatcaagtctccctacaaaactgagaggctctgggaaactcagcctgtgaccccagcgtgggtgaagataggatcaagatggccatgtggcagggtgccatggataacagaggctttcagcaggggagttttagtagcttccagaacagctccagtgatgaagacctgatggacattccagcaaccgctatggatttctccatgagagatgatgttcctcccttagaccgagaagtaggagaggacaagtcgtacaatggtggaggaataggttcttcaaataggatcatggacttcttggaggagccaatccctggtgtagggacctatgatgatttcaatacaattgattgggtgagagagaagtctcgagaccgggataggcaccgagagattaccaataaaagcaaagagtcaacatgggccttaattcacagtgtgagtgatgctttttccggctggttgttgatgctccttattgggcttttatcaggttcgttagctggtttgatagacatctctgctcattggatgacagacttaaaagaaggtatatgcacagggggattctggtttaaccatgaacattgttgctggaactctgagcatgtcacctttgaagagagacaaatgtccagagtggaatagttggtcccagcttatcatcagcacagatgagggagcctttgcctacatagtcaattatttcatgtacgtcctctgggctctcctatttgccttccttgccgtatctcttgtcaaggtgtttgcgccttatgcctgtggctctggaatccctgagataaaaactatcttgagtggtttcattattaggggctatttgggtaagtggactctggttatcaaaaccatcaccttggtgctggcagtgtcgtctggcttgagcctgggcaaagagggccctctagtgcacgtggcttgctgctgtgggaacatcctgtgccactgcttcaacaaatacaggaagaatgaagccaagcgcagagaggtcttgtcggctgcagcagcagctggtgtatctgtagcctttggagcacctataggtggagtattattcagccttgaagaggtcagctactattttcccctcaaaacattgtggcgttcattctttgctgccttggtggcagcattcactctacgctccatcaatccatttgggaacagccgcctggtactattttatgtggagtttcacaccccatggcatctctttgagctcgtgccattcattctgctgggcatatttggtggtctgtggggagcactgtttatccgcacaaacattgcctggtgtcggaagcgaaagaccacccagttgggcaagtatcctgttatagaggtactcgtcgtgacagccatcactgccatcctggctttccccaatgaatacactcggatgagcacaagtgagctcatttctgagctgtttaatgactgtggccttctggactcctccaagctctgtgattatgagaaccgtttcaacacaagcaaagggggtgaactgcctgacagaccggctggcgtgggagtctacagtgcaatgtggcagctggctttaacactcatactgaaaattgtcattactatattcacctttggcatgaagatcccttctggcctctttatccctagcatggctgttggtgctatagcaggtcgacttctaggagtaggaatggaacagctggcttattaccaccaggaatggaccgtcttcaatagctggtgtagtcagggagctgattgcatcacccccggcctttatgcaatggttggggctgcagcctgcttaggtggggtgactcggatgactgtttctcttgttgtcataatgtttgaactgactggtggcttagaatacatcgtgcctctgatggctgcagccatgacaagcaagtgggtggcagatgctcttgggcgggagggcatctatgatgcccacatccgtctcaatggatacccctttcttgaagccaaagaagagtttgctcataagaccctggcaatggatgtgatgaaaccccggagaaatgatcctttgttgactgtccttactcaggacagtatgactgtggaagatgtagagaccataatcagtgaaaccacttacagtggcttcccagtggtggtatcccgggagtcccaaagacttgtgggctttgtcctccgaagagatctcattatttcaattgaaaatgctcgaaagaaacaggatggggttgttagcacttccatcatttatttcacggagcattctcctccattgccaccatacactccacccactctaaagcttcggaacatcctcgatctcagccccttcactgtgactgaccttacacccatggagatcgtagtggatattttccgaaagctgggactgcggcagtgcctggttacacacaacgggcgattgcttggaatcattaccaaaaaggatgtgttaaagcatatagcacagatggcgaaccaagatcctgattccattctcttcaactagaatcatagagttctggatgtaaagcgggaaggacattacagaccatggatatgttgtattaactgggtacccaaaacacattttccatatttggatggtgaagtcacattagtgtgttgtctctttcctacaagttaaccagttgcactacataatctctggaaattaattttctctttaggagaaattatagttaggcttccatgatgttacattaggaagatatcatgaaagaataaataagattgctatggtttaattat

SEQ ID NO: 100422 - DNA, 2241 bp, Artificial Sequence
  derived and/or modified sequence
atggacttcctggaggagcccatccccggcgtgggcacctacgacgacttcaacaccatcgactgggtgagagagaagagcagagacagagacagacacagagagatcaccaacaagagcaaggagagcacctgggccctgatccacagcgtgagcgacgccttcagcggctggctgctgatgctgctgatcggcctgctgagcggcagcctggccggcctgatcgacatcagcgcccactggatgaccgacctgaaggagggcatctgcaccggcggcttctggttcaaccacgagcactgctgctggaacagcgagcacgtgaccttcgaggagagagacaagtgccccgagtggaacagctggagccagctgatcatcagcaccgacgagggcgccttcgcctacatcgtgaactacttcatgtacgtgctgtgggccctgctgttcgccttcctggccgtgagcctggtgaaggtgttcgccccctacgcctgcggcagcggcatccccgagatcaagaccatcctgagcggcttcatcatcagaggctacctgggcaagtggaccctggtgatcaagaccatcaccctggtgctggccgtgagcagcggcctgagcctgggcaaggagggccccctggtgcacgtggcctgctgctgcggcaacatcctgtgccactgcttcaacaagtacagaaagaacgaggccaagagaagagaggtgctgagcgccgccgccgccgccggcgtgagcgtggccttcggcgcccccatcggcggcgtgctgttcagcctggaggaggtgagctactacttccccctgaagaccctgtggagaagcttcttcgccgccctggtggccgccttcaccctgagaagcatcaaccccttcggcaacagcagactggtgctgttctacgtggagttccacaccccctggcacctgttcgagctggtgcccttcatcctgctgggcatcttcggcggcctgtggggcgccctgttcatcagaaccaacatcgcctggtgcagaaagagaaagaccacccagctgggcaagtaccccgtgatcgaggtgctggtggtgaccgccatcaccgccatcctggccttccccaacgagtacaccagaatgagcaccagcgagctgatcagcgagctgttcaacgactgcggcctgctggacagcagcaagctgtgcgactacgagaacagattcaacaccagcaagggcggcgagctgcccgacagacccgccggcgtgggcgtgtacagcgccatgtggcagctggccctgaccctgatcctgaagatcgtgatcaccatcttcaccttcggcatgaagatccccagcggcctgttcatccccagcatggccgtgggcgccatcgccggcagactgctgggcgtgggcatggagcagctggcctactaccaccaggagtggaccgtgttcaacagctggtgcagccagggcgccgactgcatcacccccggcctgtacgccatggtgggcgccgccgcctgcctgggcggcgtgaccagaatgaccgtgagcctggtggtgatcatgttcgagctgaccggcggcctggagtacatcgtgcccctgatggccgccgccatgaccagcaagtgggtggccgacgccctgggcagagagggcatctacgacgcccacatcagactgaacggctaccccttcctggaggccaaggaggagttcgcccacaagaccctggccatggacgtgatgaagcccagaagaaacgaccccctgctgaccgtgctgacccaggacagcatgaccgtggaggacgtggagaccatcatcagcgagaccacctacagcggcttccccgtggtggtgagcagagagagccagagactggtgggcttcgtgctgagaagagacctgatcatcagcatcgagaacgccagaaagaagcaggacggcgtggtgagcaccagcatcatctacttcaccgagcacagcccccccctgcccccctacaccccccccaccctgaagctgagaaacatcctggacctgagccccttcaccgtgaccgacctgacccccatggagatcgtggtggacatcttcagaaagctgggcctgagacagtgcctggtgacccacaacggcagactgctgggcatcatcaccaagaaggacgtgctgaagcacatcgcccagatggccaaccaggaccccgacagcatcctgttcaactag

SEQ ID NO: 100423 - DNA, 1947 bp, Artificial Sequence
  derived and/or modified sequence
atgaacatcgtggccggcaccctgagcatgagccccctgaagagagacaagtgccccgagtggaacagctggagccagctgatcatcagcaccgacgagggcgccttcgcctacatcgtgaactacttcatgtacgtgctgtgggccctgctgttcgccttcctggccgtgagcctggtgaaggtgttcgccccctacgcctgcggcagcggcatccccgagatcaagaccatcctgagcggcttcatcatcagaggctacctgggcaagtggaccctggtgatcaagaccatcaccctggtgctggccgtgagcagcggcctgagcctgggcaaggagggccccctggtgcacgtggcctgctgctgcggcaacatcctgtgccactgcttcaacaagtacagaaagaacgaggccaagagaagagaggtgctgagcgccgccgccgccgccggcgtgagcgtggccttcggcgcccccatcggcggcgtgctgttcagcctggaggaggtgagctactacttccccctgaagaccctgtggagaagcttcttcgccgccctggtggccgccttcaccctgagaagcatcaaccccttcggcaacagcagactggtgctgttctacgtggagttccacaccccctggcacctgttcgagctggtgcccttcatcctgctgggcatcttcggcggcctgtggggcgccctgttcatcagaaccaacatcgcctggtgcagaaagagaaagaccacccagctgggcaagtaccccgtgatcgaggtgctggtggtgaccgccatcaccgccatcctggccttccccaacgagtacaccagaatgagcaccagcgagctgatcagcgagctgttcaacgactgcggcctgctggacagcagcaagctgtgcgactacgagaacagattcaacaccagcaagggcggcgagctgcccgacagacccgccggcgtgggcgtgtacagcgccatgtggcagctggccctgaccctgatcctgaagatcgtgatcaccatcttcaccttcggcatgaagatccccagcggcctgttcatccccagcatggccgtgggcgccatcgccggcagactgctgggcgtgggcatggagcagctggcctactaccaccaggagtggaccgtgttcaacagctggtgcagccagggcgccgactgcatcacccccggcctgtacgccatggtgggcgccgccgcctgcctgggcggcgtgaccagaatgaccgtgagcctggtggtgatcatgttcgagctgaccggcggcctggagtacatcgtgcccctgatggccgccgccatgaccagcaagtgggtggccgacgccctgggcagagagggcatctacgacgcccacatcagactgaacggctaccccttcctggaggccaaggaggagttcgcccacaagaccctggccatggacgtgatgaagcccagaagaaacgaccccctgctgaccgtgctgacccaggacagcatgaccgtggaggacgtggagaccatcatcagcgagaccacctacagcggcttccccgtggtggtgagcagagagagccagagactggtgggcttcgtgctgagaagagacctgatcatcagcatcgagaacgccagaaagaagcaggacggcgtggtgagcaccagcatcatctacttcaccgagcacagcccccccctgcccccctacaccccccccaccctgaagctgagaaacatcctggacctgagccccttcaccgtgaccgacctgacccccatggagatcgtggtggacatcttcagaaagctgggcctgagacagtgcctggtgacccacaacggcagactgctgggcatcatcaccaagaaggacgtgctgaagcacatcgcccagatggccaaccaggaccccgacagcatcctgttcaactag

SEQ ID NO: 100424 - protein, 370 aa, Artificial Sequence
  derived and/or modified sequence
MAAAQPKYPAGATARRLARGCWSALWDYETPKVIVVRNRRLGVLYRAVQLLILLYFVWYVFIVQKSYQESETGPESSIITKVKGITTSEHKVWDVEEYVKPPESIRVHNATCLSDADCVAGELDMLGNGALQDLRGVRLVPGGRWGLCQPISGYDGPKFHHPHQEQHPLPQIPLLQGQHRRPHRRVPEALHVPRGLRPLLPHLQAGLYRGEGWGELHRARTQGRGGVIGVIINWDCDLDLPASECNPKYSFRRLDPKHVPASSGYNFRFAKYYKINGTTTRTLIKAYGIRIDVIVHGQAGKFSLIPTIINLATALTSVGVGSFLCDWILLTFMNKNKVYSHKKFDKMVDTPASEPAQASTPTDPKGLAQL

SEQ ID NO: 100425 - DNA, 1113 bp, Artificial Sequence
  derived and/or modified sequence
atggccgccgcccagcccaagtaccccgccggcgccaccgccagaagactggccagaggctgctggagcgccctgtgggactacgagacccccaaggtgatcgtggtgagaaacagaagactgggcgtgctgtacagagccgtgcagctgctgatcctgctgtacttcgtgtggtacgtgttcatcgtgcagaagagctaccaggagagcgagaccggccccgagagcagcatcatcaccaaggtgaagggcatcaccaccagcgagcacaaggtgtgggacgtggaggagtacgtgaagccccccgagagcatcagagtgcacaacgccacctgcctgagcgacgccgactgcgtggccggcgagctggacatgctgggcaacggcgccctgcaggacctgagaggcgtgagactggtgcccggcggcagatggggcctgtgccagcccatcagcggctacgacggccccaagttccaccacccccaccaggagcagcaccccctgccccagatccccctgctgcagggccagcacagaagaccccacagaagagtgcccgaggccctgcacgtgcccagaggcctgagacccctgctgccccacctgcaggccggcctgtacagaggcgagggctggggcgagctgcacagagccagaacccagggcagaggcggcgtgatcggcgtgatcatcaactgggactgcgacctggacctgcccgccagcgagtgcaaccccaagtacagcttcagaagactggaccccaagcacgtgcccgccagcagcggctacaacttcagattcgccaagtactacaagatcaacggcaccaccaccagaaccctgatcaaggcctacggcatcagaatcgacgtgatcgtgcacggccaggccggcaagttcagcctgatccccaccatcatcaacctggccaccgccctgaccagcgtgggcgtgggcagcttcctgtgcgactggatcctgctgaccttcatgaacaagaacaaggtgtacagccacaagaagttcgacaagatggtggacacccccgccagcgagcccgcccaggccagcacccccaccgaccccaagggcctggcccagctgtag

SEQ ID NO: 100426 - DNA, 1113 bp, Artificial Sequence
  derived and/or modified sequence
atggcagctgctcagccaaagtatcctgccggggccacggcccgaaggcttgcgcggggatgttggtcggccctgtgggactacgagactccaaaggtgattgttgtcaggaaccgacgcctgggggttttgtacagggccgtgcagctcttgattcttctgtatttcgtttggtacgtgtttatcgtgcagaaatcctaccaagagtctgaaaccggccctgagtcttcgatcataacaaaggtaaagggtattactacctccgagcacaaagtttgggatgtggaggagtatgtgaaacctcccgagtcaatccgtgtccataatgccacttgcctgagcgatgctgactgcgtcgcaggggaactggacatgcttgggaacggagcactgcaggatctgcgtggggtccggctggtaccgggaggccgttggggcttatgccagcctatttccggctacgacggcccgaagtttcatcatccacatcaggaacagcatccgctgccacagattccactgttgcagggtcagcacagaagaccgcacagacgcgtccccgaggcccttcatgtgcctcgagggctccggcctctgcttccccatctgcaggctgggctttatagaggcgaaggatggggggagctgcatcgggctcgaacccaaggtcgaggaggcgttattggcgtgatcatcaactgggactgtgatctggacctcccagcgagcgaatgcaaccctaagtactctttcagaagactcgacccaaaacacgtgcccgcaagtagcggttacaattttcgttttgctaaatactataaaattaatggcaccactacacggacgctcatcaaggcctacgggattcgtatcgatgtcatagtgcatggccaggccggcaaatttagcctcattccaaccatcatcaacctagctaccgctctgactagcgtgggggtgggcagcttcctgtgcgattggatactgttgacgttcatgaataaaaacaaagtgtattctcacaagaagttcgataagatggttgatactcctgcctcagagccggcccaggcgtcaacacccacagacccgaagggcttagctcagctctag

SEQ ID NO: 100427 - DNA, 1113 bp, Artificial Sequence
  derived and/or modified sequence
atggctgctgcccagcccaagtacccagctggggccacagcccggcggctggcccggggctgctggagcgccctgtgggactatgagacccccaaggtgattgtggtgaggaacagaaggctgggcgtgctgtacagagctgtgcagctgctgatcctgctgtactttgtgtggtacgtgttcatcgtgcagaagagctaccaggagagcgagaccggccctgagagcagcatcatcaccaaggtgaagggcatcaccaccagcgagcacaaggtgtgggatgtggaggagtatgtgaagcccccagagagcatccgggtgcacaatgccacctgcctgagtgatgctgactgtgtggccggggagctggacatgctgggcaatggagccctgcaggacctgcggggcgtgcggctggtgcctgggggccgctggggcctgtgccagcccatcagcggctatgatggccccaagttccaccacccccaccaggagcagcaccccctgccccagatccccctgctgcagggccagcaccggcggccccaccggcgggtgcctgaggccctgcacgtgccccggggcctgcggcccctgctgccccacctgcaggccggcctgtacagaggagagggctggggcgagctgcaccgggcccggacccagggccggggcggcgtcatcggggtcatcatcaactgggactgtgacctggacctgcctgccagcgagtgcaaccccaagtacagcttccggcggctggaccccaagcacgtgcctgccagcagcggctacaacttccgctttgccaagtactacaagatcaatggcaccaccaccaggaccctcatcaaggcctacggcatcagaattgatgtgattgtgcacggccaggccggcaagttcagcctcatccccaccatcatcaacctggccacagccctgacctctgtgggcgtgggcagcttcctgtgtgactggatcctgctgaccttcatgaacaagaacaaggtgtacagccacaagaagtttgacaagatggtggacaccccagccagcgagcccgcccaggccagcacccccacagaccccaagggcctggcccagctgtag

SEQ ID NO: 100428 - DNA, 1113 bp, Artificial Sequence
  derived and/or modified sequence
atggccgccgcccagcccaagtaccccgccggcgccaccgcccggagactggcaaggggctgttggagtgctctgtgggactacgagacccccaaagtcattgtggtgcggaacagacgcctaggtgtgctttatagagccgtgcagctgctgattctgctgtacttcgtctggtacgtcttcatcgtacagaagtcttaccaggaatctgagaccggaccagaaagttccattataactaaagtgaaagggatcacaaccagcgaacacaaagtatgggatgtagaggaatacgtcaagccccctgagagtatacgcgttcacaacgccacttgtctgagtgatgcagattgtgtggcgggggagctggacatgctgggcaacggtgccttacaggatctccggggcgttaggttggtgccaggggggaggtggggcttatgccagcctatttcagggtacgacggcccaaaattccatcacccacatcaagagcagcacccacttcctcagataccgttgcttcaagggcagcacaggcggccgcacagacgcgtgccggaagccctgcacgtcccaagaggactccggcccttgttgcctcatctccaggccggcctctatcgcggcgaagggtggggcgagctgcatcgggccaggacccagggacgcggtggcgtgatcggggtgattattaattgggactgcgaccttgacctccctgcctccgagtgcaaccccaagtatagcttcagaaggctggatcctaagcatgtcccagcgtcatctggttataactttagatttgccaaatactacaagatcaacggcaccactacccgcactttgatcaaagcatacggaattcgcatcgacgtcattgtacatgggcaagccggtaagttttcccttatcccaacgattatcaacctggcaacagcacttacctccgtaggggtgggctcattcctttgcgactggattctgctcaccttcatgaataagaacaaagtgtattcccacaagaagtttgacaagatggttgatacccccgcgagcgaacctgctcaggcgagcacccccactgatcccaaaggcctggctcagctatag

SEQ ID NO: 100429 - DNA, 1113 bp, Artificial Sequence
  derived and/or modified sequence
atggccgccgcccagcccaagtaccccgccggggcgaccgcccggcgcctggcccggggctgctggtccgccctctgggactacgagacgcccaaggtgatcgtggtgaggaaccggcgcctgggggtcctgtaccgcgccgtgcagctgctcatcctgctctacttcgtgtggtacgtattcatcgtgcagaaaagctaccaggagagcgagacgggccccgagagctccatcatcaccaaggtcaaggggatcaccacgtccgagcacaaagtgtgggacgtggaggagtacgtgaagccccccgagagcataagggtccacaacgccacctgcctctccgacgccgactgcgtggctggggagctggacatgctgggaaacggggccctccaagacctgcgaggtgttcggctggtgcccggtggaagatggggcctctgtcagccaatttctgggtacgatggccccaaatttcaccatcctcatcaagaacagcatccactaccccaaattccacttctccaagggcaacatcgccgaccgcacagacgggtacctgaagcgctgcacgttccacgaggcctccgacctctactgccccatcttcaagctgggctttatcgtggagaaggctggggagagcttcacagagctcgcacacaaggcaggggtggtgtcatcggggtcattatcaactgggactgtgacctggacctgcctgcatcggagtgcaaccccaagtactccttccggaggcttgaccccaagcacgtgcctgcctcgtcaggctacaacttcaggtttgccaaatactacaagatcaatggcaccaccacccgcacgctcatcaaggcctacgggatccgcattgacgtcattgtgcatggacaggccgggaagttcagcctgattcccaccattattaatctggccacagctctgacttccgtcggggtgggctccttcctgtgcgactggatcttgctaacattcatgaacaaaaacaaggtctacagccataagaaatttgacaagatggtggacactcctgcctccgagcctgcccaagcctccacacccacagaccccaaaggtttggctcaactctga

SEQ ID NO: 100430 - DNA, 1113 bp, Artificial Sequence
  derived and/or modified sequence
atggccgctgcacaacccaagtatcctgccggagccaccgcccgaagactcgccaggggatgctggtccgcgctttgggactacgaaacacccaaagtgatcgtggtgaggaatcgaaggctcggggtactctatagggccgtgcagctgcttattctgctctatttcgtgtggtatgtatttatcgtgcagaagtcttaccaggaatcagagacggggccagagtcaagtattattaccaaggttaagggaatcactacatccgagcataaagtttgggacgtcgaggagtatgttaagccccctgagagtatcagagtacacaatgccacctgtctgtctgatgctgattgcgtggctggagagctggatatgctggggaacggggctttgcaggatctgcgaggcgtgagactcgtcccagggggtcgatgggggctctgccaacctatcagcggctacgatggaccaaaatttcatcacccccaccaggagcagcatcccctcccccagattccactgctgcaaggtcagcaccggagaccccaccgtagggtcccggaagcgttacatgtgcctcgtggtctaagacccctcctgccgcacctgcaagcaggtttgtatcggggtgagggctggggcgagcttcaccgtgcaaggactcagggcagggggggtgtaatcggcgttattatcaattgggactgtgacctcgacctacccgctagtgaatgtaacccgaaatacagctttagaagattggaccctaaacatgtgccggcttcttccggatacaatttcagattcgcaaaatactacaaaatcaacggaacaaccactagaactcttatcaaggcttacggcatccggattgacgtgatcgttcacggacaagctggaaaattttctttaattccaacgataataaacctggccacagcactgactagcgtgggagtggggtcctttttatgtgattggatcttgctgacttttatgaacaaaaacaaggtgtactctcataagaagttcgacaagatggtcgacactcccgcatctgaacccgcacaggctagcacacctacagatcctaaagggttggcacaactgtag

SEQ ID NO: 100431 - protein, 423 aa, Artificial Sequence
  derived and/or modified sequence
MVGMSRLRNDRLADPLTGCSVCCKSSWNQLQDLCRLAKLSCPALGISKRNLYDFEVEYLCDYKKIREQEYYLVKWRGYPDSESTWEPRQNLKCVRILKQFHKDLERELLRRHHRSKTPRHLDPSLANYLVQKAKQRRALRRWEQELNAKRSHLGRITVENEVDLDGPPRAFVYINEYRVGEGITLNQVAVGCECQDCLWAPTGGCCPGASLHKFAYNDQGQVRLRAGLPIYECNSRCRCGYDCPNRVVQKGIRYDLCIFRTDDGRGWGVRTLEKIRKNSFVMEYVGEIITSEEAERRGQIYDRQGATYLFDLDYVEDVYTVDAAYYGNISHFVNHSCDPNLQVYNVFIDNLDERLPRIAFFATRTIRAGEELTFDYNMQVDPVDMESTRMDSNFGLAGLPGSPKKRVRIECKCGTESCRKYLF

SEQ ID NO: 100432 - DNA, 1272 bp, Artificial Sequence
  derived and/or modified sequence
atggtgggcatgagcagactgagaaacgacagactggccgaccccctgaccggctgcagcgtgtgctgcaagagcagctggaaccagctgcaggacctgtgcagactggccaagctgagctgccccgccctgggcatcagcaagagaaacctgtacgacttcgaggtggagtacctgtgcgactacaagaagatcagagagcaggagtactacctggtgaagtggagaggctaccccgacagcgagagcacctgggagcccagacagaacctgaagtgcgtgagaatcctgaagcagttccacaaggacctggagagagagctgctgagaagacaccacagaagcaagacccccagacacctggaccccagcctggccaactacctggtgcagaaggccaagcagagaagagccctgagaagatgggagcaggagctgaacgccaagagaagccacctgggcagaatcaccgtggagaacgaggtggacctggacggcccccccagagccttcgtgtacatcaacgagtacagagtgggcgagggcatcaccctgaaccaggtggccgtgggctgcgagtgccaggactgcctgtgggcccccaccggcggctgctgccccggcgccagcctgcacaagttcgcctacaacgaccagggccaggtgagactgagagccggcctgcccatctacgagtgcaacagcagatgcagatgcggctacgactgccccaacagagtggtgcagaagggcatcagatacgacctgtgcatcttcagaaccgacgacggcagaggctggggcgtgagaaccctggagaagatcagaaagaacagcttcgtgatggagtacgtgggcgagatcatcaccagcgaggaggccgagagaagaggccagatctacgacagacagggcgccacctacctgttcgacctggactacgtggaggacgtgtacaccgtggacgccgcctactacggcaacatcagccacttcgtgaaccacagctgcgaccccaacctgcaggtgtacaacgtgttcatcgacaacctggacgagagactgcccagaatcgccttcttcgccaccagaaccatcagagccggcgaggagctgaccttcgactacaacatgcaggtggaccccgtggacatggagagcaccagaatggacagcaacttcggcctggccggcctgcccggcagccccaagaagagagtgagaatcgagtgcaagtgcggcaccgagagctgcagaaagtacctgttctag

SEQ ID NO: 100433 - DNA, 1272 bp, Artificial Sequence
  derived and/or modified sequence
atggtgggaatgtccaggttacgcaatgacagactcgctgaccccctgacaggctgctcagtttgttgtaagtccagttggaatcagctccaggacctctgtcgattggccaagcttagctgccccgccctaggaatttcaaagcgaaacctgtatgattttgaagttgagtacctctgcgattacaaaaaaataagggagcaggagtattacctcgtgaaatggcggggataccctgattccgagagtacctgggagcctcgacagaatttgaagtgcgtgcgaatcctgaagcagttccacaaagacttagagcgcgaactcctgagacggcaccaccgaagcaaaacaccgaggcacctagatccatcccttgccaactatctggtccagaaggcaaagcaacggagggccctcagacgctgggagcaggaattgaacgccaaacgctctcatctgggccgtattactgtggagaacgaggtggatctggacggtccaccgcgtgctttcgtgtacattaatgagtacagagtcggcgaaggtattacacttaaccaggtggctgtgggctgtgaatgccaagattgcctttgggcgcccactggcgggtgctgccccggcgccagtctccataagttcgcttacaacgaccagggacaggttaggttgagggccggcctccctatctatgagtgtaacagtcgctgcagatgtgggtacgactgcccgaaccgtgtcgttcagaagggcatacggtatgatctctgtatcttccgcaccgatgatgggcgcggatggggcgttcgcaccctggaaaagattagaaaaaacagcttcgtgatggagtatgttggagaaataattacctccgaggaagcagaacggcgtgggcaaatctatgatagacagggcgcaacctacttgtttgatctcgactacgtcgaggatgtctacactgtagacgcagcatattatgggaatatttctcacttcgtcaaccacagctgtgatccaaatctgcaagtttacaacgtgtttattgacaatctggacgagaggcttcctagaattgcattctttgctactcggactattagggcaggcgaggagctgaccttcgattacaatatgcaggttgatcctgtcgacatggagtctactagaatggacagcaacttcggactggccggactacctggcagtcctaagaaacgcgtgcgtatagaatgcaagtgcggaacagagtcctgtcgcaagtaccttttttag

SEQ ID NO: 100434 - DNA, 1272 bp, Artificial Sequence
  derived and/or modified sequence
atggtgggcatgagccggctgagaaatgaccggctggccgaccccctgaccggctgcagcgtgtgctgcaagagctcctggaaccagctgcaggacctgtgccgcctggccaagctgagctgcccagccctgggcatcagcaagaggaacctgtatgactttgaggtggagtacctgtgtgactacaagaagatccgggagcaggagtactacctggtgaagtggaggggctacccagattctgagagcacctgggagccccggcagaacctgaagtgtgtgcgcatcctgaagcagttccacaaggacctggagcgggagctgctgcggcggcaccacaggagcaagacccccaggcacctggaccccagcctggccaactacctggtgcagaaggccaagcagaggcgggccctgcggcgctgggagcaggagctgaatgccaagaggagccacctgggccgcatcaccgtggagaatgaggtggacctggatggccccccccgggcctttgtgtacatcaatgagtacagagtgggggagggcatcaccctgaaccaggtggccgtgggctgtgagtgccaggactgcctgtgggcccccaccggcggctgctgccctggggccagcctgcacaagtttgcctacaatgaccagggccaggtgcggctgcgggccggcctgcccatctatgagtgcaacagccgctgccgctgtggctatgactgccccaacagagtggtgcagaagggcatccgctatgacctgtgcatcttcagaacagatgatggccggggctggggcgtgaggaccctggagaagatcaggaagaacagctttgtgatggagtatgtgggggagatcatcaccagcgaggaggccgagcggcggggccagatctatgaccggcagggcgccacctacctgtttgacctggactatgtggaggatgtgtacacagtggatgctgcctactacggcaacatcagccactttgtgaaccacagctgtgaccccaacctgcaggtgtacaacgtgttcatcgacaacctggatgagcggctgccccgcatcgccttctttgccaccaggaccatccgggccggggaggagctgacctttgactacaacatgcaggtggaccctgtggacatggagagcaccaggatggacagcaactttggcctggccggcctgcccggcagccccaagaagagggtgagaattgagtgcaagtgtggcacagagagctgcaggaagtacctgttctag

SEQ ID NO: 100435 - DNA, 1272 bp, Artificial Sequence
  derived and/or modified sequence
atggtgggcatgagccggctgcggaacgaccggctggccgacccccttacaggatgttctgtatgttgtaagtcatcctggaaccagcttcaggatctctgccggctggcgaaactcagctgtcctgctctcggcatctccaagcgtaatctgtacgattttgaggtggagtatctgtgcgactataaaaagatccgcgagcaagagtactatctagtcaaatggcgcggctaccctgacagcgaatccacatgggaacctcggcagaatttgaagtgcgtgaggattctgaagcaatttcacaaagacctggagagagaactgttgcggcggcatcataggtcaaagacccctagacacctggatccctccctcgctaattacctggttcagaaggccaagcaacgaagggccctgcgaagatgggagcaagaattgaatgctaagagatcccatctgggacggatcacagtcgaaaatgaggtcgacctggacgggcccccacgcgcttttgtatacatcaacgaatacagggtgggcgaagggattacactgaatcaggtggctgttggatgtgaatgccaagactgtttgtgggctccaaccggaggctgttgtcctggcgccagcctccacaaattcgcttacaatgatcagggtcaggtacgtttgcgtgcaggactgcccatttatgagtgcaatagtagatgtcgctgcgggtacgattgccctaatcgggtcgtgcagaaaggtataagatacgacctctgcattttccggaccgacgatggaagaggctggggagtacgtactcttgagaaaatcaggaaaaactcattcgtaatggaatacgttggcgaaatcattacctcagaggaggccgaaagacggggccagatctacgatcgccagggagcaacctacctctttgacctcgactacgttgaggatgtttacacggtggacgcggcgtattatggtaatatctcccatttcgttaatcactcctgtgacccgaatctccaggtgtataacgttttcatcgataacttagatgagagactgccccgtattgcctttttcgctactcgcacgatccgggctggggaagagctgaccttcgactacaatatgcaggtggatccagtcgacatggaaagcactaggatggatagcaattttgggcttgctggcctcccaggctcgcctaaaaaacgggtccgcatcgaatgcaaatgcgggacagagtcatgtcggaaatacctgttttag

SEQ ID NO: 100436 - DNA, 1272 bp, Artificial Sequence
  derived and/or modified sequence
atggtggggatgtcacgcctgagaaatgatagactggctgatcctctcacaggttgtagcgtctgctgcaagagctcttggaatcagctccaagacctctgccggctagcgaaactaagctgccctgcccttggcattagcaagcgaaatttgtatgattttgaagtggaatatctctgtgactacaagaaaatacgcgaacaagaatactacctcgtgaaatggaggggttatcctgacagtgagtcaacctgggaacccaggcaaaatcttaagtgtgtgaggatactgaaacagtttcataaagacttggagcgagagctgctgcgccgacaccataggtcgaagacccctagacacctcgatcccagcctagctaattaccttgtacagaaggctaaacagagaagggcactcaggcgctgggagcaggagctcaacgcaaagagatcccatctgggaagaattacggtcgagaatgaagtggacttggacgggcctccacgagccttcgtctacattaacgagtacagggtcggcgaggggataactttgaatcaagtggctgtgggctgtgaatgtcaggactgtctgtgggcccctaccggcggatgctgcccaggggcttcactccacaaattcgcctataacgaccaggggcaagtgaggttgcgcgctggcctgcccatttacgagtgcaacagtcgttgcagatgtggctacgactgccccaatagggttgtccaaaaggggatccgctacgatctgtgtatctttcgtactgatgatggcaggggctggggagttaggaccctcgagaagattcgcaaaaattcatttgtgatggagtacgtgggggagataattacaagcgaggaagctgaaaggcgagggcagatttacgacaggcaaggcgctacgtatctatttgacctagattacgtggaggatgtgtacacagtggacgctgcctattatggaaacatttcccacttcgtcaatcattcctgcgaccccaacctccaggtgtataatgtgtttatcgacaatttggatgagagactgccacggatcgcatttttcgccacacgtaccattcgcgcaggagaggagctgactttcgactacaacatgcaggtggatcccgtggatatggagagcacgcgcatggatagcaattttgggctggccggactgccaggttctccaaaaaaacgagtgcgcattgagtgtaaatgtggaacagaaagctgtcgcaagtatctgttctag

SEQ ID NO: 100437 - DNA, 1773 bp, Artificial Sequence
  derived and/or modified sequence
gatcaactatccacgctgctcgaatcacagcatgctggagggcctggctgggtgctctgactgactgatcacctgacagacggtgcggtcagtcggatgctgagaatgactgacgatgtgatgaggggcggattgaacgagtcacaggccagctggccaggagcaaaatcggcatagctgtctgactcgatggctgtacgtggttacggactgtctgccctgatagaatctcagcttcaacgcatcagaggagactgacttgaccaatggtggggatgagtcgcctgagaaatgacagactggctgacccactgacaggctgcagcgtgtgttgcaagtcttcttggaatcagctgcaggacctgtgccgcctggccaagctctcctgccctgccctcggtatctctaagaggaacctctatgactttgaagtcgagtacctgtgcgattacaagaagatccgcgaacaggaatattacctggtgaaatggcgtggatatccagactcagagagcacctgggagccacggcagaatctcaagtgtgtgcgtatcctcaagcagttccacaaggacttagaaagggagctgctccggcggcaccaccggtcaaagaccccccggcacctggacccaagcttggccaactacctggtgcagaaggccaagcagaggcgggcgctccgtcgctgggagcaggagctcaatgccaagcgcagccatctgggacgcatcactgtagagaatgaggtggacctggacggccctccgcgggccttcgtgtacatcaatgagtaccgtgttggtgagggcatcaccctcaaccaggtggctgtgggctgcgagtgccaggactgtctgtgggcacccactggaggctgctgcccgggggcgtcactgcacaagtttgcctacaatgaccagggccaggtgcggcttcgagccgggctgcccatctacgagtgcaactcccgctgccgctgcggctatgactgcccaaatcgtgtggtacagaagggtatccgatatgacctctgcatcttccgcacggatgatgggcgtggctggggcgtccgcaccctggagaagattcgcaagaacagcttcgtcatggagtacgtgggagagatcattacctcagaggaggcagagcggcggggccagatctacgaccgtcagggcgccacctacctctttgacctggactacgtggaggacgtgtacaccgtggatgccgcctactatggcaacatctcccactttgtcaaccacagttgtgaccccaacctgcaggtgtacaacgtcttcatagacaaccttgacgagcggctgccccgcatcgctttctttgccacaagaaccatccgggcaggcgaggagctcacctttgattacaacatgcaagtggaccccgtggacatggagagcacccgcatggactccaactttggcctggctgggctccctggctcccctaagaagcgggtccgtattgaatgcaagtgtgggactgagtcctgccgcaaatacctcttctagcccttagaagtctgaggccagactgactgagggggcctgaagctacatgcacctcccccactgctgccctcctgtcgagaatgactgccagggcctcgcctgcctccacctgcccccacctgctcctacctgctctacgttcagggctgtggccgtggtgaggaccgactccaggagtcccctttccctgtcccagccccatctgtgggttgcacttacaaacccccacccacct

SEQ ID NO: 100438 - DNA, 1140 bp, Artificial Sequence
  derived and/or modified sequence
atggtgtgggtagtgcttctctctttactatgttatctggtgctctttctgtgtaggcactcttctcatcgaggcgtctttctgagcgttactattcttatctaccttctgatgggtgagatgcacatggtggacaccgtgacttggcataagatgagaggggcccaaatgattgtggccatgaaagcagtttctctaggatttgacttagacaggggagaggtcggcactgtgccctctcctgtcgagttcatggggtacctgtacttcgtggggaccattgtgttcggaccatggatctccttccactcttatctacaagctgtgcagggccgccccttgtcgtgccggtggctccaaaaggtcgcacgatccctcgcacttgccttgttatgtctggtgttatctacctgcgtgggcccatacctgttcccctacttcattcccctcaacggcgaccggttgctgcggaaatggcttcgcgcttacgagtcagctgtgtcattccatttcagcaactattttgttgggttccttagcgaggccactgctacactagccggggctggtttcacagaagaaaaagaccatctcgagtgggacctgaccgtctcgaagcctttgaatgtggaactgcctaggtctatggtagaggtcgtcacgagctggaatctccctatgtcttactggcttaacaactacgtgttcaaaaatgcattgagactgggaacgttttccgcagtgctcgtcacatatgctgccagtgcactgctccacgggtttagttttcacttggctgcagtcctcctgtctcttgcttttataacctatgtagagcacgtcttacgcaagaggctggccagaattctttccgcctgtgtcctctcaaagagatgccccccagattgtagccaccagcatagattaggcctgggtgtcagggccctgaacctcctgttcggagcactcgccattttccatctggcctacctggggtctctcttcgatgtggatgtggacgacacaacagaggaacagggctatggtatggcttatacagtgcacaaatggagcgagctcagctgggcctcccattgggttacttttggctgttggattttctaccgactgattgggtag

SEQ ID NO: 100439 - DNA, 1140 bp, Artificial Sequence
  derived and/or modified sequence
atggtgtgggtggtgctgctgagcctgctgtgctacctggtgctcttcctgtgccgccacagcagccacagaggagtcttcctgtctgtgaccatcctgatctacctgctgatgggagagatgcacatggtggacacagtgacctggcacaagatgagaggagcccagatgattgtggccatgaaggctgtgtccctgggctttgacctggacagaggagaggtgggcaccgtgcccagccctgtggagttcatgggctacctgtactttgtgggcaccatcgtgtttggcccctggatctccttccacagctacctgcaggccgtgcagggccggcccctgagctgccgctggctgcagaaggtggcccggagcctggccctggccctgctgtgcctggtgctgagcacctgtgtgggcccctacctgttcccctacttcatccccctgaatggagaccggctgctgaggaagtggctgcgggcctatgaatctgctgtgtccttccacttcagcaactactttgtgggcttcctgtctgaggccacagccaccctggccggggccggcttcacagaggagaaggaccacctggagtgggacctgactgtgtccaagcccctgaatgtggagctgcccaggtccatggtggaggtggtgacctcctggaacctgcccatgagctactggctgaacaactacgtgttcaagaatgccctgcggctgggcaccttctctgctgtgctggtgacctatgctgccagcgccctgctgcacggcttctccttccacctggccgctgtgctgctgagcctggccttcatcacctacgtggagcacgtgctgaggaagaggctggcccgcatcctgagcgcctgtgtgctgagcaagcgctgccccccagactgcagccaccagcaccggctgggcctgggcgtgcgggccctgaacctgctgtttggagccctggccatcttccacctggcctacctgggcagcctgtttgatgtggatgtggatgacaccacagaggagcagggctacggcatggcctacacagtgcacaagtggagcgagctgtcctgggccagccactgggtgaccttcggctgctggatcttctaccgcctcatcggctag

SEQ ID NO: 100440 - DNA, 1140 bp, Artificial Sequence
  derived and/or modified sequence
atggtgtgggtggtgctgctgagcctgctgtgctacctggtgctgttcctctgtcgtcattcgagtcacagaggtgtcttcttgtcagtgacaattctgatttatctactcatgggtgaaatgcatatggtggataccgtgacttggcataaaatgcggggtgctcagatgatcgtcgcaatgaaggccgtgagtctgggctttgatctcgataggggggaagtagggacagtcccatctccagtggagttcatgggttacctgtatttcgtgggcactatcgtgtttggtccgtggattagctttcatagttatctccaggcggtgcagggccggcctctctcctgccgctggctccaaaaagtggcccgcagcctcgctctggccttgctctgcctcgtgctgtccacctgcgtgggtccttacctctttccttattttattcccctgaacggggaccggttactgcgtaaatggctgcgtgcttatgaatccgccgtctcttttcacttttcaaattatttcgtagggttcctttctgaagccaccgccactctagcaggcgctggctttaccgaggagaaggatcacctcgagtgggatcttacagtgagcaagccactgaacgtggaattacctcggagtatggtggaggttgtcaccagttggaaccttcctatgtcctactggctgaacaactatgtgttcaaaaatgcgctgagattaggcactttttctgcggtcctggtcacgtatgctgcttcggcattgctgcacggtttcagtttccacttggctgctgtattgctgagccttgcattcatcacatacgtggagcatgtcctgcggaaaaggttggccagaatcctgtccgcgtgtgtgctgtcaaagcgctgtccccccgattgttcacaccaacaccgattgggcttgggagtgcgtgcgctgaatctgctctttggcgccttagctatttttcacctggcatacctcggttccttattcgacgtcgatgtggacgataccacagaagaacagggttatggcatggcttacactgtgcacaagtggagtgaactgagctgggcctctcactgggtcaccttcggttgctggatcttctatcggttgatcggttag

SEQ ID NO: 100441 - DNA, 1140 bp, Artificial Sequence
  derived and/or modified sequence
atggtctgggtggttctgctttccctcctgtgttatttagtgctcttcttgtgccggcattcctcccatagaggggttttccttagcgtcacgatattgatttacctgctgatgggtgaaatgcacatggttgatactgttacgtggcataaaatgaggggggcacagatgattgtagcaatgaaggcggtgtctttggggttcgatctggatcgaggtgaggtcggcacggttccctcacccgtggagttcatgggctacctctactttgtgggaaccattgtctttggaccctggatcagctttcattcatacctgcaagctgtgcagggacggccactgtcatgccggtggttgcagaaggtcgcccgatctttagcactcgccctactgtgtcttgtgctgtccacctgcgtgggcccttacctgtttccctatttcattcctctgaacggagaccggctgctccgcaaatggctgcgggcatacgaatccgccgtgagtttccatttttccaactactttgtgggctttttgtctgaggcaacggcaacacttgccggtgcaggtttcactgaggaaaaggatcacctcgaatgggacttaaccgtttccaaacctctcaatgtagagctcccacgatcgatggtcgaagtggtaacgtcatggaacctgccaatgagctattggcttaataactacgtgttcaagaatgcactgagattgggaacattctctgcagtcctcgtaacttacgctgcctccgccctcttacatggattttcgttccatctggctgccgtattactgagccttgctttcattacttatgttgaacatgtcctgcgcaaacgcctagcacggatcctgtcagcctgcgtgctgtcgaagaggtgtcccccagactgtagccaccagcatcggctcggtttaggcgtgagggcactaaaccttttattcggagccctcgcaatattccacctcgcctacctgggctccctttttgacgttgatgtggacgataccacggaggagcagggttacggcatggcatatacagtccacaaatggagcgagttatcatgggccagccattgggtgaccttcgggtgttggatcttctacaggttaataggttag

SEQ ID NO: 100442 - DNA, 1140 bp, Artificial Sequence
  derived and/or modified sequence
atggtgtgggtggtgctgctgagcctgctgtgctacctggtgctgttcctgtgcagacacagcagccacagaggcgtgttcctgagcgtgaccatcctgatctacctgctgatgggcgagatgcacatggtggacaccgtgacctggcacaagatgagaggcgcccagatgatcgtggccatgaaggccgtgagcctgggcttcgacctggacagaggcgaggtgggcaccgtgcccagccccgtggagttcatgggctacctgtacttcgtgggcaccatcgtgttcggcccctggatcagcttccacagctacctgcaggccgtgcagggcagacccctgagctgcagatggctgcagaaggtggccagaagcctggccctggccctgctgtgcctggtgctgagcacctgcgtgggcccctacctgttcccctacttcatccccctgaacggcgacagactgctgagaaagtggctgagagcctacgagagcgccgtgagcttccacttcagcaactacttcgtgggcttcctgagcgaggccaccgccaccctggccggcgccggcttcaccgaggagaaggaccacctggagtgggacctgaccgtgagcaagcccctgaacgtggagctgcccagaagcatggtggaggtggtgaccagctggaacctgcccatgagctactggctgaacaactacgtgttcaagaacgccctgagactgggcaccttcagcgccgtgctggtgacctacgccgccagcgccctgctgcacggcttcagcttccacctggccgccgtgctgctgagcctggccttcatcacctacgtggagcacgtgctgagaaagagactggccagaatcctgagcgcctgcgtgctgagcaagagatgcccccccgactgcagccaccagcacagactgggcctgggcgtgagagccctgaacctgctgttcggcgccctggccatcttccacctggcctacctgggcagcctgttcgacgtggacgtggacgacaccaccgaggagcagggctacggcatggcctacaccgtgcacaagtggagcgagctgagctgggccagccactgggtgaccttcggctgctggatcttctacagactgatcggctag

SEQ ID NO: 100443 - protein, 655 aa, Artificial Sequence
  derived and/or modified sequence
MSRKAHITEKVTSNGSIGRDPPAETQPQNPPAQPAPNAWQVIKGVLFRIFIIWAISSWFRRGPAPQDQAGPGGAPRVASRNLFPKDTLMNLHVYISEHEHFTDFNATSALFWEQHDLVYGDWTSGENSDGCYEHFAELDIPQSVQQNGSIYIHVYFTKSGFHPDPRQKALYRRLATVHMSRMINKYKRRRFQKTKNLLTGETEADPEMIKRAEDYGPVEVISHWHPNITINIVDDHTPWVKGSVPPPLDQYVKFDAVSGDYYPIIYFNDYWNLQKDYYPINESLASLPLRVSFCPLSLWRWQLYAAQSTKSPWNFLGDELYEQSDEEQDSVKVALLETNPYLLALTIIVSIVHSVFEFLAFKNDIQFWNSRQSLEGLSVRSVFFGVFQSFVVLLYILDNETNFVVQVSVFIGVLIDLWKITKVMDVRLDREHRVAGIFPRLSFKDKSTYIESSTKVYDDMAFRYLSWILFPLLGCYAVYSLLYLEHKGWYSWVLSMLYGFLLTFGFITMTPQLFINYKLKSVAHLPWRMLTYKALNTFIDDLFAFVIKMPVMYRIGCLRDDVVFFIYLYQRWIYRVDPTRVNEFGMSGEDPTAAAPVAEVPTAAGALTPTPAPTTTTATREEASTSLPTKPTQGASSASEPQEAPPKPAEDKKKD

SEQ ID NO: 100444 - DNA, 2313 bp, Artificial Sequence
  derived and/or modified sequence
atggaacgaaaaggacgcgaagaatcggcagggagaagcggacaggatgtcccgaaaggctcatataaccgaaaaggtgaccagcaatggcagcatcgggagggacccgccagcggagacccagcctcagaacccaccggcccagccggcacccaatgcctggcaggtcatcaaaggtgtgctgtttaggatcttcatcatctgggccatcagcagttggttccgccgagggccggcccctcaggaccaggcgggccccggaggagctccacgcgtcgccagccgcaacctgttccccaaagacactttaatgaacctgcatgtgtacatctcagagcacgagcactttacagacttcaacgccacgtcggcactcttctgggaacagcacgatcttgtgtatggcgactggactagcggcgagaactcagacggctgctacgagcactttgctgagctcgatatcccacagagcgtccagcagaacggctccatctacatccacgtttacttcaccaagagtggcttccacccagacccccggcagaaggccctgtaccgccggcttgccacagtccacatgtcccggatgatcaacaaatacaagcgcagacgatttcagaaaaccaagaacctgctgacaggagagacagaagcggacccagaaatgatcaagagggctgaggactatgggcctgtggaggtgatctcccattggcaccccaacatcaccatcaacatcgtggacgaccacacgccgtgggtgaagggcagtgtgccccctcccctggatcaatatgtgaagttcgacgccgtgagcggtgactactatcccatcatctacttcaatgactactggaacctgcagaaggactactaccccatcaacgagagcctggccagcctgccgctccgcgtctccttctgcccactctcgctttggcgctggcagctctatgctgcccagagcaccaagtcgccctggaacttcctgggtgatgagttgtacgagcagtcagatgaggagcaggactcggtgaaggtggccctgctggagaccaacccctacctgctggcgctcaccatcatcgtgtctatcgttcacagtgtcttcgagttcctggccttcaagaatgatatccagttctggaacagccggcagtccctggagggcctgtccgtgcgctccgtcttcttcggcgttttccagtcattcgtggtcctcctctacatcctggacaacgagaccaacttcgtggtccaggtcagcgtcttcattggggtcctcatcgacctctggaagatcaccaaggtcatggacgtccggctggaccgagagcacagggtggcaggaatcttcccccgcctatccttcaaggacaagtccacgtatatcgagtcctcgaccaaagtgtatgatgatatggcattccggtacctgtcctggatcctcttcccgctcctgggctgctatgccgtctacagtcttctgtacctggagcacaagggctggtactcctgggtgctcagcatgctctacggcttcctgctgaccttcggcttcatcaccatgacgccccagctcttcatcaactacaagctcaagtctgtggcccaccttccctggcgcatgctcacctacaaggccctcaacacattcatcgacgacctgttcgcctttgtcatcaagatgcccgttatgtaccggatcggctgcctgcgggacgatgtggttttcttcatctacctctaccaacggtggatctaccgcgtcgaccccacccgagtcaacgagtttggcatgagtggagaagaccccacagctgccgcccccgtggccgaggttcccacagcagcaggggccctcacgcccacacctgcacccaccacgaccaccgccaccagggaggaggcctccacgtccctgcccaccaagcccacccagggggccagctctgccagcgagccccaggaagcccctccaaagccagcagaggacaagaaaaaggattagtcgagactggtcctcacctgctccggctcctggcgaccactacccctgcgtcccggccccctcgcctcccctccctgtcgccctttccctggacagatcaggccggggcggtgggaggcccgcctcaggtcagggcccagcgtgtgatgtaggggccggggcaggccagggtttgtttgtggaggcgctgtctgtccctctgtccctctgtgtttccagccatctcgccctgccagcccagcaccactgggaatcatggtgaagctgatgcagcgttgccgagggggtgggttgggcgg

SEQ ID NO: 100445 - DNA, 1968 bp, Artificial Sequence
  derived and/or modified sequence
atgagcagaaaggcccacatcaccgagaaggtgaccagcaacggcagcatcggcagagacccccccgccgagacccagccccagaacccccccgcccagcccgcccccaacgcctggcaggtgatcaagggcgtgctgttcagaatcttcatcatctgggccatcagcagctggttcagaagaggccccgccccccaggaccaggccggccccggcggcgcccccagagtggccagcagaaacctgttccccaaggacaccctgatgaacctgcacgtgtacatcagcgagcacgagcacttcaccgacttcaacgccaccagcgccctgttctgggagcagcacgacctggtgtacggcgactggaccagcggcgagaacagcgacggctgctacgagcacttcgccgagctggacatcccccagagcgtgcagcagaacggcagcatctacatccacgtgtacttcaccaagagcggcttccaccccgaccccagacagaaggccctgtacagaagactggccaccgtgcacatgagcagaatgatcaacaagtacaagagaagaagattccagaagaccaagaacctgctgaccggcgagaccgaggccgaccccgagatgatcaagagagccgaggactacggccccgtggaggtgatcagccactggcaccccaacatcaccatcaacatcgtggacgaccacaccccctgggtgaagggcagcgtgcccccccccctggaccagtacgtgaagttcgacgccgtgagcggcgactactaccccatcatctacttcaacgactactggaacctgcagaaggactactaccccatcaacgagagcctggccagcctgcccctgagagtgagcttctgccccctgagcctgtggagatggcagctgtacgccgcccagagcaccaagagcccctggaacttcctgggcgacgagctgtacgagcagagcgacgaggagcaggacagcgtgaaggtggccctgctggagaccaacccctacctgctggccctgaccatcatcgtgagcatcgtgcacagcgtgttcgagttcctggccttcaagaacgacatccagttctggaacagcagacagagcctggagggcctgagcgtgagaagcgtgttcttcggcgtgttccagagcttcgtggtgctgctgtacatcctggacaacgagaccaacttcgtggtgcaggtgagcgtgttcatcggcgtgctgatcgacctgtggaagatcaccaaggtgatggacgtgagactggacagagagcacagagtggccggcatcttccccagactgagcttcaaggacaagagcacctacatcgagagcagcaccaaggtgtacgacgacatggccttcagatacctgagctggatcctgttccccctgctgggctgctacgccgtgtacagcctgctgtacctggagcacaagggctggtacagctgggtgctgagcatgctgtacggcttcctgctgaccttcggcttcatcaccatgaccccccagctgttcatcaactacaagctgaagagcgtggcccacctgccctggagaatgctgacctacaaggccctgaacaccttcatcgacgacctgttcgccttcgtgatcaagatgcccgtgatgtacagaatcggctgcctgagagacgacgtggtgttcttcatctacctgtaccagagatggatctacagagtggaccccaccagagtgaacgagttcggcatgagcggcgaggaccccaccgccgccgcccccgtggccgaggtgcccaccgccgccggcgccctgacccccacccccgcccccaccaccaccaccgccaccagagaggaggccagcaccagcctgcccaccaagcccacccagggcgccagcagcgccagcgagccccaggaggccccccccaagcccgccgaggacaagaagaaggactag

SEQ ID NO: 100446 - DNA, 1968 bp, Artificial Sequence
  derived and/or modified sequence
atgtcaaggaaagcgcacatcacagagaaagtcacctcaaatggtagtataggacgagatcctcctgcagagacgcagcctcaaaatccccccgcccagcctgcaccaaacgcttggcaggttatcaaaggagtgctgtttagaatcttcatcatctgggccatttctagttggtttagacggggacccgcacctcaagatcaggccgggcccggcggggctcctcgtgtggctagccgcaaccttttcccaaaagatactctgatgaacttgcatgtctatatctctgagcatgaacatttcaccgacttcaacgccacaagcgctctgttctgggagcagcatgatctggtatatggcgactggacctcgggtgaaaactctgatggctgctacgaacacttcgctgagctggacatcccccaaagtgtccagcagaacgggagcatctacatccatgtttactttaccaagtcagggttccatcctgatcccaggcagaaggccttataccgcagattggcaaccgtacacatgagcagaatgatcaacaaatacaaaaggcggaggtttcagaaaacaaaaaacttacttactggagaaaccgaagcggacccagaaatgatcaaacgagcggaggattacggccccgtagaggtcatttcccactggcatccaaacatcaccataaacatcgtggacgatcacactccgtgggtcaaggggtccgtgccaccacccctcgaccagtacgtcaagttcgatgctgtctctggcgactactacccaattatttacttcaacgactactggaacctgcagaaggactactatcccatcaatgagtcgctggcctcactgcctctgagggtgtccttctgccctctgagtctctggagatggcagctgtacgcggctcaaagcactaaaagcccatggaacttcttaggcgatgagctgtatgagcagtcggatgaggagcaggacagcgtcaaggtggccctcttggaaacgaacccttatctgcttgccttaacaatcatcgtttctatcgttcacagcgtgtttgagttccttgcattcaagaacgacatacaattttggaactccaggcagagtctcgagggcctgagtgtcagaagtgtctttttcggtgtttttcagtccttcgtggtgctcttgtatatccttgataacgaaaccaacttcgtagtgcaggtttccgtgtttataggcgtccttatcgatctgtggaagatcacaaaggtcatggatgttagactcgacagggagcaccgggttgcaggcatatttccccggcttagtttcaaagataaatccacctacattgaatcgagtacaaaagtctatgatgatatggccttcaggtatctgtcttggatcctctttcccttgctgggctgctatgccgtctactcactgctctatttagagcacaaggggtggtacagctgggttctgagcatgctctacggctttctgctcacctttgggtttattaccatgacaccccagctgtttatcaactacaagctgaaatcagtagcgcatctgccatggcgtatgttgacttataaagcactcaatacttttattgacgatctgtttgcattcgtgatcaaaatgccagtcatgtacaggatcggctgcttacgggacgacgttgtattcttcatctacctgtaccagagatggatttatcgagtcgatcctacacgggtaaatgaattcggcatgagcggcgaagacccaacggccgccgctcccgtggccgaagtgccaacagcagcgggggccttgacccccacacccgcccctactaccactactgctacccgcgaagaggcgagtacaagccttcctactaagcctacgcagggcgcaagctccgcctcagaaccacaagaagcacctcccaagccggcggaggataaaaaaaaggactag

SEQ ID NO: 100447 - DNA, 1968 bp, Artificial Sequence
  derived and/or modified sequence
atgagcaggaaggcccacatcacagagaaggtgaccagcaatggcagcatcggccgggaccccccagctgagacccagccccagaaccccccagcccagcctgccccaaatgcctggcaggtgatcaagggcgtgctcttccgcatcttcatcatctgggccatcagctcctggttccggcggggccctgccccccaggaccaggccggccctggaggagccccccgggtggccagcaggaacctcttccccaaggacaccctgatgaacctgcacgtgtacatcagcgagcacgagcacttcacagacttcaatgccaccagcgccctcttctgggagcagcacgacctggtgtatggagactggaccagcggggagaacagtgatggctgctatgagcactttgctgagctggacatcccccagagcgtgcagcagaatggcagcatctacatccacgtgtacttcaccaagagcggcttccacccagacccccggcagaaggccctgtaccgccgcctggccaccgtgcacatgagcaggatgatcaacaagtacaagagaagacgcttccagaagaccaagaacctgctgactggagaaacagaggccgaccctgagatgatcaagagagcagaagattatggccctgtggaggtgatcagccactggcaccccaacatcaccatcaacatcgtggatgaccacaccccctgggtgaagggctctgtgcccccacccctggaccagtatgtgaagtttgatgctgtgtctggggactactaccccatcatctacttcaatgactactggaacctgcagaaggactactaccccatcaatgaaagcctggccagcctgcccctgcgggtgtccttctgccccctgagcctgtggcgctggcagctgtatgctgcccagagcaccaagagcccctggaacttcctgggagatgagctgtatgagcagagtgatgaggagcaggacagcgtgaaggtggccctgctggagaccaacccctacctgctggccctgaccatcatcgtgtccatcgtgcacagcgtgtttgagttcctggccttcaagaatgacatccagttctggaacagccggcagagcctggagggcctgtctgtgcgctctgtgttcttcggggtcttccagagctttgtggtgctgctgtacatcctggacaatgagaccaactttgtggtgcaggtgtctgtgttcatcggcgtgctgattgacctgtggaagatcaccaaggtgatggatgtgcggctggaccgggagcaccgggtggccggcatcttcccccggctgtccttcaaggacaagagcacctacatcgagagcagcaccaaggtgtatgatgacatggccttccgctacctgtcctggatcctcttccccctgctgggctgctatgctgtgtacagcctgctgtacctggagcacaagggctggtacagctgggtgctgtccatgctgtatggcttcctgctgaccttcggcttcatcaccatgaccccccagctgttcatcaactacaagctgaagtctgtggcccacctgccctggaggatgctgacctacaaggccctgaacaccttcattgatgacctgtttgcctttgtgatcaagatgcctgtgatgtacagaattggctgcctgagagatgatgtggtgttcttcatctacctgtaccagcgctggatctacagagtggaccccaccagggtgaatgaatttggcatgtctggagaggaccccacagctgctgcccctgtggccgaggtgcccacagctgctggggccctgacccccaccccagcccccaccaccaccacagccacccgggaggaggccagcaccagcctgcccaccaagcccacccagggcgccagcagcgccagcgagccccaggaggccccacccaagccagctgaggacaagaagaaggactag

SEQ ID NO: 100448 - DNA, 1968 bp, Artificial Sequence
  derived and/or modified sequence
atgagccggaaggcccacatcaccgagaaggtgaccagcaacggctctattgggcgcgacccccccgcagaaacacaaccacagaacccaccggctcagcccgcccctaatgcgtggcaagtcattaagggagtgttgtttagaatttttattatctgggcaatttcttcttggtttaggcgcggcccagccccccaggaccaagcgggacccgggggcgctcctagggttgcttctcgtaatctgttcccgaaggatacccttatgaatttacatgtctatatcagcgagcacgaacattttactgattttaacgccacttcagccctgttttgggaacagcacgacctggtgtatggggattggacctctggcgaaaatagtgacggatgctatgaacactttgcggagctggacattccacagagcgtccaacaaaatggcagcatatatatacatgtatactttactaagtctggctttcatccagatcctagacagaaagcgctttaccggcggctggcgaccgttcacatgtcaagaatgatcaacaagtacaagcgtcgccgatttcagaagaccaagaatctgctgaccggagagacagaagctgaccccgagatgattaaacgggccgaagattatggacccgtcgaggtcataagccactggcaccccaacataaccatcaacattgtggacgaccacacaccgtgggtgaaaggcagcgtacctccgcccctcgaccagtatgtgaagttcgacgcagtgagtggggactactatcccatcatctactttaatgactactggaatctgcaaaaagactactatccgataaatgagtctctggccagcttgcccctccgcgtctcattctgtccactttccctgtggcggtggcagctgtacgctgcccaaagcaccaagagtccctggaactttctgggagacgaactctatgagcagtcggacgaggaacaggatagcgttaaggtagccctgctagagactaacccctacctccttgctctgactattattgtctctatcgtacatagcgtgttcgagtttcttgcctttaagaacgacattcagttttggaattcacggcagtccctcgagggcttgtccgtgagatctgtgtttttcggagtcttccagtcattcgtggttctgttatacattttagacaacgaaaccaatttcgttgtccaagtctccgtgttcattggagtcctcatcgacctgtggaagattacgaaagtcatggacgtgcgactggatagggagcaccgcgtcgcaggaatttttccgagactgagttttaaggataaaagcacatatattgagtcatcgaccaaggtgtatgacgacatggcgttcagatatctgtcatggattctcttccctctgctcggatgttacgctgtatattccttgttgtatctggagcataagggctggtattcctgggttctctctatgctttacgggtttctcttaacatttgggttcatcaccatgaccccccagcttttcattaattacaaattgaagagcgtcgcgcatctcccatggagaatgctgacctacaaagctctcaataccttcatcgatgacctgttcgcatttgtcatcaaaatgccagttatgtatcggattggctgccttcgagacgatgttgtattcttcatttatctttatcagcgatggatatacagggttgatcctacaagggtgaacgagttcggcatgtccggagaggatcctacggcagccgcacccgtggctgaggtgccaacagctgcaggggccctcaccccgaccccagctccaaccaccaccacggcaacccgagaagaagcctctacatcacttccaaccaagcccacacagggagcgagctctgccagcgagccccaggaggcccctcctaagcccgcagaggataaaaagaaagattag

SEQ ID NO: 100449 - DNA, 1968 bp, Artificial Sequence
  derived and/or modified sequence
atgtctcggaaagcccacatcactgagaaggtgacatccaacggaagcatcggccgagatcctccggctgagacgcagcctcagaatcctccagcccaacctgccccaaatgcctggcaagttattaagggcgtgctcttcagaattttcattatttgggccattagttcatggttccgtcgtggacctgccccacaggatcaagccggtccaggaggagctcctcgcgtagcatccaggaacctctttcctaaagatactctgatgaacctgcacgtttacatttccgagcacgaacactttacagactttaacgctacaagtgccctcttttgggaacaacacgatttggtatacggcgactggacctcgggggaaaactcagacgggtgctatgaacatttcgcggaactggatattccccaatcagtacagcaaaatggttccatctatatacacgtgtacttcaccaagtctggttttcaccctgatccaaggcagaaagccctgtaccggagactggcaacggtgcatatgagccgcatgattaataaatacaagcgccgaaggtttcagaagactaaaaacctcttaaccggggagactgaagccgacccagagatgattaagcgggcagaggattatggaccggtggaggtgatatcacactggcatccaaatattactattaacattgtagacgaccacacgccctgggttaagggatctgtcccccctcccttggaccaatatgtgaaatttgacgccgtctcaggagattactaccccattatctatttcaacgactactggaaccttcagaaagactattaccctatcaacgaatcactggcctccttgcctctgagggtgagcttttgccccctgtctctgtggcgatggcagctgtatgctgctcagtctaccaaaagcccctggaatttcctgggagacgaactctacgaacagtcagatgaagaacaggactctgtcaaagtcgctctcctagagactaacccctacctgctcgccctgactatcattgtcagcatcgtgcactcagtttttgagttcttagcgttcaagaacgacattcagttctggaattccagacaatcactggagggcttgagcgttcgttcagtcttttttggcgtttttcagtcctttgttgtgctgctgtacattctggacaacgagacgaacttcgtggtacaagttagtgttttcataggagttctgattgatctctggaaaataaccaaggtaatggacgtgcgcttggatcgtgaacaccgagttgctggcatatttcctcggttgagcttcaaggacaaaagtacctacatcgaatcgagtacaaaagtctacgatgacatggccttccggtatctctcttggattctgttccccctgctggggtgttatgccgtatacagcctgctgtacctggagcataagggctggtattcctgggtcctcagcatgttatacggctttctgctcacgtttggttttatcacaatgactccacagctcttcataaattataaactgaaatcggtagcccacttgccatggaggatgttaacatataaagctttgaacacttttatcgatgatttgttcgcgtttgttattaagatgccagtcatgtacaggatcggctgcttacgggatgacgtggtattcttcatctatctgtatcagcgctggatttaccgggttgatcccaccagggtgaacgagtttggcatgagcggggaagatccgaccgcggctgcaccggtggcagaagtccctacggcagccggagcgcttactcctactcctgccccaaccaccacaacagctaccagggaggaggcctcaacttcgttgcctacaaagcctacccaaggcgcttcttcagcaagcgagccccaagaagcaccgcctaaacccgctgaggataagaaaaaggattag

SEQ ID NO: 100450 - DNA, 1704 bp, Artificial Sequence
  derived and/or modified sequence
atgaacctgcacgtgtacatcagcgagcacgagcacttcaccgacttcaacgccaccagcgccctgttctgggagcagcacgacctggtgtacggcgactggaccagcggcgagaacagcgacggctgctacgagcacttcgccgagctggacatcccccagagcgtgcagcagaacggcagcatctacatccacgtgtacttcaccaagagcggcttccaccccgaccccagacagaaggccctgtacagaagactggccaccgtgcacatgagcagaatgatcaacaagtacaagagaagaagattccagaagaccaagaacctgctgaccggcgagaccgaggccgaccccgagatgatcaagagagccgaggactacggccccgtggaggtgatcagccactggcaccccaacatcaccatcaacatcgtggacgaccacaccccctgggtgaagggcagcgtgcccccccccctggaccagtacgtgaagttcgacgccgtgagcggcgactactaccccatcatctacttcaacgactactggaacctgcagaaggactactaccccatcaacgagagcctggccagcctgcccctgagagtgagcttctgccccctgagcctgtggagatggcagctgtacgccgcccagagcaccaagagcccctggaacttcctgggcgacgagctgtacgagcagagcgacgaggagcaggacagcgtgaaggtggccctgctggagaccaacccctacctgctggccctgaccatcatcgtgagcatcgtgcacagcgtgttcgagttcctggccttcaagaacgacatccagttctggaacagcagacagagcctggagggcctgagcgtgagaagcgtgttcttcggcgtgttccagagcttcgtggtgctgctgtacatcctggacaacgagaccaacttcgtggtgcaggtgagcgtgttcatcggcgtgctgatcgacctgtggaagatcaccaaggtgatggacgtgagactggacagagagcacagagtggccggcatcttccccagactgagcttcaaggacaagagcacctacatcgagagcagcaccaaggtgtacgacgacatggccttcagatacctgagctggatcctgttccccctgctgggctgctacgccgtgtacagcctgctgtacctggagcacaagggctggtacagctgggtgctgagcatgctgtacggcttcctgctgaccttcggcttcatcaccatgaccccccagctgttcatcaactacaagctgaagagcgtggcccacctgccctggagaatgctgacctacaaggccctgaacaccttcatcgacgacctgttcgccttcgtgatcaagatgcccgtgatgtacagaatcggctgcctgagagacgacgtggtgttcttcatctacctgtaccagagatggatctacagagtggaccccaccagagtgaacgagttcggcatgagcggcgaggaccccaccgccgccgcccccgtggccgaggtgcccaccgccgccggcgccctgacccccacccccgcccccaccaccaccaccgccaccagagaggaggccagcaccagcctgcccaccaagcccacccagggcgccagcagcgccagcgagccccaggaggccccccccaagcccgccgaggacaagaagaaggactag

SEQ ID NO: 100451 - DNA, 1704 bp, Artificial Sequence
  derived and/or modified sequence
atgaatctgcacgtgtatatttccgaacatgaacacttcaccgacttcaacgcaacatcggcgcttttctgggagcagcacgatttagtctatggcgattggacctctggcgaaaactcagacggatgttatgaacacttcgctgagcttgacattccccagtctgtgcagcagaatggctctatctacatccatgtctactttactaagtcagggtttcacccagatcccagacagaaggctctgtatcgacgcttagctacagtgcacatgtccagaatgattaacaagtataagaggcgtcggtttcaaaaaaccaagaaccttctgacaggcgaaactgaagcagaccccgagatgattaaaagagccgaggattacggccccgtagaagtaatatctcactggcatccgaatatcacaatcaatatagtggacgatcataccccctgggtgaaagggagtgtccctcctccattagaccagtacgtcaagtttgatgccgtgtccggtgactattaccccattatctattttaacgactactggaatctgcagaaagattactacccaatcaatgagagtctggcttcgttgccactgcgcgtcagcttttgcccactgtccctttggcggtggcagctatacgcggcacaaagcaccaagtccccatggaacttcttgggagacgagttatatgagcagtctgatgaggaacaggactccgtgaaggtcgctctgctcgagactaacccttatttgctggccttgaccataatagtatctatcgttcacagcgtttttgagttcctggccttcaaaaatgacattcaattttggaacagccgccagtcactggaaggcctctccgttagaagtgtgttttttggagtgttccagagtttcgtcgtactgctatacattcttgataatgaaacgaacttcgttgtacaggtgtccgtgttcattggtgttctgattgatctgtggaagatcacaaaggtgatggacgtccgactggacagagaacatcgggtcgccgggatctttcccagactttctttcaaggataagtcaacatacatcgagtccagcacaaaggtctatgacgacatggccttccgctatctgtcctggattctgtttcctctcctcggctgctatgcggtttactctcttctgtacttggaacataaaggatggtacagttgggttctgtcaatgttgtacgggttcctacttacgttcgggtttattactatgaccccgcagctgtttatcaactacaagttgaaaagtgtggcgcatctaccatggcgtatgcttacctacaaagctctgaatacatttatcgatgatctgtttgcattcgtgatcaagatgcccgtcatgtatcggatcggttgccttcgggatgatgttgtgttcttcatctacctttatcaaaggtggatttaccgagttgatcccacaagggtaaacgaattcggcatgtctggcgaagaccctactgccgccgctcccgttgctgaggtgcctaccgctgctggtgccctgacaccaactcctgcccctaccactaccacagccacccgtgaggaggcctccacctctctgccaactaaacctactcagggcgcttcttcagcaagcgagccccaggaggccccccccaagccagctgaagacaaaaagaaggactag

SEQ ID NO: 100452 - DNA, 1704 bp, Artificial Sequence
  derived and/or modified sequence
atgaacctgcacgtgtacatcagcgagcacgagcacttcacagacttcaatgccaccagcgccctcttctgggagcagcacgacctggtgtatggagactggaccagcggggagaacagtgatggctgctatgagcactttgctgagctggacatcccccagagcgtgcagcagaatggcagcatctacatccacgtgtacttcaccaagagcggcttccacccagacccccggcagaaggccctgtaccgccgcctggccaccgtgcacatgagcaggatgatcaacaagtacaagagaagacgcttccagaagaccaagaacctgctgactggagaaacagaggccgaccctgagatgatcaagagagcagaagattatggccctgtggaggtgatcagccactggcaccccaacatcaccatcaacatcgtggatgaccacaccccctgggtgaagggctctgtgcccccacccctggaccagtatgtgaagtttgatgctgtgtctggggactactaccccatcatctacttcaatgactactggaacctgcagaaggactactaccccatcaatgaaagcctggccagcctgcccctgcgggtgtccttctgccccctgagcctgtggcgctggcagctgtatgctgcccagagcaccaagagcccctggaacttcctgggagatgagctgtatgagcagagtgatgaggagcaggacagcgtgaaggtggccctgctggagaccaacccctacctgctggccctgaccatcatcgtgtccatcgtgcacagcgtgtttgagttcctggccttcaagaatgacatccagttctggaacagccggcagagcctggagggcctgtctgtgcgctctgtgttcttcggggtcttccagagctttgtggtgctgctgtacatcctggacaatgagaccaactttgtggtgcaggtgtctgtgttcatcggcgtgctgattgacctgtggaagatcaccaaggtgatggatgtgcggctggaccgggagcaccgggtggccggcatcttcccccggctgtccttcaaggacaagagcacctacatcgagagcagcaccaaggtgtatgatgacatggccttccgctacctgtcctggatcctcttccccctgctgggctgctatgctgtgtacagcctgctgtacctggagcacaagggctggtacagctgggtgctgtccatgctgtatggcttcctgctgaccttcggcttcatcaccatgaccccccagctgttcatcaactacaagctgaagtctgtggcccacctgccctggaggatgctgacctacaaggccctgaacaccttcattgatgacctgtttgcctttgtgatcaagatgcctgtgatgtacagaattggctgcctgagagatgatgtggtgttcttcatctacctgtaccagcgctggatctacagagtggaccccaccagggtgaatgaatttggcatgtctggagaggaccccacagctgctgcccctgtggccgaggtgcccacagctgctggggccctgacccccaccccagcccccaccaccaccacagccacccgggaggaggccagcaccagcctgcccaccaagcccacccagggcgccagcagcgccagcgagccccaggaggccccacccaagccagctgaggacaagaagaaggactag

SEQ ID NO: 100453 - DNA, 1704 bp, Artificial Sequence
  derived and/or modified sequence
atgaacctgcacgtgtacatcagcgagcacgagcacttcaccgacttcaacgctacttccgcattattctgggagcagcatgacctggtttacggggactggacatcaggcgagaattccgatggctgttatgagcacttcgcagagctggatatacctcagtcagtccagcagaatggcagcatatatatccacgtttactttactaagagtggcttccatccagacccccgacagaaagccctatataggcggcttgccactgtccatatgtcgaggatgatcaacaagtacaagcgtcgcaggttccagaagacaaagaacttattgacaggcgaaactgaagcggatcctgagatgataaagagggccgaggattacggccctgtggaagttatcagccattggcacccaaatatcacgatcaatatcgtggatgatcatactccctgggtaaagggatcagtcccccctcccctcgaccaatatgtcaagttcgacgcagtttcaggcgactattatcccataatctattttaacgactattggaacctgcagaaggattactatcccattaacgaatctctcgcttctctgccactccgagtctccttttgccccctgtctctttggcggtggcagttgtacgcggcccagtctactaagtctccctggaattttctcggcgacgagctctatgaacaatccgacgaggagcaggattcagtgaaggtagcactgctcgagaccaacccatacctactggccctgacaataattgtatcaatcgtgcacagcgtgtttgagttcctcgccttcaaaaacgacattcagttttggaactccaggcagtcactggaagggctatccgtgcggtccgtgttctttggtgtatttcaatcattcgtcgtattactgtacattctggacaacgaaacaaatttcgtcgtgcaggtctctgtctttataggagtgctcatcgacctttggaaaatcacgaaagtgatggatgtgcgactagaccgcgagcatcgggtggctggcatttttcctcgcttgtcctttaaagacaaaagcacctatattgagtcaagtaccaaagtttatgatgacatggcatttagatacctttcttggatcctctttcctctgctgggttgctatgcagtgtattcgctgctttacctggagcacaaagggtggtattcatgggtgctgtcgatgctttacggctttcttctgacctttggattcattactatgactcctcagctcttcattaattacaaactgaagtcagtggctcatttgccttggagaatgctgacatacaaggcacttaacaccttcatagatgacctgtttgcatttgtaatcaaaatgcctgtaatgtacagaattgggtgcctcagagatgatgttgtctttttcatctacctttatcagcgctggatttaccgggtggatcccacccgcgtgaacgagttcggaatgtccggcgaggaccccaccgccgccgcccctgtggcggaagttcctactgcagccggcgccctgactccaacgccggcccccacgacaacaactgcaacccgcgaggaggcttctacgagccttccgacgaaacccacacagggcgccagctccgcttctgagccgcaggaagctcccccgaagcctgcagaagataagaagaaagattag

SEQ ID NO: 100454 - DNA, 1704 bp, Artificial Sequence
  derived and/or modified sequence
atgaatctacatgtctatatctctgagcacgagcattttaccgactttaatgccacttccgccctcttctgggaacagcacgaccttgtctacggggactggacatctggagagaattccgacgggtgttacgaacacttcgccgaattggatattccacagtcagtccagcagaatggtagtatatacatccacgtctacttcacaaagagcggatttcaccccgaccctcggcagaaggcgctgtacaggaggttggctacagtgcatatgtcgagaatgattaacaaatacaaacgaagaagattccaaaaaaccaagaatctcctcaccggcgagaccgaagccgatccagaaatgattaaacgagctgaagattatgggcctgtggaggtcatctcgcattggcaccccaatatcacaattaatattgtcgacgatcacaccccttgggtcaagggcagcgtccctcccccactcgaccaatacgtgaagttcgacgcagtctccggcgactattacccgataatttacttcaacgattactggaacttgcagaaagactattatcccatcaacgaatccctggcttccctcccattaagggtttcattttgccccctttccttatggagatggcagctctacgccgcacagtcaactaagagtccatggaatttccttggtgatgaactgtatgaacagtccgacgaagagcaggactccgtaaaggtggcgctcttagagactaacccttatcttttggctcttacaatcatagtctcaatcgttcactccgtgttcgaattcctagcctttaagaacgacattcaattttggaacagccgccagtctctggaagggctctccgtgagatctgtattctttggcgtcttccagagttttgtggtgcttctgtacatcctggacaacgaaaccaacttcgtggtgcaagtcagcgtatttattggggtgctgatcgatttatggaaaatcacaaaggtgatggacgtgagattggaccgggagcatcgtgtggctggaatattccctcgcctgagcttcaaagataaatcaacttatatcgagtcgtcgacaaaagtatatgacgatatggcattccgctacctgtcctggatactgttcccactgttaggatgttatgccgtatattccctgctgtacctcgaacataaggggtggtattcatgggtactgtctatgctgtatggcttcttgctcacatttggcttcattacgatgacaccccaacttttcatcaattataagctcaagtccgttgcacacctgccatggcgcatgctcacatacaaagcgctgaataccttcattgacgacctgttcgcttttgtcataaaaatgcctgttatgtatcgtatcggttgtctgagagatgatgttgttttctttatttatttatatcagcgttggatatacagggtcgatccaacccgtgtaaacgaatttggaatgagtggcgaagacccaactgcagcagcccctgttgccgaagtgccaaccgcagctggggctctgactcctacccccgctcctacgaccaccactgccactagggaggaggcttccacaagcctgcctaccaaacctacccagggggcatccagcgcgagcgagcctcaggaagcaccccctaagccagctgaggacaagaaaaaggattag

SEQ ID NO: 100455 - protein, 462 aa, Artificial Sequence
  derived and/or modified sequence
MSSAPTTPPSVDKVDGFSRKSVRKARQKRSQSSSQFRSQGKPIELTPLPLLKDVPSSEQPELFLKKLQQCCVIFDFMDTLSDLKMKEYKRSTLNELVDYITISRGCLTEQTYPEVVRMVSCNIFRTLPPSDSNEFDPEEDEPTLEASWPHLQLVYEFFIRFLESQEFQPSIAKKYIDQKFVLQLLELFDSEDPRERDYLKTVLHRIYGKFLGLRAFIRKQINNIFLRFVYETEHFNGVAELLEILGSIINGFALPLKAEHKQFLVKVLIPLHTVRSLSLFHAQLAYCIVQFLEKDPSLTEPVIRGLMKFWPKTCSQKEVMFLGELEEILDVIEPSQFVKIQEPLFKQIAKCVSSPHFQVAERALYYWNNEYIMSLIEENSNVILPIMFSSLYRISKEHWNPAIVALVYNVLKAFMEMNSTMFDELTATYNEKKKEKEREELWKKLEDLELKRGLRRDGIIPT

SEQ ID NO: 100456 - DNA, 1389 bp, Artificial Sequence
  derived and/or modified sequence
atgtcatccgctcccactactcccccaagtgtcgacaaagtggacgggttctcccgtaaatccgtgcgcaaggcgagacagaagaggagccagtcctcctcccagtttcgcagccaaggaaaacccatcgagctgacacccttgcctctgctaaaagacgtgcctagttctgagcaacctgagttatttctcaaaaagctgcagcagtgctgcgtgatttttgattttatggacacccttagtgatctaaagatgaaagagtacaaaaggtcgacacttaacgaactggtcgattacatcactatctcaagaggctgccttacagaacagacataccccgaggtggtccgaatggtgtcatgcaatatctttagaacgcttcctcctagcgactccaacgaattcgacccagaggaggatgaacccacccttgaggcatcctggccccatctgcagctggtatatgagttctttatcagatttctggagtctcaggaatttcagccaagtatcgcaaagaaatatattgatcaaaaattcgtccttcaattactggagttgtttgattctgaggatcccagggagagggattacttaaagaccgtattacacagaatttacgggaaatttctcgggctccgggcgttcattcgcaagcagatcaacaacatttttcttagattcgtgtatgaaactgagcacttcaacggcgtcgctgaattgctggaaattttgggaagcatcattaacggatttgctttgccattgaaggctgagcacaagcagtttctcgtcaaagtgctgataccgctccacacagtgagatcgctcagcctcttccatgcacagctagcatactgtatcgtccaatttctcgaaaaggacccatctctcactgaacccgtcattcggggactcatgaaattttggccaaaaacctgcagtcagaaggaggtgatgtttctgggggaactggaagaaatcctcgacgtcattgagccaagccagttcgtcaagattcaggaaccactcttcaagcagatagctaagtgcgtatccagtcctcactttcaggtggcagaacgcgcactgtactactggaataacgagtacataatgtccctaatcgaggagaattctaacgtgatccttcccataatgttcagctctctctaccgcatttccaaggagcattggaacccagccattgtggcacttgtgtataatgtgttaaaggcgtttatggagatgaacagtacaatgtttgacgaactcaccgccacatataacgaaaaaaaaaaagagaaagaacgtgaagaactgtggaagaaactggaagacctggaactgaagaggggcttacgacgagacggaattattcccacatag

SEQ ID NO: 100457 - DNA, 1389 bp, Artificial Sequence
  derived and/or modified sequence
atgagcagcgcccccaccaccccacccagcgtggacaaggtggatggcttcagcaggaagtctgtgaggaaggcccggcagaagaggagccagagcagcagccagttccgcagccagggcaagcccatcgagctgacccccctgcccctgctgaaggatgtgcccagcagcgagcagcctgagctgttcctgaagaagctgcagcagtgctgcgtcatctttgacttcatggacaccctgagtgacctgaagatgaaggagtacaagaggagcaccctgaatgagctggtggactacatcaccatcagccggggctgcctgacagagcagacctacccagaggtggtgaggatggtgtcctgcaacatcttccgcaccctgccccccagcgacagcaatgaatttgatcctgaagaagatgagcccaccctggaggcctcctggccccacctgcagctggtgtatgagttcttcatccgcttcctggagagccaggagttccagcccagcatcgccaagaagtacatcgaccagaagtttgtgctgcagctgctggagctgtttgacagcgaggacccccgggagcgggactacctgaagacagtgctgcaccgcatctacggcaagttcctgggcctgcgggccttcatcaggaagcagatcaacaacatcttcctgcgctttgtgtatgaaacagagcacttcaacggggtggccgagctgctggagatcctgggcagcatcatcaatggatttgccctgcccctgaaggccgagcacaagcagttcctggtgaaggtgctgatccccctgcacacagtgcgcagcctgagcctcttccacgcccagctggcctactgcatcgtgcagttcctggagaaggaccccagcctgacagagcctgtgatccggggcctgatgaagttctggcccaagacctgcagccagaaggaggtgatgttcctgggggagctggaggagatcctggatgtgattgagcccagccagtttgtgaagatccaggagcccctcttcaagcagatcgccaagtgtgtgagcagcccccacttccaggtggccgagcgggccctgtactactggaacaatgagtacatcatgagcctcatcgaggagaacagcaatgtcatcctgcccatcatgttcagcagcctgtaccgcatcagcaaggagcactggaacccagccatcgtggccctggtgtacaacgtgctgaaggccttcatggagatgaacagcaccatgtttgatgagctgacagccacctacaatgagaagaagaaggagaaggagcgggaggagctgtggaagaagctggaggacctggagctgaagaggggcctgcggagagatggcatcatccccacctag

SEQ ID NO: 100458 - DNA, 1389 bp, Artificial Sequence
  derived and/or modified sequence
atgagcagcgcccccaccaccccccccagcgtggacaaggtggacggcttctccaggaaatctgttcggaaagcccggcagaaacgttcccagtcctctagccagttccgctcacagggtaaacccattgagctgacacccctgcctttattgaaggatgtcccgtccagcgagcagccagaattgtttctgaaaaaacttcagcagtgctgtgtgatcttcgactttatggacacactgtcagatcttaagatgaaggaatacaagcggagtacactcaatgaactcgtagactacattacaatcagcagaggctgtttgacggagcagacttaccccgaggtcgtccgaatggttagctgcaacatctttaggactctccctccgtcagacagcaacgaatttgaccccgaagaagatgaacctacattagaggccagttggccacacctgcagttagtgtacgagttctttatccgcttcctcgaatcacaggagtttcagccatccatcgcaaagaaatatattgatcagaagtttgtgttgcagttgttggaactgttcgattcagaggacccgcgcgagagggattacctcaagacggtgttgcaccgcatttatggaaagttcttaggcctgcgcgcttttatccgaaagcagatcaataatatttttcttagattcgtttatgagactgaacattttaacggtgtggcagagctcctcgagatcctcggcagcatcatcaatgggttcgctctgccactgaaggcagagcacaaacagtttctggttaaggtcctgatcccccttcacacagtacgaagcctatcgctgtttcacgctcagttagcctactgcattgtacaatttctagaaaaagacccctctctaactgaacccgtgatccgcggcctgatgaaattctggcctaagacctgttctcaaaaggaggtaatgttccttggcgagctcgaggaaatcctagacgttatagagccatcccagttcgtgaagatacaagagcccttgttcaaacagatcgcaaaatgcgtgagtagtcctcatttccaggtagccgagcgagccctgtattattggaataacgaatatataatgtccctgattgaagagaatagcaatgtgatcctgcccattatgttctcatccctgtacagaatctcaaaagaacactggaatcctgccatcgtggcactcgtgtataatgtactaaaagctttcatggagatgaacagtaccatgtttgatgaactgacagcaacatataacgagaaaaagaaagagaaagagcgtgaggagctttggaaaaagctggaagatctagagctaaagcgcgggcttcgacgtgatggtatcatcccaacctag

SEQ ID NO: 100459 - DNA, 1389 bp, Artificial Sequence
  derived and/or modified sequence
atgtcaagtgcccctacaactcccccttctgtggacaaggtggacgggtttagtaggaagtcagtgagaaaagcccgtcagaaaagaagtcagtcatcttcccagtttagatcccagggaaagcccatcgaactgacgccgctgccactcctgaaggatgtcccctcttctgagcaaccggaactgtttttgaaaaaactgcaacaatgctgtgtgatttttgattttatggatacccttagcgacctgaaaatgaaggaatacaaaaggtcgacgctgaacgagctcgtcgactatattactatttctaggggatgtctgaccgaacaaacgtaccccgaggtcgtgcggatggtgtcctgcaatatctttaggacactccccccttccgattccaatgaattcgacccggaagaggatgaacctacgttggaggcctcttggcctcacctccagttggtttatgaattctttattcgctttttggagagtcaggagttccagccctctattgctaagaaatatatagaccagaaattcgtcctgcagctgttagagctattcgattctgaagaccctcgagagcgagattacttaaaaacagtcctccacagaatctacggaaaattcttaggcctccgggctttcattaggaagcagatcaataacatttttctcaggttcgtctatgagaccgaacacttcaacggcgtggccgaactgctcgagatcttgggcagcatcatcaacggattcgccctcccactgaaggccgaacataagcagtttttggtgaaggtactcataccccttcacactgtcaggtcgttgagtttgttccacgcccagttggcttattgcattgtccaatttctggaaaaagacccatcactgaccgagccggttatccggggactgatgaaattctggcctaagacctgcagtcagaaggaagtaatgttccttggcgagcttgaggaaatcttggacgtcatcgagcccagccagttcgtcaaaatacaagagcccctctttaagcaaatcgctaaatgtgtcagtagcccccattttcaggtcgccgaacgcgcactgtattactggaataatgagtacataatgagtcttatagaggaaaattctaacgtcatcctgcctatcatgttcagttccttataccgcattagtaaggaacactggaaccctgctatcgtggcactggtgtacaacgtgctgaaagcctttatggagatgaattcaaccatgtttgatgaactgacagcaacctacaacgagaagaagaaagaaaaagagcgagaggaactgtggaaaaagcttgaggaccttgagctgaaacgtggcttgagaagagacggaatcataccaacttag

SEQ ID NO: 100460 - DNA, 2164 bp, Artificial Sequence
  derived and/or modified sequence
attgactgggacccaccgcgggtagcgaaaggtggctctggcagcggcggctccagctcctgcggctcctcctccttattctgtccccttctcttgctgccgctgcagatccagtcttcctccctcccttccccccctccccacgtcgtcgccgccgccgccgggtccggggcaacgagctgaggcgccgcccgccaggaatgtgagcgaggagccaccggcggagccgcaacggggtcggtgccgatttgatgggacgggcccgcgggggaggatcgtgaggccgccgccgccaccggaacgctgaggttcgggtccggccgtgaggcctagaggctccgccgccgcggaaccggagggaccccgtaccggacagccgtcgccccaggctccccgcagctgcccggacctccccctgcacgtcccggtcccgccgcccgcccccgctgcggccacctcgcccgtctcccgcccctccaagccacagatcatctttggattcttccccagaagcttcaagtagggatatgtcctcagcaccaactactcctccatcagtggataaagtagacggattttctcggaagtccgtcagaaaagccagacagaagaggtcgcaaagttcctcacagtttaggtctcaaggcaagcctattgagttaacacctctgccgctgctaaaagacgttccatcctcagagcagcctgaactgttcctaaagaaacttcagcagtgctgtgtcatttttgacttcatggacacgctatctgatcttaaaatgaaagaatacaagcgctccactcttaatgaactggtggactacattacaataagcagaggctgtttgacagagcagacttaccctgaagtagttagaatggtatcttgcaatatattcagaactctccctcctagtgacagcaatgaatttgatccagaagaagatgaacctacccttgaggcatcgtggccacacttacagcttgtatatgaatttttcatacgatttttggaaagccaagaattccaacccagcattgccaaaaaatatatagatcagaaatttgtattacagcttctggagctatttgacagcgaagaccctcgggaacgggactacttaaaaacagtcttacacagaatttatggcaagtttcttggtcttagagcatttatccgaaaacagattaacaatatttttctaaggtttgtttatgaaacagaacacttcaatggtgtagctgaactgctggaaatattaggaagtattatcaatggctttgctttacctcttaaggcagaacacaaacagtttctggtgaaagtattgatccctttacacactgtcaggagcttatcactcttccatgcacagctggcatattgtatagtacagtttctggagaaagatccttcactcacagaaccagttattagggggttaatgaaattttggcctaaaacatgtagtcaaaaagaggtcatgttccttggggaactggaagaaatattggatgtgattgaaccttcacaatttgttaaaatccaagaacctttgtttaaacaaatcgccaagtgtgtatctagcccccattttcaggtggcagaaagagcactctattattggaataatgaatacatcatgagtttgatagaagaaaactctaacgtcatccttcccatcatgttttccagcctttataggatttcaaaagaacattggaatccggctattgtggcgttggtgtacaatgtgttgaaggcatttatggaaatgaacagcaccatgtttgacgagctgacagccacatacaatgagaaaaagaaagaaaaggagcgtgaagaattgtggaaaaaattggaggatctggagttaaagagaggtcttagacgtgatggaataattccaacttaacaaaaacaatgacaacaacattactaacctgtggagtcacacgtttatgtagtagaagatggagcaacagttttctgtattgtgcaactttacagtagatttcacctttgtttcattattacagcagcactgtatatacctgtctctaagtaaaggaaaaaacaaaataaggacttcaatccaaagtttggacagtagatggacttctcagaactttgcaaacataatcattgttctcaccctctttt

SEQ ID NO: 100461 - DNA, 1389 bp, Artificial Sequence
  derived and/or modified sequence
atgagcagcgcccccaccaccccccccagcgtggacaaggtggacggcttcagcagaaagagcgtgagaaaggccagacagaagagaagccagagcagcagccagttcagaagccagggcaagcccatcgagctgacccccctgcccctgctgaaggacgtgcccagcagcgagcagcccgagctgttcctgaagaagctgcagcagtgctgcgtgatcttcgacttcatggacaccctgagcgacctgaagatgaaggagtacaagagaagcaccctgaacgagctggtggactacatcaccatcagcagaggctgcctgaccgagcagacctaccccgaggtggtgagaatggtgagctgcaacatcttcagaaccctgccccccagcgacagcaacgagttcgaccccgaggaggacgagcccaccctggaggccagctggccccacctgcagctggtgtacgagttcttcatcagattcctggagagccaggagttccagcccagcatcgccaagaagtacatcgaccagaagttcgtgctgcagctgctggagctgttcgacagcgaggaccccagagagagagactacctgaagaccgtgctgcacagaatctacggcaagttcctgggcctgagagccttcatcagaaagcagatcaacaacatcttcctgagattcgtgtacgagaccgagcacttcaacggcgtggccgagctgctggagatcctgggcagcatcatcaacggcttcgccctgcccctgaaggccgagcacaagcagttcctggtgaaggtgctgatccccctgcacaccgtgagaagcctgagcctgttccacgcccagctggcctactgcatcgtgcagttcctggagaaggaccccagcctgaccgagcccgtgatcagaggcctgatgaagttctggcccaagacctgcagccagaaggaggtgatgttcctgggcgagctggaggagatcctggacgtgatcgagcccagccagttcgtgaagatccaggagcccctgttcaagcagatcgccaagtgcgtgagcagcccccacttccaggtggccgagagagccctgtactactggaacaacgagtacatcatgagcctgatcgaggagaacagcaacgtgatcctgcccatcatgttcagcagcctgtacagaatcagcaaggagcactggaaccccgccatcgtggccctggtgtacaacgtgctgaaggccttcatggagatgaacagcaccatgttcgacgagctgaccgccacctacaacgagaagaagaaggagaaggagagagaggagctgtggaagaagctggaggacctggagctgaagagaggcctgagaagagacggcatcatccccacctag

SEQ ID NO: 100462 - DNA, 1176 bp, Artificial Sequence
  derived and/or modified sequence
atggatactttgagcgatctgaagatgaaagagtacaagagatcaactcttaacgaacttgtggactatatcaccatttcaagggggtgcctgacggagcaaacctatcccgaggtagtccgaatggtttcttgcaatatcttccgaaccctgcccccctccgactcgaacgagtttgatcccgaagaggatgagcctactctcgaggcctcttggccccacctgcaattggtgtatgaattttttatcagatttctggaaagccaggaattccagcctagcatcgctaagaaatatatcgatcaaaagttcgttctccagctcctagaactgttcgactctgaggaccccagggaaagggattacctgaaaactgtgctccacagaatttatggtaagtttctggggttaagagcttttatcagaaagcagatcaacaatatcttcctgagattcgtgtacgagacagaacacttcaatggggtggcagaactgttagagatcctcgggtcaatcattaatgggttcgcactgcctctcaaggcagagcacaaacagtttctagtgaaagtgctgataccgttgcacaccgtgagatcactcagtctcttccacgcacagcttgcatattgcatcgtacagttcctggaaaaagatccctcgctcacagagccggtcattcgtgggcttatgaagttctggccgaagacatgctcgcagaaggaagttatgttcctgggtgagctagaggagatcctggacgtcatcgagcccagccagtttgtaaagatacaggagccgctcttcaagcaaattgccaagtgcgtctccagcccacacttccaggtggccgagagggccctgtactactggaataacgaatatatcatgtctctcattgaagagaactcaaacgttatacttcccataatgttttcatccctttatagaatttcaaaggagcactggaaccctgctatagtcgcactggtgtataacgtcctgaaggccttcatggaaatgaacagtactatgtttgatgaactcacggcaacctacaaaagtgaccgacaaagagagaagaaaaaggagaaggagcgcgaggagttgtggaaaaagctagaagatctcgaactgaagcggggactgaggcgcgacggaatcattccaacttag

SEQ ID NO: 100463 - DNA, 1176 bp, Artificial Sequence
  derived and/or modified sequence
atggacaccctgagtgacctgaagatgaaggagtacaagaggagcaccctgaatgagctggtggactacatcaccatcagccggggctgcctgacagagcagacctacccagaggtggtgaggatggtgtcctgcaacatcttccgcaccctgccccccagcgacagcaatgaatttgatcctgaagaagatgagcccaccctggaggcctcctggccccacctgcagctggtgtatgagttcttcatccgcttcctggagagccaggagttccagcccagcatcgccaagaagtacatcgaccagaagtttgtgctgcagctgctggagctgtttgacagcgaggacccccgggagcgggactacctgaagacagtgctgcaccgcatctacggcaagttcctgggcctgcgggccttcatcaggaagcagatcaacaacatcttcctgcgctttgtgtatgaaacagagcacttcaacggggtggccgagctgctggagatcctgggcagcatcatcaatggatttgccctgcccctgaaggccgagcacaagcagttcctggtgaaggtgctgatccccctgcacacagtgcgcagcctgagcctcttccacgcccagctggcctactgcatcgtgcagttcctggagaaggaccccagcctgacagagcctgtgatccggggcctgatgaagttctggcccaagacctgcagccagaaggaggtgatgttcctgggggagctggaggagatcctggatgtgattgagcccagccagtttgtgaagatccaggagcccctcttcaagcagatcgccaagtgtgtgagcagcccccacttccaggtggccgagcgggccctgtactactggaacaatgagtacatcatgagcctcatcgaggagaacagcaatgtcatcctgcccatcatgttcagcagcctgtaccgcatcagcaaggagcactggaacccagccatcgtggccctggtgtacaacgtgctgaaggccttcatggagatgaacagcaccatgtttgatgagctgacagccacctacaagagtgaccggcagcgggagaagaagaaggagaaggagcgggaggagctgtggaagaagctggaggacctggagctgaagaggggcctgcggagagatggcatcatccccacctag

SEQ ID NO: 100464 - DNA, 1176 bp, Artificial Sequence
  derived and/or modified sequence
atggacaccctgagcgacctgaagatgaaggagtacaagcggagcacactgaatgagctggttgattatatcacaattagtagaggctgcctgaccgaacagacataccccgaggtggtgaggatggtctcctgcaatattttccggactcttccacccagcgactcaaatgaattcgaccccgaagaggacgagccaacactcgaggccagttggccccaccttcagctggtgtatgagttcttcattagattcctggaatcacaggagtttcagccctctattgctaaaaaatatatcgaccagaaatttgtgctgcaactgctggagctcttcgatagtgaggatcctcgtgaacgcgattacctgaagaccgtgttgcatcgcatttatggaaagtttctcggccttcgagcatttatccggaagcaaataaataatatctttctccgcttcgtgtacgagaccgaacacttcaacggtgtggctgaactgttggaaatattgggcagcatcatcaacggtttcgctctgcctttaaaagcagagcacaaacaatttctggttaaggtcttgatcccactgcacaccgtacgatccttatccctgtttcacgcccaattagcctattgtattgttcagtttctggaaaaggatcctagtttgacagagcctgtgattcggggtctgatgaaattctggcccaagacatgttctcagaaagaggtgatgttcctgggggaattggaggaaattctggacgtgattgagcccagccaatttgtcaagatccaggaaccgctgttcaagcagatcgctaaatgcgtgagctccccacattttcaggtcgctgaaagagcgctctattactggaacaatgaatacatcatgagcctaattgaggaaaacagtaacgtgatcctaccaataatgtttagttccctgtacagaatttccaaggaacactggaaccctgccatagtcgctttggtctataatgtgctcaaagcctttatggagatgaacagcaccatgttcgacgagctgaccgctacctataagtccgatcggcaacgtgagaagaagaaagaaaaggaacgagaagagctctggaagaagctcgaggacctggagctcaagcgcggacttaggcgagatggaatcatccccacctag

SEQ ID NO: 100465 - DNA, 1176 bp, Artificial Sequence
  derived and/or modified sequence
atggacacgctgtctgacctcaagatgaaagaatataagaggtcaacgctgaacgaactggtggattacataactatttctaggggatgtctcactgaacagacctatccagaggttgtacggatggtctcatgtaatatctttagaacattgccgcctagcgacagcaacgaattcgacccggaagaggacgagcccaccttggaagcgtcctggccccacctgcaattagtttacgagttttttatcagattcctagagagccaagagtttcagccttccatcgccaagaaatatattgatcaaaagtttgtcctgcaactgttggagctcttcgacagcgaagaccccagagagagagattaccttaagactgtgttgcatagaatttatggtaagttcctcgggcttcgggcattcatccgtaaacagattaacaacatctttctgcgatttgtctatgagactgagcactttaatggcgtcgccgaattactggaaatcctaggctcgatcattaacggcttcgccctgccgttaaaagccgaacataagcagttcctcgtgaaggtgctaattcctcttcacaccgtccggagcttaagtctatttcacgctcagctcgcctactgcatcgtgcagtttcttgaaaaagacccctctcttaccgagcccgttattcgtggcctgatgaagttttggcctaaaacatgttcgcagaaggaggtgatgttcctgggcgaattggaggaaatcttggatgtaattgagccttctcagttcgtgaagatccaagaaccacttttcaagcagattgctaagtgcgttagcagtccacactttcaggtagctgagcgagccctgtattattggaacaatgagtatattatgagccttatcgaagaaaatagcaacgttattttacctatcatgttttcatcgctgtaccgaatctcaaaggagcattggaatccagcaattgttgcactagtatacaatgttctgaaggcctttatggagatgaatagcactatgtttgatgaactgaccgctacgtacaagagcgaccggcagagagagaaaaaaaaagaaaaggaaagagaggagctgtggaagaaactcgaggatctggagttgaagagaggtctgagacgggacgggatcatccccacttag

SEQ ID NO: 100466 - DNA, 1176 bp, Artificial Sequence
  derived and/or modified sequence
atggacaccctgagcgacctgaagatgaaggagtacaagagaagcaccctgaacgagctggtggactacatcaccatcagcagaggctgcctgaccgagcagacctaccccgaggtggtgagaatggtgagctgcaacatcttcagaaccctgccccccagcgacagcaacgagttcgaccccgaggaggacgagcccaccctggaggccagctggccccacctgcagctggtgtacgagttcttcatcagattcctggagagccaggagttccagcccagcatcgccaagaagtacatcgaccagaagttcgtgctgcagctgctggagctgttcgacagcgaggaccccagagagagagactacctgaagaccgtgctgcacagaatctacggcaagttcctgggcctgagagccttcatcagaaagcagatcaacaacatcttcctgagattcgtgtacgagaccgagcacttcaacggcgtggccgagctgctggagatcctgggcagcatcatcaacggcttcgccctgcccctgaaggccgagcacaagcagttcctggtgaaggtgctgatccccctgcacaccgtgagaagcctgagcctgttccacgcccagctggcctactgcatcgtgcagttcctggagaaggaccccagcctgaccgagcccgtgatcagaggcctgatgaagttctggcccaagacctgcagccagaaggaggtgatgttcctgggcgagctggaggagatcctggacgtgatcgagcccagccagttcgtgaagatccaggagcccctgttcaagcagatcgccaagtgcgtgagcagcccccacttccaggtggccgagagagccctgtactactggaacaacgagtacatcatgagcctgatcgaggagaacagcaacgtgatcctgcccatcatgttcagcagcctgtacagaatcagcaaggagcactggaaccccgccatcgtggccctggtgtacaacgtgctgaaggccttcatggagatgaacagcaccatgttcgacgagctgaccgccacctacaagagcgacagacagagagagaagaagaaggagaaggagagagaggagctgtggaagaagctggaggacctggagctgaagagaggcctgagaagagacggcatcatccccacctag

SEQ ID NO: 100467 - protein, 423 aa, Artificial Sequence
  derived and/or modified sequence
MKQDVLNCTEGPIHSNGTSMISLIIPPKDQISRVAKMLADEFGTASNIKSRVNRLSVLGAITSVQQRLKLYNKVPPNGLVVYCGTIVTEEGKEKKVNIDFEPFKPINTSLYLCDNKFHTEALTALLSDDSKFGFIVIDGSGALFGTLQGNTREVLHKFTVDLPKKHGRGGQSALRFARLRMEKRHNYVRKVAETAVQLFISGDKVNVAGLVLAGSADFKTELSQSDMFDQRLQSKVLKLVDISYGGENGFNQAIELSTEVLSNVKFIQEKKLIGRYFDEISQDTGKYCFGVEDTLKALEMGAVEILIVYENLDIMRYVLHCQGTEEEKILYLTPEQEKDKSHFTDKETGQEHELIESMPLLEWFANNYKKFGATLEIVTDKSQEGSQFVKGFGGIGGILRYRVDFQGMEYQGGDDEFFDLDDY

SEQ ID NO: 100468 - DNA, 1736 bp, Artificial Sequence
  derived and/or modified sequence
atagtagaatggcctgcctcaggccatgtgaaaagttgatttcagcacaagaatttgacattctggtttccagcccaggattgtcatttatgggtagatttgcaattttagaatgacagcccctccaagctcttcattattactgttatatgaaacaggatgtgcttaattgtactgaaggcccaattcacagcaatggcaccagcatgatatcattgatcattcctcccaaagaccagatttcacgagtggcaaaaatgttagcggatgagtttggaactgcatctaacattaagtcacgagtaaaccgcctttcagtcctgggagccattacatctgtacaacaaagactcaaactttataacaaagtacctccaaatggtctggttgtatactgtggaacaattgtaacagaagaaggaaaggaaaagaaagtcaacattgactttgaacctttcaaaccaattaatacgtcattgtatttgtgtgacaacaaattccatacagaggctcttacagcactactttcagatgatagcaagtttggattcattgtaatagatggtagtggtgcactttttggcacactccaaggaaacacaagagaagtcctgcacaaattcactgtggatctcccaaagaaacacggtagaggaggtcagtcagccttgcgttttgcccgtttaagaatggaaaagcgacataactatgttcggaaagtagcagagactgctgtgcagctgtttatttctggggacaaagtgaatgtggctggtctagttttagctggatccgctgactttaaaactgaactaagtcaatctgatatgtttgatcagaggttacaatcaaaagttttaaaattagttgatatatcctatggtggtgaaaatggattcaaccaagctattgagttatctactgaagtcctctccaacgtgaaattcattcaagagaagaaattaataggacgatactttgatgaaatcagccaggacacgggcaagtactgttttggcgttgaagatacactaaaggctttggaaatgggagctgtagaaattctaatagtctatgaaaatctggatataatgagatatgttcttcattgccaaggcacagaagaggagaaaattctctatctaactccagagcaagaaaaggataaatctcatttcacagacaaagagaccggacaggaacatgagcttatcgagagcatgcccctgttggaatggtttgctaacaactataaaaaatttggagctacgttggaaattgtcacagataaatcacaagaagggtctcagtttgtgaaaggatttggtggaattggaggtatcttgcggtaccgagtagatttccagggaatggaataccaaggaggagacgatgaattttttgaccttgatgactactaggtagtcgacatgggtccggcaaaacgtgcctcaccctccagcatccaacccaaggagcatacccatggtggaatccaaacagatccctgccttacaattggaacatttccagaacttaatccatgagcattggatattgaaaagaaaaccgaaacaaaaccagacccagccctacactttggtttgtcatggtgtcagcgcagcagcctacaactaagttcctaaacgccactttggactaatttaaaaaagaatcccagtttttacttttactggatggtgaaattggttgctcttgtattttatgaaaaaaaa

SEQ ID NO: 100469 - DNA, 1272 bp, Artificial Sequence
  derived and/or modified sequence
atgaagcaagatgtgctgaattgtacagaaggccccattcattccaacggaacgtccatgatttccctgataatccctcccaaagaccagatttctcgagtggcaaagatgctggccgatgaatttggcaccgcctccaatattaagtctagggtcaaccgactctctgtcctaggtgccatcacttctgtccagcaacggttaaaattatacaataaggtgccacccaacggtttagtggtttactgtggaacaatagtcactgaagaaggaaaagagaagaaggtgaacatcgactttgaacccttcaagccaatcaatacatcattatatctatgcgacaataaattccatacagaggctctcacggcactgctcagcgacgacagtaagtttggcttcatagtgattgacgggtctggcgccttgtttggcacccttcagggtaacaccagagaagtgctccacaagtttaccgtggacctgccaaaaaaacatggccgtggcggccaatcagctctgcgattcgccagactcaggatggaaaagaggcataattacgtgaggaaagtggcagagaccgctgtgcagctgttcatctctggtgacaaggtgaatgtcgcaggtttagtactcgccggatccgcagactttaaaaccgaactgagccaatcagacatgttcgaccagaggcttcagtcgaaggtgcttaagctggttgatatttcttacggcggggaaaatgggttcaatcaggccatcgagctgagcacggaagtgctctctaacgttaagttcattcaagagaagaagctgatcggccgatattttgacgagattagccaggataccggaaagtactgtttcggggtggaggacactctgaaagcattggaaatgggagctgtggagatcctgattgtgtacgagaacctggacattatgcgatacgtgcttcactgccagggcactgaggaggagaagattttgtacttaacacccgagcaggagaaagataagagtcactttacagacaaggagactggacaggaacacgagttaatcgagagcatgcctctcttggaatggtttgccaataattacaaaaagtttggagctactctggaaatcgtcactgacaagagtcaggagggaagtcagtttgtaaaaggatttgggggcatagggggtattctgaggtaccgcgtggatttccaggggatggagtatcagggaggggatgacgagtttttcgacttggacgactactag

SEQ ID NO: 100470 - DNA, 1272 bp, Artificial Sequence
  derived and/or modified sequence
atgaagcaggatgtgctgaactgcacagagggccccatccacagcaatggcacctccatgatcagcctcatcatcccccccaaggaccagatcagccgggtggccaagatgctggctgatgaatttggaacagccagcaacatcaagagccgggtgaaccggctgtctgtgctgggcgccatcacctctgtgcagcagaggctgaagctgtacaacaaggtgcccccaaatggcctggtggtgtactgcggcaccatcgtgacagaggagggcaaggagaagaaggtgaacatcgactttgagcccttcaagcccatcaacaccagcctgtacctgtgtgacaacaagttccacacagaggccctgacagccctgctgagtgatgacagcaagtttggcttcatcgtgattgatggcagcggggccctgtttggcaccctgcagggcaacacccgggaggtgctgcacaagttcaccgtggacctgcccaagaagcacggccggggcggccagagcgccctgcgctttgcccggctgaggatggagaagaggcacaactacgtgaggaaggtggccgagacagctgtgcagctgttcatcagcggggacaaggtgaatgtggccggcctggtgctggccggcagcgctgacttcaagacagagctgagccagagcgacatgtttgaccagaggctgcagagcaaggtgctgaagctggtggacatctcctatggaggagaaaatggcttcaaccaggccatcgagctgagcacagaggtgctgagcaatgtgaagttcatccaggagaagaagctgattggccgctactttgatgagatcagccaggacaccgggaagtactgctttggagtggaggacaccctgaaggccctggagatgggcgctgtggagatcctgattgtgtatgagaacctggacatcatgagatatgtgctgcactgccagggcacagaggaggagaagatcctgtacctgaccccagagcaggagaaggacaagagccacttcacagacaaggagaccggccaggagcacgagctgattgaatccatgcccctgctggagtggtttgccaacaactacaagaagtttggagccaccctggagatcgtgacagacaagagccaggagggcagccagtttgtgaagggctttggaggcattggaggcatcctgcgctacagagtggacttccagggcatggagtaccagggcggagatgatgagttctttgacctggatgactactag

SEQ ID NO: 100471 - DNA, 1272 bp, Artificial Sequence
  derived and/or modified sequence
atgaagcaggacgtgctgaactgcaccgagggccccatccacagcaacggaacttctatgatcagcttaataatcccccccaaagaccagatctctcgtgtggccaagatgctagcagacgaatttgggacggcctccaacattaagagtagagtcaatcgtctgtcagtgctgggagcaattactagcgttcaacagagactcaagctgtataacaaagtgcctcccaatggtcttgtggtgtactgtggtaccatcgtaactgaagaggggaaggagaaaaaggttaatatcgatttcgagcccttcaaacctatcaataccagcctttacctctgtgacaacaagttccatactgaggccctgactgctttgctgtctgatgacagcaaatttgggttcattgtcatcgatggttcgggcgccctgttcggcacactgcaaggtaacactcgagaggttctgcataaatttactgttgatctgcccaagaagcatgggcggggaggacagtccgccctgaggttcgcccgtctaaggatggagaagcgacacaactatgtgcgcaaggtggcggaaacagctgtgcagttgtttatctctggggacaaggttaacgtggctggtctcgtgctcgctggatccgccgactttaagactgagttgagccagtccgacatgttcgatcagcgcctgcagtcaaaggtgctgaagctggtggacatatcctatgggggcgaaaatggatttaatcaggcaatcgaactgagcacagaagtactgagcaatgtgaagttcatccaggaaaaaaagctgatcggtaggtattttgatgaaatatcacaggatacggggaaatattgtttcggagtcgaagacacgctgaaagcgctggagatgggagccgtggaaattctgatcgtgtacgaaaacctggacattatgcgctacgtgctgcattgtcagggaacagaagaagaaaagatactctatctcaccccagagcaggaaaaagataaatcacatttcacagacaaagagacagggcaagagcacgaactgattgagagcatgcccctgcttgagtggttcgccaataactataaaaaatttggtgccaccttagaaatcgtgaccgacaaatctcaggaagggtcacagtttgtgaaaggatttgggggcatcggaggcatactccgttacagggttgattttcaagggatggagtatcaggggggcgatgatgagtttttcgatctcgacgactattag

SEQ ID NO: 100472 - DNA, 1272 bp, Artificial Sequence
  derived and/or modified sequence
atgaagcaggacgtactcaattgcaccgagggcccaatccacagtaatggaacctccatgatctccttaattatacctcccaaggaccagatctcccgggtggctaagatgctggccgacgaattcggcaccgccagtaacatcaaatctcgcgtgaatcgactgtccgtactcggggctataactagcgtgcagcaacggctgaagttatataacaaggtcccaccgaacggcctggtggtctattgcgggaccatagtgaccgaagagggaaaggaaaagaaggtgaacattgattttgaacccttcaagccaattaacacatcactgtatctctgcgacaataaatttcataccgaagcactaacagccctactatcagatgattccaaatttggctttattgtgatcgatgggagcggagccctgtttggaacgttacagggcaacacaagagaggtcctgcacaagttcaccgtggacttgccaaagaaacacgggaggggcggacaatctgcactgcggttcgcgagactgcggatggagaaaaggcataactacgtgcgtaaagtagccgaaacagctgttcagctgttcatatccggggacaaggtgaacgtcgccggacttgtgttggctgggtcagccgacttcaagaccgaacttagtcagtcagatatgttcgatcagcgcctgcaatccaaggtgttgaaactcgtcgacataagctatggcggagaaaacgggttcaaccaggcaattgagctctcaaccgaagttttatccaacgtgaagtttatccaagagaaaaaattgattggccgatacttcgacgagatcagccaggataccggcaagtattgtttcggcgtggaagatactttgaaggccttagaaatgggcgcagttgaaatcctcattgtgtacgaaaatctggatatcatgagatacgtgttgcattgccagggcaccgaggaggagaagatactctatctgacccccgagcaggaaaaggacaagtcacacttcaccgataaagagaccggacaggaacatgagctgatagagtccatgccacttctggagtggtttgctaacaactacaaaaaatttggcgcaactcttgagattgtgaccgataagtcccaggaagggagtcaattcgtaaagggatttggagggattggaggcatcctgcgctaccgcgttgatttccaggggatggagtatcagggcggagacgacgagttcttcgacctggacgactactag

SEQ ID NO: 100473 - DNA, 1272 bp, Artificial Sequence
  derived and/or modified sequence
atgaagcaggacgtgctgaactgcaccgagggccccatccacagcaacggcaccagcatgatcagcctgatcatcccccccaaggaccagatcagcagagtggccaagatgctggccgacgagttcggcaccgccagcaacatcaagagcagagtgaacagactgagcgtgctgggcgccatcaccagcgtgcagcagagactgaagctgtacaacaaggtgccccccaacggcctggtggtgtactgcggcaccatcgtgaccgaggagggcaaggagaagaaggtgaacatcgacttcgagcccttcaagcccatcaacaccagcctgtacctgtgcgacaacaagttccacaccgaggccctgaccgccctgctgagcgacgacagcaagttcggcttcatcgtgatcgacggcagcggcgccctgttcggcaccctgcagggcaacaccagagaggtgctgcacaagttcaccgtggacctgcccaagaagcacggcagaggcggccagagcgccctgagattcgccagactgagaatggagaagagacacaactacgtgagaaaggtggccgagaccgccgtgcagctgttcatcagcggcgacaaggtgaacgtggccggcctggtgctggccggcagcgccgacttcaagaccgagctgagccagagcgacatgttcgaccagagactgcagagcaaggtgctgaagctggtggacatcagctacggcggcgagaacggcttcaaccaggccatcgagctgagcaccgaggtgctgagcaacgtgaagttcatccaggagaagaagctgatcggcagatacttcgacgagatcagccaggacaccggcaagtactgcttcggcgtggaggacaccctgaaggccctggagatgggcgccgtggagatcctgatcgtgtacgagaacctggacatcatgagatacgtgctgcactgccagggcaccgaggaggagaagatcctgtacctgacccccgagcaggagaaggacaagagccacttcaccgacaaggagaccggccaggagcacgagctgatcgagagcatgcccctgctggagtggttcgccaacaactacaagaagttcggcgccaccctggagatcgtgaccgacaagagccaggagggcagccagttcgtgaagggcttcggcggcatcggcggcatcctgagatacagagtggacttccagggcatggagtaccagggcggcgacgacgagttcttcgacctggacgactactag

SEQ ID NO: 100474 - protein, 337 aa, Artificial Sequence
  derived and/or modified sequence
MDETGNLTVSSATCHDTIDDFRNQVYSTLYSMISVVGFFGNGFVLYVLIKTYHKKSAFQVYMINLAVADLLCVCTLPLRVVYYVHKGIWLFGDFLCRLSTYALYVNLYCSIFFMTAMSFFRCIAIVFPVQNINLVTQKKARFVCVGIWIFVILTSSPFLMAKPQKDEKNNTKCFEPPQDNQTKNHVLVLHYVSLFVGFIIPFVIIIVCYTMIILTLLKKSMKKNLSSHKKAIGMIMVVTAAFLVSFMPYHIQRTIHLHFLHNETKPCDSVLRMQKSVVITLSLAASNCCFDPLLYFFSGGNFRKRLSTFRKHSLSSVTYVPRKKASLPEKGEEICKV

SEQ ID NO: 100475 - DNA, 1014 bp, Artificial Sequence
  derived and/or modified sequence
atggatgaaacaggaaatctgaccgtgtcatcggccacatgccacgacaccattgatgactttagaaaccaggtgtactctactctgtattctatgatcagtgtagtagggtttttcggaaacggattcgtgctgtatgttcttatcaagacataccacaaaaagagtgcattccaggtctacatgatcaatctcgcggtggccgatttattgtgtgtgtgtacactgccgctgcgtgttgtgtattacgttcataaagggatttggctgttcggtgatttcttatgcaggctgtctacgtacgccctttacgtcaatctgtattgctcaatcttcttcatgactgccatgtcctttttccgctgtatcgctatcgtatttccagtgcagaatatcaatctcgtaacccagaagaaggccagatttgtctgcgtgggaatctggatctttgtcatactcactagcagcccatttctcatggctaaaccgcaaaaggatgaaaagaacaacacaaaatgtttcgaacctccacaggacaatcaaacaaaaaaccacgtacttgtcttacattacgtgtctctgttcgttggttttattattcctttcgttattatcattgtatgttatacaatgatcattctaaccctgcttaagaaatcaatgaagaaaaatctgtccagtcataaaaaggccatcggcatgatcatggtggtaactgctgctttccttgtctcatttatgccttaccacatccaaagaactatccaccttcacttcttgcacaacgaaactaagccctgcgactctgtgttgagaatgcagaagtcagttgtcatcaccttgagcctagcagcaagcaattgttgcttcgacccgctcttgtacttcttttccggcggcaatttccgaaagcgcctgtctaccttccgaaagcattcactgtcctcagtcacatatgttcccaggaagaaggcgtcactccccgagaagggcgaggagatatgcaaagtttag

SEQ ID NO: 100476 - DNA, 1014 bp, Artificial Sequence
  derived and/or modified sequence
atggatgagaccggcaacctgactgtgtcctctgccacctgccacgacaccattgatgacttcaggaaccaggtgtacagcaccctgtacagcatgatctctgtggtgggcttctttggaaatggatttgtgctgtatgtgctgatcaagacctaccacaagaagagcgccttccaggtgtacatgatcaacctggccgtggccgacctgctgtgtgtgtgcaccctgcccctgcgggtggtgtactacgtgcacaagggcatctggctgtttggagacttcctgtgccgcctgagcacctacgccctgtatgtgaacctgtactgcagcatcttcttcatgacagccatgtccttcttccgctgcatcgccatcgtgtttcctgtgcagaacatcaacctggtgacccagaagaaggccaggtttgtgtgtgtgggcatctggatcttcgtcatcctgaccagcagccccttcctgatggccaagccccagaaggatgagaagaacaacaccaagtgctttgagcccccccaggacaaccagaccaagaaccacgtgctggtgctgcactacgtgtccctgtttgtgggcttcatcatccccttcgtcatcatcatcgtgtgctacaccatgatcatcctgaccctgctgaagaagtccatgaagaagaacctgagcagccacaagaaggccatcggcatgatcatggtggtgacagctgccttcctggtgtccttcatgccctaccacatccagaggaccatccacctgcacttcctgcacaatgagaccaagccctgtgacagcgtgctgaggatgcagaagtctgtggtgatcaccctgagcctggccgccagcaactgctgctttgaccccctgctgtacttcttcagcggcggcaacttcaggaagaggctgagcaccttcaggaagcacagcctgagctctgtgacctacgtgcccaggaagaaggccagcctgcctgagaagggggaggagatctgcaaggtgtag

SEQ ID NO: 100477 - DNA, 1014 bp, Artificial Sequence
  derived and/or modified sequence
atggacgagaccggcaacctgaccgtgagcagcgccacctgccacgatacaatcgatgacttccggaatcaggtctatagcacgctctacagtatgatctcagtcgtgggtttctttgggaacggttttgtgctgtacgtgctgattaagacgtaccacaaaaagtccgcttttcaggtttacatgatcaacctcgctgtcgcggacctactgtgtgtgtgtaccctccccctgagagtggtgtactatgtgcataagggcatctggctatttggtgattttctgtgtcgcctgtccacctatgctttgtacgtcaatctctactgttctattttcttcatgacggctatgtcatttttccgctgcatcgcaattgtattccctgtgcagaacataaatctcgtgacccagaaaaaggctaggttcgtctgcgttggtatctggatcttcgtcatcctcacatcttcaccttttctgatggccaagccacagaaagatgaaaagaataataccaaatgttttgagccgccacaagacaaccaaacgaagaaccacgtgttggtgttgcactacgtctccttgttcgtgggcttcattatcccttttgtgattatcatagtgtgctatactatgataatcttaacccttttaaaaaagtctatgaaaaaaaatttaagctcacataaaaaggccattggaatgatcatggtagtaacggctgcctttcttgtgtccttcatgccctaccacattcagcggacaatacacctgcactttttgcacaacgagacgaaaccgtgcgattcagttctccgaatgcagaagagcgttgtgatcacgttgagtttggccgcaagcaactgttgtttcgatcctttactgtactttttctctgggggcaatttcaggaaaagactgtccacttttagaaaacatagcctgagctccgtgacttacgttccgcgcaagaaagccagtctgccagaaaagggcgaagaaatctgcaaggtgtag

SEQ ID NO: 100478 - DNA, 1014 bp, Artificial Sequence
  derived and/or modified sequence
atggatgagactgggaatctaaccgtgtcaagcgctacctgtcacgatactatcgatgactttcggaaccaagtgtactccaccctctactctatgatctccgttgttggtttctttggaaatggctttgtcctttacgtactcattaagacataccacaaaaaaagcgcattccaagtgtacatgatcaacctagccgtagccgatttgctgtgcgtgtgcacccttcccctccgagttgtctactacgtgcataaagggatttggctttttggagattttttgtgtcgtctctccacctacgccctgtatgtgaatctgtactgcagcattttcttcatgacggccatgtcattttttcgttgtatcgccatcgtgtttcctgtgcagaacattaatctagtgactcagaagaaggcgaggtttgtgtgcgtcggaatctggatcttcgtgattttaacaagctcaccttttctgatggcaaaacctcaaaaggatgagaaaaacaacactaaatgttttgaaccacctcaagacaatcagactaagaaccatgttctcgtgctgcattacgtgtcactgtttgtgggtttcattatccccttcgtcataatcatagtgtgttatactatgattatcctcacgcttcttaaaaaaagcatgaaaaagaacctgtcttctcataaaaaggcgatcggcatgattatggtggtgaccgcagcatttctcgtcagcttcatgccatatcatatacagcgaaccatccatctgcacttcctgcacaatgaaaccaagccctgcgactccgttctgaggatgcagaagtcagttgtgatcaccttgtcgctggctgcttccaactgttgttttgaccctttgctgtactttttcagcggaggcaactttcgcaaaagactgagcacttttagaaaacactccctctcgtccgttacctatgtcccacggaagaaggcctccctgcccgaaaaaggagaagaaatttgcaaagtgtag

SEQ ID NO: 100479 - DNA, 2576 bp, Artificial Sequence
  derived and/or modified sequence
gagcaggcactctgtgaatggactgtgcttttacgaccctacagggtatcaagatactgtgcagctcgccaacaaggattaattgcaaggactggtagatcgaatttactgaagacttggagcttgcttctgagaacaaacgcaaaaggacagtaaactgtggaccttgaagttagcagcgtgggcttcctctaatattacaccgtaaaaggcattgatcaccataagaaggaacatttgtgaaggtactccagtgccagaaagaggcacaaagcagacattcgtagagaaacatggatgaaacaggaaatctgacagtatcttctgccacatgccatgacactattgatgacttccgcaatcaagtgtattccaccttgtactctatgatctctgttgtaggcttctttggcaatggctttgtgctctatgtcctcataaaaacctatcacaagaagtcagccttccaagtatacatgattaatttagcagtagcagatctactttgtgtgtgcacactgcctctccgtgtggtctattatgttcacaaaggcatttggctctttggtgacttcttgtgccgcctcagcacctatgctttgtatgtcaacctctattgtagcatcttctttatgacagccatgagctttttccggtgcattgcaattgtttttccagtccagaacattaatttggttacacagaaaaaagccaggtttgtgtgtgtaggtatttggatttttgtgattttgaccagttctccatttctaatggccaaaccacaaaaagatgagaaaaataataccaagtgctttgagcccccacaagacaatcaaactaaaaatcatgttttggtcttgcattatgtgtcattgtttgttggctttatcatcccttttgttattataattgtctgttacacaatgatcattttgaccttactaaaaaaatcaatgaaaaaaaatctgtcaagtcataaaaaggctataggaatgatcatggtcgtgaccgctgcctttttagtcagtttcatgccatatcatattcaacgtaccattcaccttcattttttacacaatgaaactaaaccctgtgattctgtccttagaatgcagaagtccgtggtcataaccttgtctctggctgcatccaattgttgctttgaccctctcctatatttcttttctgggggtaactttaggaaaaggctgtctacattcagaaagcattctttgtccagcgtgacttatgtacccagaaagaaggcctctttgccagaaaaaggagaagaaatatgtaaagtatagtttaaacccatttccagtccaaaccaatgaaaatagtttcccaaataagtattttgtcaaatcatttacaaaaaaaataaaaattttacttaatattttacaaatacttaactatttgggcctacaactctatctcatttatgcatccacatgattagatatttatagatattttaagtgctaaaaattcggtccacaactatgaactgaattataaataattttgaccactcaccagaatttggagaatatttttatctttgcactataaaatatgtcttatattaaagttttcctcttcaaataaaagctttacaaacgataaaatatataaaattagtcaataaaaatacatgcaagctaaaagttataaaatataaaactagatataaaattggcaaatagttctgaatcattctaacatattcctttgcatgcatgccatcagatgagaactggagatgactcaggagctacataaaacgtactgtcacccttctttgtagtactgattcgctaggcaaattagggccatttcttccaaaagagaatgtaaaagtgctagaacagactagtattcagctaaagggtcctaaaagcaccatacaatgttcaatatggcaacaggagaaatctggtcaaaagccagtttgtctccagttttcttctgcctttgcctcaggctcccaaaattgaatagtggagttttagctgctcagtgaggttcctgtagagatttctctccatccatgacatataattcttccttaagaagccagacaactggcactcctatatataaatagaagtaattaaaaacttatctgaagaagagaaaaggaaaaggaatctacttttctatatgccaattgctgggatcaaaataaactacaaaggatttatgaagaaaattgtgaatgttcacattacaaattcttttaagaagtgcatacatttatgtatatgtatacaactatatgtaagagattttgctgtatgatatgcattatgggtgaaagttcacgataagttttattattgctttattactttttattggtatgttgacaggaatatcatggatatgtttacagtgacttttatattacagtggacgctttgatcttaaaacagccacaacaactcatctacggctgaaatataatatgcgtggacaagcttttgctgaagtgtagtgtgtcctttaagtttgttttttaaaaagtaacttacctcagaagaaataaataactataaagaaaaaagaaa

SEQ ID NO: 100480 - DNA, 1014 bp, Artificial Sequence
  derived and/or modified sequence
atggacgagaccggcaacctgaccgtgagcagcgccacctgccacgacaccatcgacgacttcagaaaccaggtgtacagcaccctgtacagcatgatcagcgtggtgggcttcttcggcaacggcttcgtgctgtacgtgctgatcaagacctaccacaagaagagcgccttccaggtgtacatgatcaacctggccgtggccgacctgctgtgcgtgtgcaccctgcccctgagagtggtgtactacgtgcacaagggcatctggctgttcggcgacttcctgtgcagactgagcacctacgccctgtacgtgaacctgtactgcagcatcttcttcatgaccgccatgagcttcttcagatgcatcgccatcgtgttccccgtgcagaacatcaacctggtgacccagaagaaggccagattcgtgtgcgtgggcatctggatcttcgtgatcctgaccagcagccccttcctgatggccaagccccagaaggacgagaagaacaacaccaagtgcttcgagcccccccaggacaaccagaccaagaaccacgtgctggtgctgcactacgtgagcctgttcgtgggcttcatcatccccttcgtgatcatcatcgtgtgctacaccatgatcatcctgaccctgctgaagaagagcatgaagaagaacctgagcagccacaagaaggccatcggcatgatcatggtggtgaccgccgccttcctggtgagcttcatgccctaccacatccagagaaccatccacctgcacttcctgcacaacgagaccaagccctgcgacagcgtgctgagaatgcagaagagcgtggtgatcaccctgagcctggccgccagcaactgctgcttcgaccccctgctgtacttcttcagcggcggcaacttcagaaagagactgagcaccttcagaaagcacagcctgagcagcgtgacctacgtgcccagaaagaaggccagcctgcccgagaagggcgaggagatctgcaaggtgtag

SEQ ID NO: 100481 - protein, 481 aa, Artificial Sequence
  derived and/or modified sequence
MRGLPRKREAWTQPHPLEALYESLRVLEKDTSATSQSVNGSPQAEQPSLESTSKEAFFSRVETFSSLKWAGKPFELSPLVCAKYGWVTVECDMLKCSSCQAFLCASLQPAFDFDRYKQRCAELKKALCTAHEKFCFWPDSPSPDRFGMLPLDEPAILVSEFLDRFQSLCHLDLQLPSLRPEDLKTMCLTEDKISLLLHLLEDELDHRTDERKTTIKLGSDIQVHVTACILSVCGWACSSSLESMQLSLITCSQCMRKVGLWGFQQIESSMTDLDASFGLTSSPIPGLEGRPERLPLVPESPRRMMTRSQDATFSPGSEQAEKSPGPIVSRTRSWDSSSPVDRPEPEAASPTTRTRPVTRSMGTGDTPGLEVPSSPLRKAKRARLCSSSSSDTSSRSFFDPTSQHRDWCPWVNITLGKESRENGGTEPDASAPAEPGWKAVLTILLAHKQSSQPAETDSMSLSEKSRKVFRIFRQWESLCSC

SEQ ID NO: 100482 - DNA, 1446 bp, Artificial Sequence
  derived and/or modified sequence
atgagaggcctgcccagaaagagagaggcctggacccagccccaccccctggaggccctgtacgagagcctgagagtgctggagaaggacaccagcgccaccagccagagcgtgaacggcagcccccaggccgagcagcccagcctggagagcaccagcaaggaggccttcttcagcagagtggagaccttcagcagcctgaagtgggccggcaagcccttcgagctgagccccctggtgtgcgccaagtacggctgggtgaccgtggagtgcgacatgctgaagtgcagcagctgccaggccttcctgtgcgccagcctgcagcccgccttcgacttcgacagatacaagcagagatgcgccgagctgaagaaggccctgtgcaccgcccacgagaagttctgcttctggcccgacagccccagccccgacagattcggcatgctgcccctggacgagcccgccatcctggtgagcgagttcctggacagattccagagcctgtgccacctggacctgcagctgcccagcctgagacccgaggacctgaagaccatgtgcctgaccgaggacaagatcagcctgctgctgcacctgctggaggacgagctggaccacagaaccgacgagagaaagaccaccatcaagctgggcagcgacatccaggtgcacgtgaccgcctgcatcctgagcgtgtgcggctgggcctgcagcagcagcctggagagcatgcagctgagcctgatcacctgcagccagtgcatgagaaaggtgggcctgtggggcttccagcagatcgagagcagcatgaccgacctggacgccagcttcggcctgaccagcagccccatccccggcctggagggcagacccgagagactgcccctggtgcccgagagccccagaagaatgatgaccagaagccaggacgccaccttcagccccggcagcgagcaggccgagaagagccccggccccatcgtgagcagaaccagaagctgggacagcagcagccccgtggacagacccgagcccgaggccgccagccccaccaccagaaccagacccgtgaccagaagcatgggcaccggcgacacccccggcctggaggtgcccagcagccccctgagaaaggccaagagagccagactgtgcagcagcagcagcagcgacaccagcagcagaagcttcttcgaccccaccagccagcacagagactggtgcccctgggtgaacatcaccctgggcaaggagagcagagagaacggcggcaccgagcccgacgccagcgcccccgccgagcccggctggaaggccgtgctgaccatcctgctggcccacaagcagagcagccagcccgccgagaccgacagcatgagcctgagcgagaagagcagaaaggtgttcagaatcttcagacagtgggagagcctgtgcagctgctag

SEQ ID NO: 100483 - DNA, 1446 bp, Artificial Sequence
  derived and/or modified sequence
atgcggggattaccccggaaaagagaggcatggacacagccccaccctctggaagccctgtatgagagcctccgggttcttgaaaaggacacatctgcgactagccagagtgtaaacggatcgcctcaagctgagcagccctctctggaatccacatccaaggaggctttcttttcccgggttgaaacattttcatcactaaaatgggctggtaagccatttgagctgagccctctggtatgtgccaagtatgggtgggttacagtcgagtgcgacatgctgaaatgttcttcttgtcaagccttcctgtgtgcatcactgcagcccgcatttgacttcgacagatataagcaaaggtgtgccgagctaaagaaagctctctgtaccgcgcacgaaaaattctgcttttggcccgactccccttccccagacaggtttggcatgcttccgttggacgagccggcaatcctagtctccgagtttttggaccgattccagtccctttgccatctggacttgcagctgcccagtctacggcccgaagatctgaagacaatgtgtctgaccgaggacaaaatctctttattactgcatctcctggaggacgaacttgatcatagaactgacgaacgaaaaactactatcaagctcggcagcgatattcaagtgcacgtgacagcctgtattttatctgtctgtggatgggcctgctcgtcttccctggagtcgatgcagctaagccttatcacctgtagccagtgtatgcgtaaggtgggattgtggggcttccagcaaatcgaaagtagcatgaccgacttggacgcttcctttggtctgacctcaagccccatacccggcctggaggggaggccagaacggctcccactcgtccctgagtctccacgcaggatgatgaccagatcccaggacgcaaccttctcccctggctccgagcaagcagagaaatcgccaggccctattgtaagcagaacaaggtcttgggactccagtagcccagtcgatcgcccagaacctgaagccgcctccccgactacccggacaagaccagtcacgcgatctatggggaccggcgataccccgggacttgaggtccccagcagccctctgcgcaaggccaagagggctcggctgtgctccagcagttcaagcgatacttcttctagatctttctttgacccaaccagccagcatcgggattggtgcccttgggttaatatcaccctgggcaaagagagtagagaaaacggtggaacggaacctgacgcatccgctcccgccgagcctggttggaaggcagtgcttaccatcctgttagcacacaaacaatctagccaaccagcggaaactgattcgatgtcactgtctgagaagagtaggaaagtttttcgcatcttcaggcagtgggagagtctttgcagctgttag

SEQ ID NO: 100484 - DNA, 1446 bp, Artificial Sequence
  derived and/or modified sequence
atgaggggcctgcccaggaagcgggaggcctggacccagccccaccccctggaggccctgtatgagagcctgcgggtgctggagaaggacaccagcgccaccagccagagcgtgaatggcagcccccaggccgagcagcccagcctggagagcaccagcaaggaggccttcttcagccgggtggagaccttcagcagcctgaagtgggccggcaagccctttgagctgagccccctggtgtgtgccaagtatggctgggtgacagtggagtgtgacatgctgaagtgcagcagctgccaggccttcctgtgtgccagcctgcagcctgcctttgattttgaccgctacaagcagagatgtgccgagctgaagaaggccctgtgcacagcccacgagaagttctgcttctggccagacagccccagcccagaccgcttcggcatgctgcccctggatgagcccgccatcctggtgtctgagttcctggaccgcttccagagcctgtgccacctggacctgcagctgcccagcctgcggcctgaggacctgaagaccatgtgcctgacagaggacaagatcagcctgctgctgcacctgctggaggatgagctggaccacaggacagatgagaggaagaccaccatcaagctgggcagtgacatccaggtgcacgtgacagcctgcatcctgtctgtgtgtggctgggcctgcagcagcagcctggagagcatgcagctgagcctcatcacctgcagccagtgcatgaggaaggtgggcctgtggggcttccagcagatcgagagctccatgacagacctggatgccagctttggcctgaccagcagccccatccctggcctggagggccggcctgagcggctgcccctggtgcctgagagccccaggaggatgatgaccaggagccaggatgccaccttcagccctggcagcgagcaggccgagaagagccctggccccatcgtgtccaggaccaggtcctgggacagcagcagccctgtggacaggcctgagcctgaggccgccagccccaccaccaggaccaggcctgtgaccaggtccatgggcactggagacaccccaggcctggaggtgcccagcagccccctgaggaaggccaagagggcccggctgtgcagcagcagcagcagtgacaccagcagccgctccttctttgaccccaccagccagcaccgggactggtgcccctgggtgaacatcaccctgggcaaggagagcagagaaaatggaggaacagagccagatgccagcgccccagctgagcccggctggaaggctgtgctgaccatcctgctggcccacaagcagagcagccagcctgctgagacagacagcatgagcctgtctgagaagagcaggaaggtgttccgcatcttccggcagtgggagagcctgtgcagctgctag

SEQ ID NO: 100485 - DNA, 1446 bp, Artificial Sequence
  derived and/or modified sequence
atgcggggcctgccccggaagcgggaggcctggacccagccccaccccctggaggccctgtacgaaagtctccgtgtcttggagaaagacacgagtgcgactagccagagcgttaacgggagtccccaggcggaacagccttcactggagtctacaagcaaggaggcttttttctccagggtcgagacctttagctcattgaagtgggccgggaaacctttcgagctgtcccctctggtttgcgcaaagtacgggtgggtcactgtggagtgcgacatgctcaaatgttcctcatgtcaggccttcctttgtgccagcctgcagccggccttcgattttgacagatacaagcagaggtgtgcggagctgaaaaaggccttgtgtacagctcacgagaaattctgcttctggccggatagcccgagccccgataggttcggcatgctgcctctcgatgaacccgcaattttggtgtccgagttcctagaccgcttccagagcctgtgccatctcgatttacagttgccttctctcaggccggaggaccttaaaactatgtgtcttactgaggacaagatctctttgcttcttcatcttctggaagatgaactggaccaccgcaccgatgaaaggaagactacaatcaagttaggaagcgacatacaagtgcatgtaacggcttgcattctgtctgtgtgtgggtgggcctgtagctcaagtctagagtcaatgcagctttcgctaattacttgctctcagtgtatgcggaaggtagggttgtgggggttccaacaaatcgaaagctccatgacagacctggacgcatcgtttggattaacctcttcccctatccctggcctcgagggaagacccgagcggttgcccttagttccagagagtcccagaagaatgatgactagatcccaggacgccacattctctccaggatctgagcaagcagagaagtcccctggacccatcgtctcgagaacgagatcttgggattcttcgtcccctgtagatagacctgaacccgaggccgcttctccgacgacacgcactagaccagttacgagaagtatgggcaccggagacacacctggactggaggtgcctagcagtcctttgcggaaggccaagagggccaggttatgtagttcaagttccagcgacactagttccaggagtttctttgatcctactagtcagcatcgtgattggtgcccatgggtcaatataaccctaggcaaggaatctcgtgagaacgggggaaccgagcctgatgcatccgcgccagccgagcctggctggaaggctgtgctcacaatcttgcttgcccacaaacagtcatctcagcccgccgaaacagatagcatgagtttgtctgagaagtcacggaaagtatttcgcatctttcggcagtgggagtctctgtgcagctgttag

SEQ ID NO: 100486 - DNA, 1446 bp, Artificial Sequence
  derived and/or modified sequence
atgaggggcctgcccaggaagagagaggcatggactcagcctcatcctctggaagccttgtatgagagccttagagtgctggagaaggacacctccgcgacttcacagtctgtgaacgggtcaccacaggccgagcaaccatcgctggaatcgacatctaaagaagcattcttctccagggtggagaccttttcctctttaaagtgggcgggaaaacctttcgagctttccccacttgtgtgcgcgaagtacggctgggttaccgtggagtgcgatatgctgaaatgttcttcatgtcaggcattcttgtgtgctagcctgcaacctgcttttgatttcgatagatataagcagaggtgcgccgagcttaagaaagctctgtgcactgcccatgaaaaattttgcttttggcccgattctccctcccctgatagattcggaatgctgccgctggacgaacccgcaatattggtgagtgagttcctggatcggttccaatccttgtgccacctcgaccttcaactcccatcactcaggccggaagatctgaagacgatgtgcctgactgaggacaagatatctctgcttctacacctccttgaggacgaactggaccataggactgacgagaggaagacaaccattaagctgggaagtgatatccaggtgcatgtgaccgcatgcattctcagtgtatgtgggtgggcctgttcttcatccttggagtccatgcagctgtcactgattacctgcagtcaatgcatgagaaaggtgggcctgtggggatttcagcagattgagagcagtatgacagatctggacgcctcctttgggttaacaagtagtccgatccctgggctagaggggaggccagagcggctacccctcgttcccgagagccccagaagaatgatgactcggtcccaagatgctactttttccccagggagcgaacaagccgagaaatcccccggacctattgtatcccgcacacggtcatgggattccagctcccctgttgatcgccctgagccagaggcagccagtcccacgacgaggacccgccctgtgacgagatctatgggaactggcgataccccaggtctagaggtgccgagctcccccctgcgcaaggccaagagagcgaggctgtgttccagcagtagctccgacacttcctcgaggtctttctttgatcccacctcgcagcaccgggattggtgtccttgggtgaacatcacactgggaaaagaatctagagaaaacggcggaacagagccggacgcttctgcccctgctgagccagggtggaaagccgttctgacaattctcctggctcataaacagtcctcacaacctgctgaaacagactcaatgagcttgagtgaaaagagtcggaaggtcttccgcatcttccgccagtgggaatctctgtgctcctgctag

SEQ ID NO: 100487 - DNA, 1934 bp, Artificial Sequence
  derived and/or modified sequence
ggaccaagatggcggcgccctgtgagggacaagcgtttgccgtaggggttgaaaagaattggggtgcagtagttcgctccccagaagggaccccccagaaaatccggcagctgatagatgaggggattgccccggaagagggaggcgtggacgcaaccacacccgcttgaggctctctatgaatctctgagagtcttagagaaggacacgtctgccacatcccagtcagttaatggatcaccccaagcggaacaaccttcattggaatctacaagcaaagaagccttctttagcagagtggaaacattttcttctttgaaatgggcaggtaagccctttgagctgtctccactcgtctgtgcaaaatatggctgggtcacagtggaatgtgatatgctcaagtgctctagctgtcaagcttttctctgtgccagtttacaaccagcttttgactttgacagatataagcaacgatgtgctgagctgaagaaagccttgtgtactgcccatgagaagttctgtttctggccagacagcccatccccagaccgatttgggatgttgcccctggatgagcctgctattcttgttagtgaattcctagatcgttttcaaagcctttgtcacttggacctccagcttccttccctaaggccggaggacttgaaaactatgtgcttgacagaagacaagatcagtcttctcctacacttgcttgaagatgaacttgatcaccgaactgatgagagaaaaactacaatcaaattaggctcagacatccaagtccacgtcactgcctgtattctctctgtgtgtggctgggcgtgtagttcctctttggaatccatgcagctctccctgataacatgttcgcaatgtatgaggaaggtggggctctggggcttccagcagattgaatcgtccatgactgacctggatgcatcctttggcctgaccagctccccaatcccaggccttgaggggcgaccagagcgcttacctctggtgcctgaatctcctcggaggatgatgacccggagccaggatgccactttctccccaggctcagagcaggctgaaaagagccctggtcccattgtctctcgaactcggagctgggactcttccagtcctgttgaccgtcctgagccagaggctgctagccccaccaccagaactcgcccagtgacccgaagcatgggaacaggagacacccctggcctggaggtaccatctagccctctgcggaaagccaagcgagctcgcctctgctcctccagcagttcggacacatcttcccgaagcttctttgatcccacctctcagcatagagactggtgcccttgggtgaatatcacacttggcaaagaaagcagggagaatggtggaactgaaccagatgccagcgccccagcagagccaggctggaaagcagtgctgaccatcctcttggcgcacaaacagtctagccagccagctgaaacggactccatgagtctctctgagaaatcaaggaaagtattccgaatatttcggcagtgggaatctctgtgctcatgctgaagatactccagcgccttcctggagatagctggaatgagagtgactttttgaaaaattaaggctgagttcctttcggtcagctgacactaagtttttcctgttctgggttaatcataaggagccccctgccatagcaaaggcagtgagtgtcaactatctgcatctggctgagagagacccgtttcctttcagggatgtggacagggtaagggcagcaagcatggttctgttaaaggagtgtgggattaacagactagaaggaagactaaggacctgaccacccatttcagcatcttcaatgtggagcagtgttctgaggactcttctatcctaggactatgacagtgtgtattaataaaatatttgctaag

SEQ ID NO: 100488 - protein, 431 aa, Artificial Sequence
  derived and/or modified sequence
MAAPCEGQAFAVGVEKNWGAVVRSPEGTPQKIRQLIDEGIAPEEGGVDAKDTSATSQSVNGSPQAEQPSLESTSKEAFFSRVETFSSLKWAGKPFELSPLVCAKYGWVTVECDMLKCSSCQAFLCASLQPAFDFDRYKQRCAELKKALCTAHEKFCFWPDSPSPDRFGMLPLDEPAILVSEFLDRFQSLCHLDLQLPSLRPEDLKTMCLTEDKISLLLHLLEDELDHRTDERKTTIKLGSDIQVHVTACILSVCGWACSSSLESMQLSLITCSQCMRKVGLWGFQQIESSMTDLDASFGLTSSPIPGLEGRPERLPLVPESPRRMMTRSQDATFSPGSEQDTSSRSFFDPTSQHRDWCPWVNITLGKESRENGGTEPDASAPAEPGWKAVLTILLAHKQSSQPAETDSMSLSEKSRKVFRIFRQWESLCSC

SEQ ID NO: 100489 - DNA, 1296 bp, Artificial Sequence
  derived and/or modified sequence
atggccgccccctgcgagggccaggccttcgccgtgggcgtggagaagaactggggcgccgtggtgagaagccccgagggcaccccccagaagatcagacagctgatcgacgagggcatcgcccccgaggagggcggcgtggacgccaaggacaccagcgccaccagccagagcgtgaacggcagcccccaggccgagcagcccagcctggagagcaccagcaaggaggccttcttcagcagagtggagaccttcagcagcctgaagtgggccggcaagcccttcgagctgagccccctggtgtgcgccaagtacggctgggtgaccgtggagtgcgacatgctgaagtgcagcagctgccaggccttcctgtgcgccagcctgcagcccgccttcgacttcgacagatacaagcagagatgcgccgagctgaagaaggccctgtgcaccgcccacgagaagttctgcttctggcccgacagccccagccccgacagattcggcatgctgcccctggacgagcccgccatcctggtgagcgagttcctggacagattccagagcctgtgccacctggacctgcagctgcccagcctgagacccgaggacctgaagaccatgtgcctgaccgaggacaagatcagcctgctgctgcacctgctggaggacgagctggaccacagaaccgacgagagaaagaccaccatcaagctgggcagcgacatccaggtgcacgtgaccgcctgcatcctgagcgtgtgcggctgggcctgcagcagcagcctggagagcatgcagctgagcctgatcacctgcagccagtgcatgagaaaggtgggcctgtggggcttccagcagatcgagagcagcatgaccgacctggacgccagcttcggcctgaccagcagccccatccccggcctggagggcagacccgagagactgcccctggtgcccgagagccccagaagaatgatgaccagaagccaggacgccaccttcagccccggcagcgagcaggacaccagcagcagaagcttcttcgaccccaccagccagcacagagactggtgcccctgggtgaacatcaccctgggcaaggagagcagagagaacggcggcaccgagcccgacgccagcgcccccgccgagcccggctggaaggccgtgctgaccatcctgctggcccacaagcagagcagccagcccgccgagaccgacagcatgagcctgagcgagaagagcagaaaggtgttcagaatcttcagacagtgggagagcctgtgcagctgctag

SEQ ID NO: 100490 - DNA, 1296 bp, Artificial Sequence
  derived and/or modified sequence
atggcggctccgtgcgaaggccaggctttcgctgtaggggtggaaaaaaattggggcgctgttgtgcgctcacccgaagggacgccccaaaaaattaggcagctgatagacgagggcatcgcacctgaggagggcggggtggacgccaaggatacatccgccacttcccagagcgtaaatgggtccccccaggccgaacaaccttcgctggagagcaccagcaaggaggccttcttctcgagagtggagaccttcagctccctgaaatgggctggcaaaccctttgaactgtcacccctagtttgtgctaagtacggttgggtgactgtggagtgcgatatgttaaaatgtagctcttgccaggccttcctctgcgccagtttgcagcccgctttcgacttcgacagatacaagcaacgctgtgcagaactcaaaaaggccctgtgtaccgctcacgagaaattttgtttctggcccgattctccatcccccgacagattcggtatgctgcctctggatgagccggctatcttagttagtgaatttctggacagatttcaatccctctgccatctggacctgcagctgccttctttgcggccagaagatctgaaaaccatgtgcctgaccgaggacaagatctccctgctcctgcacctgcttgaagacgaactcgatcatcgtacagacgagcggaaaacaaccataaaactgggcagtgacatacaggtgcatgtgaccgcatgcatcttgagcgtttgtgggtgggcctgcagctctagtctggaaagcatgcagctgagtctgattacctgtagtcaatgcatgcgtaaggtgggcctgtggggctttcagcagatagaaagttcaatgaccgatttggacgcatcatttggacttacctcaagccccattccaggcctggagggcaggcctgaacggttgcccttggtccctgagtcaccccgtcggatgatgacacgttcccaggatgctaccttctctcctggctctgagcaggacacttcctctcgctcgttcttcgatcccactagtcagcaccgtgactggtgcccgtgggtgaatataacgctagggaaagagtcccgggagaacggcggtacagaacccgatgcgagcgcacccgcagagcctgggtggaaggcagtgttaactattctcttggcgcacaagcagtcctcccagcctgccgaaactgattcgatgagtctttccgaaaagagccgcaaggttttccgcatatttcgccagtgggagagcctgtgctcctgctag

SEQ ID NO: 100491 - DNA, 1296 bp, Artificial Sequence
  derived and/or modified sequence
atggccgccccctgtgagggccaggcctttgctgtgggcgtggagaagaactggggcgctgtggtgcgcagccctgagggcaccccccagaagatccggcagctgattgatgagggcatcgcccctgaggagggcggcgtggatgccaaggacaccagcgccaccagccagagcgtgaatggcagcccccaggccgagcagcccagcctggagagcaccagcaaggaggccttcttcagccgggtggagaccttcagcagcctgaagtgggccggcaagccctttgagctgagccccctggtgtgtgccaagtatggctgggtgacagtggagtgtgacatgctgaagtgcagcagctgccaggccttcctgtgtgccagcctgcagcctgcctttgattttgaccgctacaagcagagatgtgccgagctgaagaaggccctgtgcacagcccacgagaagttctgcttctggccagacagccccagcccagacagatttggcatgctgcccctggatgagcccgccatcctggtgtctgagttcctggaccgcttccagagcctgtgccacctggacctgcagctgcccagcctgcggcctgaggacctgaagaccatgtgcctgacagaggacaagatcagcctgctgctgcacctgctggaggatgagctggaccacaggacagatgagaggaagaccaccatcaagctgggcagtgacatccaggtgcacgtgacagcctgcatcctgtctgtgtgtggctgggcctgcagcagcagcctggagagcatgcagctgagcctcatcacctgcagccagtgcatgaggaaggtgggcctgtggggcttccagcagatcgagagctccatgacagacctggatgccagctttggcctgaccagcagccccatccctggcctggagggccggcctgagcggctgcccctggtgcctgagagccccaggaggatgatgaccaggagccaggatgccaccttcagccctggcagcgagcaggacaccagcagccgctccttctttgaccccaccagccagcaccgggactggtgcccctgggtgaacatcaccctgggcaaggagagcagagaaaatggaggaacagagccagatgccagcgccccagctgagcccggctggaaggctgtgctgaccatcctgctggcccacaagcagagcagccagcctgctgagacagacagcatgagcctgtctgagaagagcaggaaggtgttccgcatcttccggcagtgggagagcctgtgcagctgctag

SEQ ID NO: 100492 - DNA, 1296 bp, Artificial Sequence
  derived and/or modified sequence
atggccgccccctgcgagggccaggccttcgccgtgggcgtggagaaaaattggggcgctgtcgttcgcagccccgagggaacgccacaaaaaatccggcagctgatagatgaaggaatcgcgcccgaggagggcggggtggatgcgaaagacacaagcgcgacctcccaaagcgtaaatggcagccctcaggcggagcagcctagcctggagtctacatccaaggaggcatttttttctagagtcgagacattcagcagtctgaagtgggctgggaaaccctttgagctgagtccactagtgtgtgctaagtatggctgggttactgtggagtgtgacatgctcaaatgctcatcctgccaggcctttctatgcgcatccctgcagccagccttcgattttgaccgctataaacagagatgcgccgagttgaaaaaagccctttgcaccgcccatgagaaattttgcttctggcccgatagtcctagcccagacagatttggcatgcttcctctcgatgagccagctatactggtttcagaattcctggatcgcttccaatccctctgtcacctggacttgcagttaccatcacttcgacctgaagacttgaaaacgatgtgcctcacagaggacaagatctccctgctcctccatctgctggaggacgaactcgaccacagaactgatgaacgcaagacaaccatcaaacttggttccgacattcaggtgcacgttaccgcctgcatcctgagcgtgtgtggatgggcttgctcaagttctcttgaaagcatgcagctctcgctgatcacctgttcccagtgcatgaggaaggtcgggctatggggttttcaacagattgagtcaagcatgactgacctggacgcctccttcggcctgactagttctcctatcccaggtctcgagggtcgcccggaaaggctgcctcttgtgccagagagtcctcgcaggatgatgactcgttcccaggacgccaccttcagccccgggtccgaacaagacacctcatctagaagttttttcgaccctacttcccagcaccgggattggtgcccctgggtgaatatcactctcggaaaagagtcaagggaaaatggaggcacagagcccgatgcttcagccccggccgaacctggttggaaagcagttctcactattttattagcccacaaacagagtagccaacctgccgagaccgattccatgtccttgagcgagaaatcacgcaaagtcttccggatttttcgacagtgggaatctctctgctcctgctag

SEQ ID NO: 100493 - DNA, 1296 bp, Artificial Sequence
  derived and/or modified sequence
atggccgcaccctgcgaaggacaggccttcgctgtgggagtggagaagaactggggagctgtcgtaagatcccctgaaggcacacctcagaaaatcagacagctaatagacgagggcatcgctcccgaagaaggcggagtcgatgctaaggacacctcagcaacatcccaaagtgtaaacggatccccccaggccgagcagcccagcttagaatctacgtccaaggaggctttctttagcagagttgaaacattttctagccttaagtgggcaggaaaaccctttgaacttagcccactggtctgcgcaaagtacggatgggtcacagtagagtgtgatatgctgaagtgcagctcctgtcaagcatttctgtgtgcatccctgcaaccagcctttgattttgatcggtacaagcagcgctgcgcagagcttaaaaaggcactgtgcacagctcatgagaaattttgtttttggcctgacagtccttccccagaccggtttggcatgctgcctctcgacgaacctgcaattctcgttagcgagttcctagaccgtttccaatcgctgtgccatttggacctgcagcttccttccctgcgacccgaagacttaaaaacgatgtgtctgaccgaggacaagatttccttgttattgcatctgctggaggacgaactcgatcatcgtaccgacgaacgaaaaaccaccatcaagcttggttccgatattcaagtacacgtcaccgcatgcatcctcagcgtctgtggatgggcatgcagttcttcactcgagtccatgcaactgtctcttattacctgcagccagtgcatgcgcaaagtgggtttgtggggatttcagcagatcgagtcctctatgacggatctcgacgcctcctttggtcttacctccagtccaatccccggactggagggtcgcccagagaggcttcccttggtgcccgaaagcccgaggagaatgatgaccaggtcccaggatgcaactttctcccctggatcagagcaggatacgtctagtcgctccttttttgatccaaccagccaacatcgcgattggtgcccatgggtcaatatcaccctagggaaagagtctcgcgagaatggcggaacagagccagacgcatcagccccagccgagcctggctggaaagcagtgctcacaatcctgctggctcacaaacagagctctcaaccagccgagacggatagtatgtctctctcagagaagtccaggaaagttttcagaatctttcgacagtgggagtcattgtgctcatgttag

SEQ ID NO: 100494 - DNA, 1676 bp, Artificial Sequence
  derived and/or modified sequence
ggaccaagatggcggcgccctgtgagggacaagcgtttgccgtaggggttgaaaagaattggggtgcagtagttcgctccccagaagggaccccccagaaaatccggcagctgatagatgaggggattgccccggaagagggaggcgtggacgcgaaggacacgtctgccacatcccagtcagttaatggatcaccccaagcggaacaaccttcattggaatctacaagcaaagaagccttctttagcagagtggaaacattttcttctttgaaatgggcaggtaagccctttgagctgtctccactcgtctgtgcaaaatatggctgggtcacagtggaatgtgatatgctcaagtgctctagctgtcaagcttttctctgtgccagtttacaaccagcttttgactttgacagatataagcaacgatgtgctgagctgaagaaagccttgtgtactgcccatgagaagttctgtttctggccagacagcccatccccagaccgatttgggatgttgcccctggatgagcctgctattcttgttagtgaattcctagatcgttttcaaagcctttgtcacttggacctccagcttccttccctaaggccggaggacttgaaaactatgtgcttgacagaagacaagatcagtcttctcctacacttgcttgaagatgaacttgatcaccgaactgatgagagaaaaactacaatcaaattaggctcagacatccaagtccacgtcactgcctgtattctctctgtgtgtggctgggcgtgtagttcctctttggaatccatgcagctctccctgataacatgttcgcaatgtatgaggaaggtggggctctggggcttccagcagattgaatcgtccatgactgacctggatgcatcctttggcctgaccagctccccaatcccaggccttgaggggcgaccagagcgcttacctctggtgcctgaatctcctcggaggatgatgacccggagccaggatgccactttctccccaggctcagagcaggacacatcttcccgaagcttctttgatcccacctctcagcatagagactggtgcccttgggtgaatatcacacttggcaaagaaagcagggagaatggtggaactgaaccagatgccagcgccccagcagagccaggctggaaagcagtgctgaccatcctcttggcgcacaaacagtctagccagccagctgaaacggactccatgagtctctctgagaaatcaaggaaagtattccgaatatttcggcagtgggaatctctgtgctcatgctgaagatactccagcgccttcctggagatagctggaatgagagtgactttttgaaaaattaaggctgagttcctttcggtcagctgacactaagtttttcctgttctgggttaatcataaggagccccctgccatagcaaaggcagtgagtgtcaactatctgcatctggctgagagagacccgtttcctttcagggatgtggacagggtaagggcagcaagcatggttctgttaaaggagtgtgggattaacagactagaaggaagactaaggacctgaccacccatttcagcatcttcaatgtggagcagtgttctgaggactcttctatcctaggactatgacagtgtgtattaataaaatatttgctaaga

SEQ ID NO: 100495 - protein, 325 aa, Artificial Sequence
  derived and/or modified sequence
MGIFPGIILIFLRVKFATAAVIVSGHQKSTTVSHEMSGLNWKPFVYGGLASIVAEFGTFPVDLTKTRLQVQGQSIDARFKEIKYRGMFHALFRICKEEGVLALYSGIAPALLRQASYGTIKIGIYQSLKRLFVERLEDETLLINMICGVVSGVISSTIANPTDVLKIRMQAQGSLFQGSMIGSFIDIYQQEGTRGLWRGVVPTAQRAAIVVGVELPVYDITKKHLILSGMMGDTILTHFVSSFTCGLAGALASNPVDVVRTRMMNQRAIVGHVDLYKGTVDGILKMWKHEGFFALYKGFWPNWLRLGPWNIIFFITYEQLKRLQI

SEQ ID NO: 100496 - protein, 198 aa, Artificial Sequence
  derived and/or modified sequence
MGIFPGIILIFLRVKFATAAVIVSGHQKSTTVSHEMSGLNWKPFVYGGLASIVAEFGTFPVDLTKTRLQVQGQSIDARFKEIKYRGMFHALFRICKEEGVLALYSGIAPALLRQASYGTIKIGIYQSLKRLFVERLEDETLLINMICGVVSGVISSTIANPTDVLKIRMQAQGSLFQGSMIGSFIDIYQQEGTRGLWR

SEQ ID NO: 100497 - protein, 240 aa, Artificial Sequence
  derived and/or modified sequence
MGIFPGIILIFLRVKFATAAVIVSGHQKSTTVSHEMSGLNWKPFVYGGLASIVAEFGTFPVDLTKTRLQVQGQSIDARFKEIKYRGMFHALFRICKEEGVLALYSGIAPALLRQASYGTIKIGIYQSLKRLFVERLEDETLLINMICGVVSGVISSTIANPTDVLKIRMQAQGSLFQGSMIGSFIDIYQQEGTRGLWRGVVPTAQRAAIVVGVELPVYDITKKHLILSGMMGDTILTHFV

SEQ ID NO: 100498 - DNA, 978 bp, Artificial Sequence
  derived and/or modified sequence
atgggaattttccctgggatcatattaatatttcttagggtgaaatttgcaactgcagcggtaatcgtgtcaggccatcagaaaagtaccacagtgagtcacgagatgtccgggctgaattggaagccattcgtgtatggcggcctcgctagtattgtggccgaattcgggacttttccagtggacctcacgaagaccaggctccaagtccagggtcaatccatcgacgcacgattcaaggagattaagtaccgcggaatgttccacgctctgttccggatctgcaaggaagaaggggtgctggccctctacagcggaatagccccagccttattgcgccaggcctcttatggaaccatcaaaattggcatttatcaatcactcaagcgactgtttgtcgagagattagaggatgaaacgctgctaatcaacatgatttgtggcgtggtctctggtgtgattagctctaccattgcgaatccgaccgatgtcctaaagatccgtatgcaggcccagggatccctctttcagggaagtatgattggctcattcatagatatctatcaacaggaaggcacacgtgggctgtggagaggcgttgtgccgaccgcacagagagcagccatcgtcgtgggggtggagcttccagtgtacgacatcacgaagaagcacctgatccttagcggaatgatgggggacactatccttacacattttgtgtcttcttttacatgcggattggcaggagcccttgcaagcaaccccgtagacgtcgtccgcaccaggatgatgaatcaaagggcaattgtgggccacgtggacctttacaaggggactgtggacgggatattaaagatgtggaaacacgagggtttcttcgccttatacaaaggcttttggccaaattggcttcgtttggggccctggaacatcattttcttcatcacttatgaacagctcaagcgcttgcagatctag

SEQ ID NO: 100499 - DNA, 597 bp, Artificial Sequence
  derived and/or modified sequence
atgggcattttcccgggcataattctgatttttctgcgggtaaaattcgcaacggctgctgtcatagtgagtgggcaccagaagtctacaacggtgtcccatgaaatgagcggactgaattggaagcccttcgtgtatgggggactggcatctattgtggctgagtttggtacgttcccagtcgatctgacaaagactcgactccaagtccagggtcagtccatcgatgcaaggtttaaggagattaagtatagaggcatgttccatgccctctttcgaatctgcaaagaagaaggagttctagcactgtattcaggcatcgctccagcccttctgcgccaggcgtcatatggcacaatcaagattgggatttaccagtcgctgaagagactgttcgtggagagactggaggacgagacacttttgataaatatgatttgcggtgtcgtaagtggggtaattagctctacaattgccaaccctaccgacgtgctgaaaattcggatgcaagcccaaggcagcttgttccagggaagcatgatcggttcttttatcgatatctaccagcaggagggaacaagaggcctctggaggtag

SEQ ID NO: 100500 - DNA, 723 bp, Artificial Sequence
  derived and/or modified sequence
atgggcatctttcctggtataatattgatcttcctgcgagtgaagttcgccacagctgccgtaattgtgtctgggcatcagaagagcacaacagtgtcacacgaaatgtcagggctcaactggaagccgttcgtttacggcggccttgcctccatcgtcgcagaattcggtacatttccagtggacctgaccaaaacgaggctgcaggtccagggccagtccattgacgcacggtttaaagagatcaaatacagaggcatgttccacgctctgttccgcatttgtaaggaagaaggagtacttgctttatactctggaatcgccccagcgctgttgcggcaggccagctacggtacaattaagattggcatctaccagagcctgaaacggctctttgttgaacgcctcgaggatgagacactcctgataaacatgatctgcggagttgtctcaggcgtgattagctcaaccatagctaacccgaccgacgttcttaaaatacggatgcaggcccagggcagtcttttccaaggttcaatgatcggctcattcatcgatatctaccagcaagagggaacacgcgggctttggagaggagtagtgccaaccgcacaacgcgccgctatcgtagtaggagtggagctccctgtttacgacatcacaaagaagcatctcattctcagtgggatgatgggagatactatccttacgcactttgtgtag

SEQ ID NO: 100501 - DNA, 978 bp, Artificial Sequence
  derived and/or modified sequence
atgggcatcttccctggcatcatcctgatcttcctgcgggtgaagtttgccacagctgctgtgattgtgtctggccaccagaagagcaccaccgtgtcccatgagatgagcggcctgaactggaagccctttgtgtatggaggcctggccagcatcgtggccgagtttggcaccttccctgtggacctgaccaagacccggctgcaggtgcagggccagagcattgatgcccgcttcaaggagatcaagtaccggggcatgtttcatgccctcttccgcatctgcaaggaggagggcgtgctggccctgtacagcggcatcgccccagccctgctgcggcaggccagctatggcaccatcaagattggcatctaccagagcctgaagaggctgtttgtggagcggctggaggatgagaccctgctgatcaacatgatctgtggggtggtgtctggagtcatcagcagcaccatcgccaaccccacagatgtgctgaagatccgcatgcaggcccagggcagcctcttccagggctccatgattggcagcttcatcgacatctaccagcaggagggcacccggggcctgtggaggggcgtggtgcccacagcccagagagctgccatcgtggtgggcgtggagctgcctgtgtatgacatcaccaagaagcacctgatcctgagcggcatgatgggagacaccatcctgacccactttgtgagcagcttcacctgtggcctggccggggccctggccagcaaccctgtggatgtggtgaggaccaggatgatgaaccagagggccatcgtgggccacgtggacctgtacaagggcaccgtggatggcatcctgaagatgtggaagcatgagggcttctttgccctgtacaagggcttctggcccaactggctgcggctgggcccctggaacatcatcttcttcatcacctatgagcagctgaagaggctgcagatctag

SEQ ID NO: 100502 - DNA, 597 bp, Artificial Sequence
  derived and/or modified sequence
atgggcatcttccctggcatcatcctgatcttcctgcgggtgaagtttgccacagctgctgtgattgtgtctggccaccagaagagcaccaccgtgtcccatgagatgagcggcctgaactggaagccctttgtgtatggaggcctggccagcatcgtggccgagtttggcaccttccctgtggacctgaccaagacccggctgcaggtgcagggccagagcattgatgcccgcttcaaggagatcaagtaccggggcatgtttcatgccctcttccgcatctgcaaggaggagggcgtgctggccctgtacagcggcatcgccccagccctgctgcggcaggccagctatggcaccatcaagattggcatctaccagagcctgaagaggctgtttgtggagcggctggaggatgagaccctgctgatcaacatgatctgtggggtggtgtctggagtcatcagcagcaccatcgccaaccccacagatgtgctgaagatccgcatgcaggcccagggcagcctcttccagggctccatgattggcagcttcatcgacatctaccagcaggagggcacccggggcctgtggaggtag

SEQ ID NO: 100503 - DNA, 723 bp, Artificial Sequence
  derived and/or modified sequence
atgggcatcttccctggcatcatcctgatcttcctgcgggtgaagtttgccacagctgctgtgattgtgtctggccaccagaagagcaccaccgtgtcccatgagatgagcggcctgaactggaagccctttgtgtatggaggcctggccagcatcgtggccgagtttggcaccttccctgtggacctgaccaagacccggctgcaggtgcagggccagagcattgatgcccgcttcaaggagatcaagtaccggggcatgtttcatgccctcttccgcatctgcaaggaggagggcgtgctggccctgtacagcggcatcgccccagccctgctgcggcaggccagctatggcaccatcaagattggcatctaccagagcctgaagaggctgtttgtggagcggctggaggatgagaccctgctgatcaacatgatctgtggggtggtgtctggagtcatcagcagcaccatcgccaaccccacagatgtgctgaagatccgcatgcaggcccagggcagcctcttccagggctccatgattggcagcttcatcgacatctaccagcaggagggcacccggggcctgtggaggggcgtggtgcccacagcccagagagctgccatcgtggtgggcgtggagctgcctgtgtatgacatcaccaagaagcacctgatcctgagcggcatgatgggagacaccatcctgacccactttgtgtag

SEQ ID NO: 100504 - DNA, 978 bp, Artificial Sequence
  derived and/or modified sequence
atgggcatcttccccggcatcatcctgatcttcctgcgggtgaagttcgccacagcagcagttattgtttccggccaccaaaaaagcactaccgtatcacacgagatgtcaggcctcaattggaagccatttgtttacggtgggttggcttcaattgtggctgagtttggcacatttcctgtcgacttaacgaaaaccagactccaggtgcaggggcaaagtatcgacgccaggttcaaggaaataaagtatcgcggaatgtttcatgcactgttccggatatgcaaggaagagggagtgctggcgctctactctgggatcgcaccagccttactgagacaagcgtcatacggcaccatcaaaatcggaatttatcagagcctgaagaggctgtttgttgaacgtttagaggacgaaacactgcttatcaatatgatctgcggggttgtgtccggggttattagcagtactatcgctaatcccacggatgtgttaaagatcagaatgcaggcccagggttcattgtttcaaggttcaatgatcggctcgttcatcgatatctatcaacaggagggtactcggggcctctggcggggagtggtgcccaccgcccagcgcgctgccatagtggtgggggtcgagttgcctgtatatgatattaccaaaaaacacctaatcctaagtggaatgatgggcgataccattttaacgcactttgtttccagttttacctgtgggttagccggagctttggcatctaaccccgtagacgtggtgaggactcgcatgatgaaccagcgggccatcgttggacatgtggacctgtacaagggcacagtggatggaattctgaagatgtggaaacatgaggggttctttgccctctataagggtttctggccgaattggcttcggttaggcccatggaatatcattttctttattacctacgaacaactgaagcgactgcagatctag

SEQ ID NO: 100505 - DNA, 597 bp, Artificial Sequence
  derived and/or modified sequence
atgggcatcttccccggcatcatcctgatcttcctgcgggtgaagtttgctacggctgccgttattgtttcaggccaccagaagtctactacagtgagccacgagatgagcggcctaaattggaaaccatttgtgtacggaggccttgctagtatagtggcagaattcggcactttccccgtggatctcacaaaaacgaggctacaggtgcagggtcaaagtatagacgccagattcaaggagattaagtacagaggcatgttccatgcactgttccgcatctgtaaggaggaaggagttctggctctgtatagcggaattgctccagctttgttgcggcaggcttcatatggcaccatcaaaatagggatctatcagtcacttaaacgccttttcgtggagagattagaggatgagaccttgctgatcaacatgatctgcggggtagttagcggcgtgataagtagtacaatcgccaaccccacggacgtgctgaagatcaggatgcaggctcagggaagtttgttccaagggtcaatgatcggctctttcatcgacatataccaacaggaagggacccgaggcctgtggcgctag

SEQ ID NO: 100506 - DNA, 723 bp, Artificial Sequence
  derived and/or modified sequence
atgggcatcttccccggcatcatcctgatcttcctgcgggtgaagttcgcgacggccgctgtcatcgtctctggtcatcagaagtctaccacagtctcccacgagatgtctggactgaactggaaacccttcgtgtacgggggtctcgcgagtattgtggccgagtttggaacttttcccgttgatctgaccaaaacaaggttgcaagttcaagggcagagtatcgatgctaggttcaaggagatcaagtacagaggaatgttccacgccctattcaggatctgcaaagaagaaggagttctggctctgtactcaggcattgcccccgctcttttgaggcaggcctcctacggtaccataaaaataggaatttaccagtcactcaagaggttgttcgtggagcgccttgaggacgagacccttctgatcaacatgatatgcggggtggtgagcggggtgatctcctcaaccattgcgaaccctaccgacgttttaaagatccgcatgcaggctcagggatctcttttccagggctccatgattggctccttcattgacatctatcagcaggagggcacccggggattgtggcgcggggtggttccaaccgcccaaagggccgctattgtggtgggtgttgagctgcccgtgtatgacattacaaaaaagcacctgatcctgtcaggtatgatgggggataccatcttgacccattttgtgtag

SEQ ID NO: 100507 - DNA, 978 bp, Artificial Sequence
  derived and/or modified sequence
atgggcatctttccgggtatcattctcattttcctgagagttaaatttgccaccgctgccgtgattgtcagtggacaccagaagagtaccaccgtgtcccacgagatgtctggattaaattggaagccatttgtctatggaggtctcgcttctattgtcgcagagttcggcacattccccgtggacttgacgaaaactcgccttcaagtccaggggcagtctattgacgcgaggtttaaggaaatcaaatatcggggtatgttccatgcactttttagaatttgtaaggaagagggtgtcctggctttgtactcaggcatcgcacccgcactgttacggcaggcctcctatgggacaattaagatagggatttaccaatccctgaaacgcctgtttgtggaacgcctagaagacgagactttactgattaatatgatctgcggggtggtgagtggagtcattagcagcactatcgcgaatcccacagacgtacttaagatccgcatgcaggcacagggtagcctgtttcagggcagcatgatcggttcctttatcgatatataccagcaggagggcacacgaggcctatggcgaggcgtggttcctaccgcacagcgtgctgccattgtcgtaggagtggaactccccgtgtacgacatcacaaaaaaacatctcatcctgtccgggatgatgggcgacaccatcctcacgcattttgtgagctccttcacttgtgggttagccggtgccctggcgtccaatccagtcgacgtggtacgcactcgcatgatgaatcagagagcgatagtgggccacgtagatctgtacaaaggaactgttgatggcatcctgaagatgtggaagcatgagggcttcttcgccctgtataagggtttctggcccaactggctgcggctggggccttggaatattattttcttcatcacttacgaacaactgaagcgtctccagatctag

SEQ ID NO: 100508 - DNA, 597 bp, Artificial Sequence
  derived and/or modified sequence
atgggcattttcccagggattatcctgatttttctcagggtgaagttcgccaccgccgcagtgattgtgtcaggacaccagaaatctacgacagtgtcgcacgagatgtcagggttgaattggaaaccatttgtttatggaggcttagcttcaattgtggcagaatttggcacgtttcctgttgatctgacaaagactaggctccaggtgcaaggacagtctattgacgcacggttcaaggaaatcaagtatcgtggcatgttccatgcattatttaggatttgcaaagaggagggcgttctagccttgtactctggcatcgcacctgcgctgctgaggcaggcttcctatggtactatcaagatcggaatttatcagtctctgaaaagactgtttgtggagagactggaagatgagacactcttgatcaacatgatctgtggagttgtaagcggggtgattagttccacaatagctaaccctactgatgtcctgaagataaggatgcaggcccaaggcagtcttttccaggggtcgatgatcggaagttttatagatatctaccagcaggagggaacccggggactgtggaggtag

SEQ ID NO: 100509 - DNA, 723 bp, Artificial Sequence
  derived and/or modified sequence
atgggaattttccctggcattatcctaatcttcctgcgagttaaatttgccacagccgcagtgattgtctcgggccatcagaagagcacgactgtgagtcatgagatgagcggtttaaactggaaaccattcgtatacggaggcttggcgagcatcgtggcggagttcgggacctttccagtagatcttacaaaaacaaggctgcaggtgcagggccagtcaattgacgctagattcaaagagatcaagtatcgcggtatgtttcatgctttgtttcgaatttgcaaagaagaaggcgttttggcactgtacagtggtattgcgcctgccctccttcggcaggctagttatgggactataaaaataggcatttaccaaagtctaaagcgcctgttcgttgagagacttgaggacgagaccttattgataaacatgatttgcggggtggttagcggcgttattagcagcactattgccaatcccaccgatgtcctgaagatccgaatgcaagcgcaggggtccctttttcaagggagcatgatcggctcatttattgatatctaccaacaggagggcactcgagggctgtggagaggcgtggtgcctacagcacagagggcagcaatcgttgtcggcgtggaactgcctgtgtatgacatcacaaagaaacatctgatcttgagcggtatgatgggtgacaccatcctgacccactttgtttag

SEQ ID NO: 100510 - DNA, 1616 bp, Artificial Sequence
  derived and/or modified sequence
ctggttcccggcctgggaggggcttaacggtcctctggtctctctctcccctcagctgagtcccttccctgtctttcactcttctggcatcggtggttttacttcttcgattgaaccctgcttcctcgacccccctgggaggccgccttcttcaggcgcctcccttctctccacgagctcgctctgacagctgaggaactggcaagatcctgctacccagagggtgaatgggtatctttcccggaataatcctaatttttctaagggtgaagtttgcaacggcggccgtgattgtaagcggacaccagaaaagtaccactgtaagtcatgagatgtctggtctgaattggaaaccctttgtatatggcggccttgcctctatcgtggctgagtttgggactttccctgtggaccttaccaaaacacgacttcaggttcaaggccaaagcattgatgcccgtttcaaagagataaaatatagagggatgttccatgcgctgtttcgcatctgtaaagaggaaggtgtattggctctctattcaggaattgctcctgcgttgctaagacaagcatcatatggcaccattaaaattgggatttaccaaagcttgaagcgcttattcgtagaacgtttagaagatgaaactcttttaattaatatgatctgtggggtagtgtcaggagtgatatcttccactatagccaatcccaccgatgttctaaagattcgaatgcaggctcaaggaagcttgttccaagggagcatgattggaagctttatcgatatataccaacaagaaggcaccaggggtctgtggaggggtgtggttccaactgctcagcgtgctgccatcgttgtaggagtagagctaccagtctatgatattactaagaagcatttaatattgtcaggaatgatgggcgatacaattttaactcacttcgtttccagctttacatgtggtttggctggggctctggcctccaacccggttgatgtggttcgaactcgcatgatgaaccagagggcaatcgtgggacatgtggatctctataagggcactgttgatggtattttaaagatgtggaaacatgagggcttttttgcactctataaaggattttggccaaactggcttcggcttggaccctggaacatcattttttttattacatacgagcagctaaagaggcttcaaatctaagaactgaattatatgtgagcccagccctgccagcctttctactcctttgcccttttcccgtgttctaatgtattttgacaatgttgtaagtgtttaccaagccgttggtctcctaagggcctcctgatggaagaacagtggggtggttcaaagttatttctatgtttgtgttaccatgttaacttttccccgagagaaagtgttaacattgagactctggccccagattggtatcttctatgaagatggatactgatgggtgacattgaaaacggcctgctttccaaatgtggttaaatgtaattggttagccccagacttgggctagagcagaaggcataggccagggtggttattgctatatgtgttacagacctcggttctcattaaagtatttattggcagaatcac

SEQ ID NO: 100511 - DNA, 831 bp, Artificial Sequence
  derived and/or modified sequence
cgctgcagtggcgtttccgactgtgggagcctcagcttcccagtcgtccgatgagcccgagcagctgagtcccttccctgtctttcactcttctggcatcggtggttttacttcttcgattgaaccctgcttcctcgacccccctgggaggccgccttcttcaggcgcctcccttctctccacgagctcgctctgacagctgaggaactggcaagatcctgctacccagagggtgaatgggtatctttcccggaataatcctaatttttctaagggtgaagtttgcaacggcggccgtgattgtaagcggacaccagaaaagtaccactgtaagtcatgagatgtctggtctgaattggaaaccctttgtatatggcggccttgcctctatcgtggctgagtttgggactttccctgtggaccttaccaaaacacgacttcaggttcaaggccaaagcattgatgcccgtttcaaagagataaaatatagagggatgttccatgcgctgtttcgcatctgtaaagaggaaggtgtattggctctctattcaggaattgctcctgcgttgctaagacaagcatcatatggcaccattaaaattgggatttaccaaagcttgaagcgcttattcgtagaacgtttagaagatgaaactcttttaattaatatgatctgtggggtagtgtcaggagtgatatcttccactatagccaatcccaccgatgttctaaagattcgaatgcaggctcaaggaagcttgttccaagggagcatgattggaagctttatcgatatataccaacaagaaggcaccaggggtctgtggaggg

SEQ ID NO: 100512 - DNA, 1019 bp, Artificial Sequence
  derived and/or modified sequence
agtcgtccgatgagcccgagcagctgagtcccttccctgtctttcactcttctggcatcggtggttttacttcttcgattgaaccctgcttcctcgacccccctgggaggccgccttcttcaggcgcctcccttctctccacgagctcgctctgacagctgaggaactggcaagatcctgctacccagagggtgaatgggtatctttcccggaataatcctaatttttctaagggtgaagtttgcaacggcggccgtgattgtaagcggacaccagaaaagtaccactgtaagtcatgagatgtctggtctgaattggaaaccctttgtatatggcggccttgcctctatcgtggctgagtttgggactttccctgtggaccttaccaaaacacgacttcaggttcaaggccaaagcattgatgcccgtttcaaagagataaaatatagagggatgttccatgcgctgtttcgcatctgtaaagaggaaggtgtattggctctctattcaggaattgctcctgcgttgctaagacaagcatcatatggcaccattaaaattgggatttaccaaagcttgaagcgcttattcgtagaacgtttagaagatgaaactcttttaattaatatgatctgtggggtagtgtcaggagtgatatcttccactatagccaatcccaccgatgttctaaagattcgaatgcaggctcaaggaagcttgttccaagggagcatgattggaagctttatcgatatataccaacaagaaggcaccaggggtctgtggaggggtgtggttccaactgctcagcgtgctgccatcgttgtaggagtagagctaccagtctatgatattactaagaagcatttaatattgtcaggaatgatgggcgatacaattttaactcacttcgtgtaagtaggatgggatgtgctcattttatttccagcattttgagcacaaaaagcctcttttactgaaatcctcaggtggaatttgataactggtacgtatggcct

SEQ ID NO: 100513 - DNA, 978 bp, Artificial Sequence
  derived and/or modified sequence
atgggcatcttccccggcatcatcctgatcttcctgagagtgaagttcgccaccgccgccgtgatcgtgagcggccaccagaagagcaccaccgtgagccacgagatgagcggcctgaactggaagcccttcgtgtacggcggcctggccagcatcgtggccgagttcggcaccttccccgtggacctgaccaagaccagactgcaggtgcagggccagagcatcgacgccagattcaaggagatcaagtacagaggcatgttccacgccctgttcagaatctgcaaggaggagggcgtgctggccctgtacagcggcatcgcccccgccctgctgagacaggccagctacggcaccatcaagatcggcatctaccagagcctgaagagactgttcgtggagagactggaggacgagaccctgctgatcaacatgatctgcggcgtggtgagcggcgtgatcagcagcaccatcgccaaccccaccgacgtgctgaagatcagaatgcaggcccagggcagcctgttccagggcagcatgatcggcagcttcatcgacatctaccagcaggagggcaccagaggcctgtggagaggcgtggtgcccaccgcccagagagccgccatcgtggtgggcgtggagctgcccgtgtacgacatcaccaagaagcacctgatcctgagcggcatgatgggcgacaccatcctgacccacttcgtgagcagcttcacctgcggcctggccggcgccctggccagcaaccccgtggacgtggtgagaaccagaatgatgaaccagagagccatcgtgggccacgtggacctgtacaagggcaccgtggacggcatcctgaagatgtggaagcacgagggcttcttcgccctgtacaagggcttctggcccaactggctgagactgggcccctggaacatcatcttcttcatcacctacgagcagctgaagagactgcagatctag

SEQ ID NO: 100514 - DNA, 597 bp, Artificial Sequence
  derived and/or modified sequence
atgggcatcttccccggcatcatcctgatcttcctgagagtgaagttcgccaccgccgccgtgatcgtgagcggccaccagaagagcaccaccgtgagccacgagatgagcggcctgaactggaagcccttcgtgtacggcggcctggccagcatcgtggccgagttcggcaccttccccgtggacctgaccaagaccagactgcaggtgcagggccagagcatcgacgccagattcaaggagatcaagtacagaggcatgttccacgccctgttcagaatctgcaaggaggagggcgtgctggccctgtacagcggcatcgcccccgccctgctgagacaggccagctacggcaccatcaagatcggcatctaccagagcctgaagagactgttcgtggagagactggaggacgagaccctgctgatcaacatgatctgcggcgtggtgagcggcgtgatcagcagcaccatcgccaaccccaccgacgtgctgaagatcagaatgcaggcccagggcagcctgttccagggcagcatgatcggcagcttcatcgacatctaccagcaggagggcaccagaggcctgtggagatag

SEQ ID NO: 100515 - DNA, 723 bp, Artificial Sequence
  derived and/or modified sequence
atgggcatcttccccggcatcatcctgatcttcctgagagtgaagttcgccaccgccgccgtgatcgtgagcggccaccagaagagcaccaccgtgagccacgagatgagcggcctgaactggaagcccttcgtgtacggcggcctggccagcatcgtggccgagttcggcaccttccccgtggacctgaccaagaccagactgcaggtgcagggccagagcatcgacgccagattcaaggagatcaagtacagaggcatgttccacgccctgttcagaatctgcaaggaggagggcgtgctggccctgtacagcggcatcgcccccgccctgctgagacaggccagctacggcaccatcaagatcggcatctaccagagcctgaagagactgttcgtggagagactggaggacgagaccctgctgatcaacatgatctgcggcgtggtgagcggcgtgatcagcagcaccatcgccaaccccaccgacgtgctgaagatcagaatgcaggcccagggcagcctgttccagggcagcatgatcggcagcttcatcgacatctaccagcaggagggcaccagaggcctgtggagaggcgtggtgcccaccgcccagagagccgccatcgtggtgggcgtggagctgcccgtgtacgacatcaccaagaagcacctgatcctgagcggcatgatgggcgacaccatcctgacccacttcgtgtag

SEQ ID NO: 100516 - protein, 322 aa, Artificial Sequence
  derived and/or modified sequence
MGIFPGIILIFLRVKFATAAVIHQKSTTVSHEMSGLNWKPFVYGGLASIVAEFGTFPVDLTKTRLQVQGQSIDARFKEIKYRGMFHALFRICKEEGVLALYSGIAPALLRQASYGTIKIGIYQSLKRLFVERLEDETLLINMICGVVSGVISSTIANPTDVLKIRMQAQGSLFQGSMIGSFIDIYQQEGTRGLWRGVVPTAQRAAIVVGVELPVYDITKKHLILSGMMGDTILTHFVSSFTCGLAGALASNPVDVVRTRMMNQRAIVGHVDLYKGTVDGILKMWKHEGFFALYKGFWPNWLRLGPWNIIFFITYEQLKRLQI

SEQ ID NO: 100517 - DNA, 969 bp, Artificial Sequence
  derived and/or modified sequence
atggggattttccctgggatcatcctcatcttcctaagagtcaaatttgcaaccgcagccgtgatccaccagaagagtaccactgtctctcacgaaatgagcggactcaactggaaaccttttgtgtacggggggcttgcctcaatagtcgctgaatttggaacttttcccgttgacttgacgaaaacccggctccaagtgcaggggcagagtatcgatgcacgatttaaggagattaaatataggggcatgtttcacgccctcttcagaatctgcaaggaggaaggagtgttggccctgtacagcggcattgcgccagccctccttcgacaggccagttacggaaccattaagataggcatctaccagtccctgaagcgactttttgtcgagcgcttggaagacgagactctgctcataaatatgatctgtggagttgtctctggagtgatttccagtaccatcgcaaaccctactgacgtgctgaaaatccgcatgcaggcccaaggttcacttttccagggcagtatgattggctcattcattgacatttatcagcaggaagggaccagaggattgtggcgcggagttgtcccgacggcccaacgcgccgccatagtcgtgggcgtggaactgcccgtgtacgatattacgaagaaacacctcattctcagtggcatgatgggtgatacaatcctaacccactttgtgtcctctttcacatgtggactcgccggagccctggcttccaaccctgttgatgtggtgcgaactcgtatgatgaatcaaagggcaatagttgggcacgtggatctgtacaagggaacggtcgacggcatactaaaaatgtggaaacacgagggctttttcgcattatacaaaggattctggcccaattggctcagactcggcccttggaatatcatattctttattacgtacgagcagctgaagaggctgcaaatatag

SEQ ID NO: 100518 - DNA, 969 bp, Artificial Sequence
  derived and/or modified sequence
atgggcatcttccctggcatcatcctgatcttcctgcgggtgaagtttgccacagctgctgtgatccaccagaagagcaccaccgtgtcccatgagatgagcggcctgaactggaagccctttgtgtatggaggcctggccagcatcgtggccgagtttggcaccttccctgtggacctgaccaagacccggctgcaggtgcagggccagagcattgatgcccgcttcaaggagatcaagtaccggggcatgttccacgccctcttccgcatctgcaaggaggagggcgtgctggccctgtacagcggcatcgccccagccctgctgcggcaggccagctatggcaccatcaagattggcatctaccagagcctgaagaggctgtttgtggagcggctggaggatgagaccctgctgatcaacatgatctgtggggtggtgtctggagtcatcagcagcaccatcgccaaccccacagatgtgctgaagatccgcatgcaggcccagggcagcctcttccagggctccatgattggcagcttcatcgacatctaccagcaggagggcacccggggcctgtggaggggcgtggtgcccacagcccagagagctgccatcgtggtgggcgtggagctgcctgtgtatgacatcaccaagaagcacctgatcctgagcggcatgatgggagacaccatcctgacccactttgtgtcctccttcacctgtggcctggccggggccctggccagcaaccctgtggatgtggtgaggaccaggatgatgaaccagagggccatcgtgggccacgtggacctgtacaagggcaccgtggatggcatcctgaagatgtggaagcatgagggcttctttgccctgtacaagggcttctggcccaactggctgcggctgggcccctggaacatcatcttcttcatcacctatgagcagctgaagaggctgcagatctag

SEQ ID NO: 100519 - DNA, 969 bp, Artificial Sequence
  derived and/or modified sequence
atgggcatcttccccggcatcatcctgatcttcctgcgggtgaagtttgccacagccgctgtgatccaccaaaagagcacaaccgtgtcacacgagatgtcgggcctcaattggaagccattcgtgtacggtggattggccagcattgtggcagaattcggcacattcccagtcgatctgactaagacaagactgcaggtccagggtcagtctatagatgcaaggttcaaggagataaaatatcgtggcatgttccacgccctgttcaggatctgtaaagaggagggcgtgcttgccctgtattcgggtatagctccggccctcctgcgccaggcaagctacggcaccatcaagatcgggatatatcagtctctaaagcggcttttcgttgagagactggaggatgagaccttgttgataaatatgatctgtggagtcgtatctggagtcatatcgagtacgatagccaatccaacggatgttcttaagattcggatgcaggcacaggggtccttgttccagggttccatgattggcagctttattgacatttaccaacaggaggggacccggggcttgtggcggggggtagtgcctactgctcaacgcgccgctatagtggtgggagtggagctgcctgtgtacgatatcaccaagaagcacctcatcctgtctgggatgatgggggacaccattctaacccacttcgtgagctccttcacttgtggcctggccggcgctcttgcctctaatcccgttgacgttgttagaacccgaatgatgaaccagagagccattgtgggtcacgtggacctatacaaagggacggtggacggcattctgaagatgtggaagcatgaggggttctttgctctttataaggggttttggccgaactggctgcggttgggcccctggaacattattttttttataacgtatgagcagctcaagaggttgcagatctag

SEQ ID NO: 100520 - DNA, 969 bp, Artificial Sequence
  derived and/or modified sequence
atgggaattttcccagggattatcctcatattcttgcgggtaaagtttgccacggccgcagtgattcatcagaagtcaaccacggtctcacatgagatgtcagggctcaactggaaaccctttgtatatggcggactggccagcattgttgcggagtttggcacatttccagtggacctgacgaaaacacgcctgcaggtgcagggccagagcatcgacgcccgttttaaggaaattaaatatcggggtatgtttcacgctctctttcgtatttgcaaagaagaaggagtgttagcgctctactcaggtatcgctccggcactcttgaggcaggccagctacggaactataaaaatcggcatttatcagtcacttaaacggctgttcgtggagcgcctggaggatgagacattactcatcaatatgatttgtggagtagtctcaggggtgatttcaagtactattgctaatcccacagacgtgctgaagatcaggatgcaagcccaaggttcattatttcagggctctatgattggcagcttcattgacatttaccagcaggagggaactagggggctctggagaggcgtggtgccaaccgcccagcgggctgcaatcgtagttggcgtcgagttgcctgtctacgacatcaccaagaaacacctgatcctttccggaatgatgggcgatacgatacttacacactttgtcagtagcttcacctgcgggttggccggtgcgttggcatccaaccctgtcgacgtcgtgcggaccagaatgatgaatcagcgtgccatcgtggggcacgttgatctgtacaagggcaccgtcgacggtatactcaagatgtggaaacatgaaggcttcttcgcactatacaaagggttttggccaaactggctccgcctgggaccatggaatataatattcttcattacgtacgaacagctgaagcggctccagatatag

SEQ ID NO: 100521 - DNA, 969 bp, Artificial Sequence
  derived and/or modified sequence
atgggtatctttcccggaataatcctaatttttctaagggtgaagtttgcaacggcggccgtgattcaccagaaaagtaccactgtaagtcatgagatgtctggtctgaattggaaaccctttgtatatggcggccttgcctctatcgtggctgagtttgggactttccctgtggaccttaccaaaacacgacttcaggttcaaggccaaagcattgatgcccgtttcaaagagataaaatatagagggatgttccatgcgctgtttcgcatctgtaaagaggaaggtgtattggctctctattcaggaattgctcctgcgttgctaagacaagcatcatatggcaccattaaaattgggatttaccaaagcttgaagcgcttattcgtagaacgtttagaagatgaaactcttttaattaatatgatctgtggggtagtgtcaggagtgatatcttccactatagccaatcccaccgatgttctaaagattcgaatgcaggctcaaggaagcttgttccaagggagcatgattggaagctttatcgatatataccaacaagaaggcaccaggggtctgtggaggggtgtggttccaactgctcagcgtgctgccatcgttgtaggagtagagctaccagtctatgatattactaagaagcatttaatattgtcaggaatgatgggcgatacaattttaactcacttcgtttccagctttacatgtggtttggctggggctctggcctccaacccggttgatgtggttcgaactcgcatgatgaaccagagggcaatcgtgggacatgtggatctctataagggcactgttgatggtattttaaagatgtggaaacatgagggcttttttgcactctataaaggattttggccaaactggcttcggcttggaccctggaacatcattttttttattacatacgagcagctaaagaggcttcaaatctaa

SEQ ID NO: 100522 - DNA, 1621 bp, Artificial Sequence
  derived and/or modified sequence
gtccgatgagcccgagcagcaccagaaaagtaccactgtaagtcatgagatgtctggtctgaattggaaaccctttgtatatggcggccttgcctctatcgtggctgagtttgggactttccctgtggaccttaccaaaacacgacttcaggttcaaggccaaagcattgatgcccgtttcaaagagataaaatatagagggatgttccatgcgctgtttcgcatctgtaaagaggaaggtgtattggctctctattcaggaattgctcctgcgttgctaagacaagcatcatatggcaccattaaaattgggatttaccaaagcttgaagcgcttattcgtagaacgtttagaagatgaaactcttttaattaatatgatctgtggggtagtgtcaggagtgatatcttccactatagccaatcccaccgatgttctaaagattcgaatgcaggctcaaggaagcttgttccaagggagcatgattggaagctttatcgatatataccaacaagaaggcaccaggggtctgtggaggggtgtggttccaactgctcagcgtgctgccatcgttgtaggagtagagctaccagtctatgatattactaagaagcatttaatattgtcaggaatgatgggcgatacaattttaactcacttcgtgtaagtaggatgggatgtgctcattttatttccagcattttgagcacaaaaagcctcttttactgaaatcctcaggtggaatttgataactggtacgtatggcctaaattcccttgtctctcctattatcagaacttcaagccttatgaacactttatacttcacagaaatgccaggtgctatgggggcttgggtacttgggaacattgtctaatacagcagcctatcagaggtctatttgatttacatttatccatacatagcttctatatctaataagcacatctattatttgctttggttaattttgtttgagaaagcaaacttttctcagtgggaatcagaaaaaaaggggtaaataaggtctgtgaaactaaagcacagttttttggctaaagactgttactgatctcattttacattttctttgtcttgcaacctttatgataattttgttactcaaatgcatttggcatgtgatgctgtggtttgaaaaatttatgtaactaatacatggtgcatgatactttctacttaggaatcttgttaggtttagaaactctcctttaaaaaaaaggctgagtttcagattgaaaattgaagggacagcctttgaatgatgtctctttagaaaaatttcctgtctctttagattgtaacgaaaggccaagtgccaggttttatctgatgggtctgagttatattgtacagtttacgtttggcctaatttctgtttaagtgggcagggagtgaaagtggggtcgatctacttaaacttttcctcttagttccagctttacatgtggtttggctggggctctggcctccaacccggttgatgtggttcgaactcgcatgatgaaccagagggcaatcgtgggacatgtggatctctataagggcactgttgatggtattttaaagatgtggaaacatgagggcttttttgcactctata

SEQ ID NO: 100523 - DNA, 969 bp, Artificial Sequence
  derived and/or modified sequence
atgggcatcttccccggcatcatcctgatcttcctgagagtgaagttcgccaccgccgccgtgatccaccagaagagcaccaccgtgagccacgagatgagcggcctgaactggaagcccttcgtgtacggcggcctggccagcatcgtggccgagttcggcaccttccccgtggacctgaccaagaccagactgcaggtgcagggccagagcatcgacgccagattcaaggagatcaagtacagaggcatgttccacgccctgttcagaatctgcaaggaggagggcgtgctggccctgtacagcggcatcgcccccgccctgctgagacaggccagctacggcaccatcaagatcggcatctaccagagcctgaagagactgttcgtggagagactggaggacgagaccctgctgatcaacatgatctgcggcgtggtgagcggcgtgatcagcagcaccatcgccaaccccaccgacgtgctgaagatcagaatgcaggcccagggcagcctgttccagggcagcatgatcggcagcttcatcgacatctaccagcaggagggcaccagaggcctgtggagaggcgtggtgcccaccgcccagagagccgccatcgtggtgggcgtggagctgcccgtgtacgacatcaccaagaagcacctgatcctgagcggcatgatgggcgacaccatcctgacccacttcgtgagcagcttcacctgcggcctggccggcgccctggccagcaaccccgtggacgtggtgagaaccagaatgatgaaccagagagccatcgtgggccacgtggacctgtacaagggcaccgtggacggcatcctgaagatgtggaagcacgagggcttcttcgccctgtacaagggcttctggcccaactggctgagactgggcccctggaacatcatcttcttcatcacctacgagcagctgaagagactgcagatctag

SEQ ID NO: 100524 - protein, 353 aa, Artificial Sequence
  derived and/or modified sequence
MGIFPGIILIFLRVKFATAAVIHQKSTTVSHEMSGLNWKPFVYGGLASIVAEFGTFPVDLTKTRLQVQGQSIDARFKEIKYRGMFHALFRICKEEGVLALYSGIAPALLRQASYGTIKIGIYQSLKRLFVERLEDETLLINMICGVVSGVISSTIANPTDVLKIRMQAQGSLFQGSMIGSFIDIYQQEGTRGLWRCLCSKAVTGCVLWLMPVIPALWEANAGGSLEGVVPTAQRAAIVVGVELPVYDITKKHLILSGMMGDTILTHFVSSFTCGLAGALASNPVDVVRTRMMNQRAIVGHVDLYKGTVDGILKMWKHEGFFALYKGFWPNWLRLGPWNIIFFITYEQLKRLQI

SEQ ID NO: 100525 - DNA, 1062 bp, Artificial Sequence
  derived and/or modified sequence
atgggtatctttccgggaatcattcttatcttcctgcgagtgaaatttgcaacagctgctgtcattcaccaaaagagcaccacggtcagtcacgaaatgagtgggctgaactggaaacctttcgtctacggcggcctagcgtcgatagtagccgaatttgggacattccctgtggatctgaccaaaacgcggttgcaggtacaaggacagagcattgatgcgcgatttaaggagattaaatatagggggatgtttcatgctttgttccgcatttgcaaggaagaaggcgtcctggcactgtactcaggcatcgcaccggccctgcttcgacaggcctcttacggaacaataaagatcggaatttatcagagcctcaaaaggctatttgtggagcgactggaagatgagacgctgctgattaacatgatttgtggcgtcgtgagtggtgtcatcagcagcacgatcgctaatcctaccgacgttctgaagatcagaatgcaagcccagggaagcctgttccagggcagtatgattgggtcgttcatcgatatctaccaacaagaaggcacacggggattgtggaggtgtctctgttcaaaggctgtgacggggtgcgtgctgtggctaatgcccgtcatccctgcactgtgggaggctaatgcaggcgggagtctggagggggtggtgcctacagcacagcgggctgcgattgtcgtgggggtggagctaccagtgtacgatatcaccaagaaacacctgatcctttccggaatgatgggcgacaccatcctaacccactttgtttccagctttacttgtggcctggccggggccctagccagcaatcctgttgatgttgttcggacgcgcatgatgaaccagcgagccattgtgggacatgtggatctgtataaggggactgtcgatggcatcctgaagatgtggaagcacgaggggttctttgcactgtacaaaggtttctggcccaactggcttcggctcggcccctggaatatcatcttcttcatcacttatgaacagctgaagagactacagatttag

SEQ ID NO: 100526 - DNA, 1062 bp, Artificial Sequence
  derived and/or modified sequence
atgggcatcttccctggcatcatcctgatcttcctgcgggtgaagtttgccacagctgctgtgatccaccagaagagcaccaccgtgtcccatgagatgagcggcctgaactggaagccctttgtgtatggaggcctggccagcatcgtggccgagtttggcaccttccctgtggacctgaccaagacccggctgcaggtgcagggccagagcattgatgcccgcttcaaggagatcaagtaccggggcatgttccacgccctcttccgcatctgcaaggaggagggcgtgctggccctgtacagcggcatcgccccagccctgctgcggcaggccagctatggcaccatcaagattggcatctaccagagcctgaagaggctgtttgtggagcggctggaggatgagaccctgctgatcaacatgatctgtggggtggtgtctggagtcatcagcagcaccatcgccaaccccacagatgtgctgaagatccgcatgcaggcccagggcagcctcttccagggctccatgattggcagcttcatcgacatctaccagcaggagggcacccggggcctgtggcgctgcctgtgcagcaaggctgtgacaggctgtgtgctgtggctgatgcctgtgatcccagccctgtgggaggccaatgccggcggcagcctggagggcgtggtgcccacagcccagagagctgccatcgtggtgggcgtggagctgcctgtgtatgacatcaccaagaagcacctgatcctgagcggcatgatgggagacaccatcctgacccactttgtgagcagcttcacctgtggcctggccggggccctggccagcaaccctgtggatgtggtgaggaccaggatgatgaaccagagggccatcgtgggccacgtggacctgtacaagggcaccgtggatggcatcctgaagatgtggaagcatgagggcttctttgccctgtacaagggcttctggcccaactggctgcggctgggcccctggaacatcatcttcttcatcacctatgagcagctgaagaggctgcagatctag

SEQ ID NO: 100527 - DNA, 1062 bp, Artificial Sequence
  derived and/or modified sequence
atgggcatcttccccggcatcatcctgatcttcctgcgggtgaagtttgccaccgcggccgtaatccatcagaagtctaccacggtttcacacgagatgagtggtctgaattggaaaccgtttgtgtatggtggccttgcctcaattgtcgccgagtttggcacttttcccgtggatttgaccaaaaccaggctccaggtccagggccagagcatagacgccagattcaaagaaatcaaataccgcggcatgttccatgccctgttccggatatgcaaagaagaaggggtcctggcattgtacagtgggattgcaccagctctgctgcgccaggccagctacggcacaattaagattggcatttaccaatcgctgaagcgactgtttgtggagagactggaggacgagacgctgctgataaatatgatctgtggcgtggtatccggtgtgattagctccacgattgcaaacccgaccgacgttctgaagatccgcatgcaggcacaaggcagcctgttccagggcagcatgatcggaagtttcatcgacatttatcagcaggaaggtacccgcggcctctggcgttgcctgtgttctaaagctgtcaccgggtgtgttctatggctcatgccagtcatccccgccctgtgggaggccaacgcgggcggtagtcttgagggcgtggtgcctaccgcccagagggccgccatcgtggtcggagtcgaactgcctgtctatgatatcacgaaaaaacatttgatcctttcaggaatgatgggagatactattttgacacacttcgtaagttcatttacttgcggcttggccggggcattagcctcaaaccctgtggatgtggtacgtacccgaatgatgaaccaacgggccattgtggggcatgtggacctatataagggcactgttgatggtatcctaaaaatgtggaagcatgagggcttctttgccctgtacaaggggttttggcctaactggttgcggctgggtccttggaatatcatcttttttatcacatacgaacagctaaagaggctgcagatctag

SEQ ID NO: 100528 - DNA, 1062 bp, Artificial Sequence
  derived and/or modified sequence
atgggcatcttccctggtattatacttatcttccttcgcgttaaatttgcaacggcagcagttattcaccagaagagcaccacagtgtcccacgaaatgtctggcctaaactggaaacctttcgtatacggcggactggcgtcaatcgttgcagagtttgggacatttcctgtggacctgacaaaaacacggcttcaggtgcaagggcaaagcattgatgcccgattcaaggaaatcaagtatcggggaatgtttcatgcgctcttcaggatctgtaaagaggaaggagttctcgctttgtactcaggaatagctcccgctctgctccgccaggccagctatgggacgatcaagatcggaatataccaatcgctgaaaaggctgtttgtcgagaggctagaagatgagaccctgttaattaacatgatctgcggagtggtgtctggggtaatttcttcaaccattgccaaccctacagatgttctgaagatccgcatgcaggcccaggggtccctctttcagggctctatgataggaagcttcattgatatctaccagcaagagggcacacgcggtctatggagatgcctgtgtagcaaagctgtaaccggttgcgtgctttggctgatgccagttattcccgcattatgggaagctaatgccggtggaagcctcgaaggggtcgtgcccacggcccagagagccgctattgtcgtcggggtggagctgcctgtgtacgatattactaagaaacacttaatcctgtcaggcatgatgggggacactatcctgactcacttcgtgtcctccttcacctgcggactcgcgggagcactcgcctcaaacccagtcgacgtggtgagaacccgcatgatgaaccagcgagctatcgtcgggcacgtggatttatacaaaggaactgtcgatggaatcctcaaaatgtggaagcatgagggattctttgctctttacaagggattctggccaaactggcttagattggggccatggaacattattttcttcatcacctacgagcagctgaagagactgcagatatag

SEQ ID NO: 100529 - DNA, 1062 bp, Artificial Sequence
  derived and/or modified sequence
atgggtatctttcccggaataatcctaatttttctaagggtgaagtttgcaacggcggccgtgattcaccagaaaagtaccactgtaagtcatgagatgtctggtctgaattggaaaccctttgtatatggcggccttgcctctatcgtggctgagtttgggactttccctgtggaccttaccaaaacacgacttcaggttcaaggccaaagcattgatgcccgtttcaaagagataaaatatagagggatgttccatgcgctgtttcgcatctgtaaagaggaaggtgtattggctctctattcaggaattgctcctgcgttgctaagacaagcatcatatggcaccattaaaattgggatttaccaaagcttgaagcgcttattcgtagaacgtttagaagatgaaactcttttaattaatatgatctgtggggtagtgtcaggagtgatatcttccactatagccaatcccaccgatgttctaaagattcgaatgcaggctcaaggaagcttgttccaagggagcatgattggaagctttatcgatatataccaacaagaaggcaccaggggtctgtggaggtgcttatgttcaaaagctgttaccggctgtgtgctgtggctcatgcctgtaatcccagcactttgggaggccaacgcgggtggatcacttgagggtgtggttccaactgctcagcgtgctgccatcgttgtaggagtagagctaccagtctatgatattactaagaagcatttaatattgtcaggaatgatgggcgatacaattttaactcacttcgtttccagctttacatgtggtttggctggggctctggcctccaacccggttgatgtggttcgaactcgcatgatgaaccagagggcaatcgtgggacatgtggatctctataagggcactgttgatggtattttaaagatgtggaaacatgagggcttttttgcactctataaaggattttggccaaactggcttcggcttggaccctggaacatcattttttttattacatacgagcagctaaagaggcttcaaatctaa

SEQ ID NO: 100530 - DNA, 1062 bp, Artificial Sequence
  derived and/or modified sequence
atgggcatcttccccggcatcatcctgatcttcctgagagtgaagttcgccaccgccgccgtgatccaccagaagagcaccaccgtgagccacgagatgagcggcctgaactggaagcccttcgtgtacggcggcctggccagcatcgtggccgagttcggcaccttccccgtggacctgaccaagaccagactgcaggtgcagggccagagcatcgacgccagattcaaggagatcaagtacagaggcatgttccacgccctgttcagaatctgcaaggaggagggcgtgctggccctgtacagcggcatcgcccccgccctgctgagacaggccagctacggcaccatcaagatcggcatctaccagagcctgaagagactgttcgtggagagactggaggacgagaccctgctgatcaacatgatctgcggcgtggtgagcggcgtgatcagcagcaccatcgccaaccccaccgacgtgctgaagatcagaatgcaggcccagggcagcctgttccagggcagcatgatcggcagcttcatcgacatctaccagcaggagggcaccagaggcctgtggagatgcctgtgcagcaaggccgtgaccggctgcgtgctgtggctgatgcccgtgatccccgccctgtgggaggccaacgccggcggcagcctggagggcgtggtgcccaccgcccagagagccgccatcgtggtgggcgtggagctgcccgtgtacgacatcaccaagaagcacctgatcctgagcggcatgatgggcgacaccatcctgacccacttcgtgagcagcttcacctgcggcctggccggcgccctggccagcaaccccgtggacgtggtgagaaccagaatgatgaaccagagagccatcgtgggccacgtggacctgtacaagggcaccgtggacggcatcctgaagatgtggaagcacgagggcttcttcgccctgtacaagggcttctggcccaactggctgagactgggcccctggaacatcatcttcttcatcacctacgagcagctgaagagactgcagatctag

SEQ ID NO: 100531 - DNA, 618 bp, Artificial Sequence
  derived and/or modified sequence
atgtcaggtttgaattggaagccctttgtctatggtgggctggcaagcatcgtggcggagttcgggacatttccagtggatctaacaaaaacccgtctgcaagtgcaaggccagtcaatcgacgcccgcttcaaggaaatcaagtaccgggggatgtttcacgcgctgttccgcatttgcaaggaagaaggagtgctggctctttatagcggaatcgcccccgctctcctcagacaggcctcctacggcacaatcaaaatcggaatataccagagcctgaagcggctgttcgtcgagaggcttgaggacgagactctcctcattaacatgatctgcggagtggtctctggagtgattagcagtactatagctaaccctaccgacgtgcttaagatccgcatgcaagcccaggggagcctcttccaaggcagtatgataggctcttttattgacatctaccagcaggaaggtacacgcggcctgtggcggggtgtcgttcccaccgctcagagagccgccattgtagtcggcgtggagttgcctgtgtatgacattacaaaaaagcatctcattttaagcggcatgatgggggacaccatcctcacccacttcgtgtag

SEQ ID NO: 100532 - DNA, 618 bp, Artificial Sequence
  derived and/or modified sequence
atgagcggcctgaactggaagccctttgtgtatggaggcctggccagcatcgtggccgagtttggcaccttccctgtggacctgaccaagacccggctgcaggtgcagggccagagcattgatgcccgcttcaaggagatcaagtaccggggcatgttccacgccctcttccgcatctgcaaggaggagggcgtgctggccctgtacagcggcatcgccccagccctgctgcggcaggccagctatggcaccatcaagattggcatctaccagagcctgaagaggctgtttgtggagcggctggaggatgagaccctgctgatcaacatgatctgtggggtggtgtctggagtcatcagcagcaccatcgccaaccccacagatgtgctgaagatccgcatgcaggcccagggcagcctcttccagggctccatgattggcagcttcatcgacatctaccagcaggagggcacccggggcctgtggaggggcgtggtgcccacagcccagagagctgccatcgtggtgggcgtggagctgcctgtgtatgacatcaccaagaagcacctgatcctgagcggcatgatgggagacaccatcctgacccactttgtgtag

SEQ ID NO: 100533 - DNA, 618 bp, Artificial Sequence
  derived and/or modified sequence
atgagcggcctgaactggaagcccttcgtgtacggcggcctggccagtattgtcgcggaatttggcacttttccagtagacctgactaagactcgcctccaggttcagggacagagcattgatgctaggttcaaagagattaagtacagagggatgtttcacgcactattccgaatttgcaaagaggagggcgtcctcgccttgtattccggtattgctccggcactcctgaggcaagcctcgtatgggaccattaagatcggaatataccaatcacttaaaaggctgttcgttgaaaggctagaagatgagacactcctgatcaacatgatatgcggagtggtaagtggagtgatctcatctactattgctaatcctacagatgttttgaaaatccgtatgcaggctcagggatccctgtttcaggggagtatgattgggtcttttatagacatataccagcaggaaggtacccgcgggctttggagaggcgtggtccccactgcccaaagggcggccatcgtcgtgggagtcgagctgccagtgtatgacataacaaagaaacacctcatactgagcgggatgatgggcgatacaatcctaactcatttcgtgtag

SEQ ID NO: 100534 - DNA, 618 bp, Artificial Sequence
  derived and/or modified sequence
atgagtggactgaactggaaaccattcgtgtatggaggtctggccagcattgtcgcggagtttggtacctttccggtggatctgaccaagacacgactccaagtccaaggacagtcgatagacgcccgattcaaagagattaagtatcgagggatgttccatgccctgttccgcatttgtaaagaagaaggcgtcctggcattatattcggggattgcccctgccctcttaaggcaagccagttacggtaccattaaaatcggcatctaccagtcactgaaacgactgttcgtggagcgcctggaagacgagactctcctgatcaacatgatctgcggcgtggtgtccggggtgattagtagcacaatcgctaaccccaccgatgttctgaagattaggatgcaggctcaggggtccctctttcagggaagcatgataggatcattcatcgacatctaccagcaagagggaacaagaggactttggaggggcgtggtcccaacggcacagagagctgcaatcgtcgtgggggttgagcttccagtttatgacattacaaagaagcacctgattctgtctggtatgatgggagacaccatcctgacgcactttgtttag

SEQ ID NO: 100535 - DNA, 618 bp, Artificial Sequence
  derived and/or modified sequence
atgagcggcctgaactggaagcccttcgtgtacggcggcctggccagcatcgtggccgagttcggcaccttccccgtggacctgaccaagaccagactgcaggtgcagggccagagcatcgacgccagattcaaggagatcaagtacagaggcatgttccacgccctgttcagaatctgcaaggaggagggcgtgctggccctgtacagcggcatcgcccccgccctgctgagacaggccagctacggcaccatcaagatcggcatctaccagagcctgaagagactgttcgtggagagactggaggacgagaccctgctgatcaacatgatctgcggcgtggtgagcggcgtgatcagcagcaccatcgccaaccccaccgacgtgctgaagatcagaatgcaggcccagggcagcctgttccagggcagcatgatcggcagcttcatcgacatctaccagcaggagggcaccagaggcctgtggagaggcgtggtgcccaccgcccagagagccgccatcgtggtgggcgtggagctgcccgtgtacgacatcaccaagaagcacctgatcctgagcggcatgatgggcgacaccatcctgacccacttcgtgtag

SEQ ID NO: 100536 - protein, 189 aa, Artificial Sequence
  derived and/or modified sequence
MQWAVGRRWAWAALLLAVAAVLTQVVWLWLGLDHELAFSRLIEELQWVFVNAGGWMGAMCLLHASLSEYVLLFGTALGSRGHSGRYWAEISDTIISGTFHQWREGTTKSEVFYPGETVVHGPGEATAVEWGPNTWMVEYGRGVIPSTLAFALADTVFSTQDFLTLFYTLRSYARGLRLELTTYLFGQDP

SEQ ID NO: 100537 - DNA, 570 bp, Artificial Sequence
  derived and/or modified sequence
atgcagtgggcggtgggacgcagatgggcctgggctgcccttctgctcgctgtcgcagccgtcctcactcaggtggtctggctctggctgggtttggatcacgaacttgccttttcacggctgatcgaggagcttcaatgggtctttgtaaacgctggcggatggatgggggcgatgtgtctgctgcatgcatcgttgagcgaatatgttcttctgtttggtacagcactgggcagtcgcggccacagcggccggtattgggccgagatctccgatacaatcatctccggcactttccaccagtggagggagggaaccacgaaatcagaagtcttttatcctggagagaccgtcgttcacggtcccggggaggctaccgccgtggagtggggaccaaacacctggatggtggaatatggtcgtggcgtgattccctcaacactggcgttcgccctggctgataccgtgttcagcactcaagattttctgacgctgttttatacattaagaagctatgctcgtggcttgcgactggagctcactacctatctttttgggcaggacccctag

SEQ ID NO: 100538 - DNA, 405 bp, Artificial Sequence
  derived and/or modified sequence
atgggtgcaatgtgccttctgcacgcgtctctctccgagtatgtgctgctttttggaactgccctgggctctagaggacacagcgggcgatattgggcagaaatcagcgataccatcatatcgggcacattccaccagtggcgggagggcaccacgaagtctgaggtgttctaccctggagagacggttgtccacgggcccggagaagctacagctgtggagtgggggcccaacacttggatggttgagtatgggaggggggtcattccttccacccttgcctttgcactcgccgacactgtattttcaacacaggatttcctcaccctattttacaccttgcgctcttatgctagggggcttaggcttgagctcaccacctacctcttcgggcaggatccctag

SEQ ID NO: 100539 - DNA, 570 bp, Artificial Sequence
  derived and/or modified sequence
atgcagtgggccgtgggccgccgctgggcctgggccgccctgctgctggccgtggccgctgtgctgacccaggtggtgtggctgtggctgggcctggaccacgagctggccttcagccgcctcatcgaggagctgcagtgggtgtttgtgaatgctgggggctggatgggcgccatgtgcctgctgcacgccagcctgtctgaatatgtgctgctgtttggaacagccctgggcagccggggccacagcggccgctactgggccgagatcagtgacaccatcatcagcggcaccttccaccagtggagggagggcaccaccaagtctgaggtgttctacccaggagaaacagtggtgcacggccctggagaggccacagctgtggagtggggccccaacacctggatggtggagtatggccggggcgtcatccccagcaccctggcctttgccctggccgacacagtgttcagcacccaggacttcctgaccctcttctacaccctgcggagctatgcccggggcctgcggctggagctgaccacctacctgtttggccaggacccctag

SEQ ID NO: 100540 - DNA, 405 bp, Artificial Sequence
  derived and/or modified sequence
atgggcgccatgtgcctgctgcacgccagcctgtctgaatatgtgctgctgtttggaacagccctgggcagccggggccacagcggccgctactgggccgagatcagtgacaccatcatcagcggcaccttccaccagtggagggagggcaccaccaagtctgaggtgttctacccaggagagaccgtggtgcacggccctggagaggccacagctgtggagtggggccccaacacctggatggtggagtatggccggggcgtcatccccagcaccctggcctttgccctggccgacaccgtcttcagcacccaggacttcctgaccctcttctacaccctgcggagctatgcccggggcctgcggctggagctgaccacctacctgtttggccaggacccctag

SEQ ID NO: 100541 - DNA, 570 bp, Artificial Sequence
  derived and/or modified sequence
atgcagtgggccgtgggccggcggtgggcctgggccgccctgctgttggcggtggctgcggtgctcacccaggtggtctggttgtggttgggcttggaccacgagcttgccttcagtcggctgatcgaggagcttcagtgggtcttcgtcaatgcgggaggatggatgggggccatgtgtttgctccacgcctcccttagcgaatacgttctgctatttggcacagcattgggaagcagaggccatagtggccggtactgggcagaaattagtgacacgataatttctggtaccttccatcaatggagagagggaactaccaaaagcgaggtgttctaccctggagagacagtggttcatgggcctggagaggccacagccgtggagtggggccctaatacatggatggtggaatatggtcggggggtgataccttctacgctcgcatttgccctggcagacacagttttttctacacaagactttctgaccctgttctacactctccggtcatatgctcgaggtctgaggctggaactcaccacctacctgtttggccaggacccctag

SEQ ID NO: 100542 - DNA, 405 bp, Artificial Sequence
  derived and/or modified sequence
atgggcgccatgtgcctgctgcacgccagcctgagcgagtacgtgctactctttggcaccgccctcggatctcgaggtcatagtggaaggtattgggctgagatatctgatacaattatatctggcactttccaccagtggcgggaaggtaccactaaatctgaggtattctaccctggcgagacagtggtccacggtcccggtgaagctacagctgtggagtggggccctaatacctggatggttgaatacggacgtggtgtgatcccttcaacactggccttcgcactggccgatacagttttttctacccaagacttcctgacgcttttctatacgctgcgttcctatgcacggggactacgcctcgaactgacaacctacctgtttggtcaagatccctag

SEQ ID NO: 100543 - DNA, 570 bp, Artificial Sequence
  derived and/or modified sequence
atgcagtgggcggtcgggagacggtgggcttgggctgctctgctgcttgccgtagccgctgtcctgacacaggtcgtatggctgtggcttggcttggaccacgagctggcattcagcaggctgattgaggaattgcagtgggttttcgtgaacgcgggtgggtggatgggcgctatgtgccttctccatgcctcactgtctgagtatgttcttctttttggaaccgctttaggctcccgcggtcatagcggcaggtactgggcggagatctccgacactattatatcaggaacttttcatcagtggagagagggtacaacaaaaagcgaggtcttttatccaggcgagaccgttgtgcatggccctggtgaggcgaccgcagtggagtggggcccaaacacgtggatggtggaatacggcagaggcgttattccatctactctagcgtttgctttggcagacactgtgttcagcacacaggattttctcactctattttataccctgagatcctatgccagaggacttcgcctggagctaactacatacctgttcggccaagacccgtag

SEQ ID NO: 100544 - DNA, 405 bp, Artificial Sequence
  derived and/or modified sequence
atgggcgcaatgtgtctgctgcatgcttctttaagtgagtatgtcctactttttggaaccgcattgggatcacggggacactcaggtaggtactgggctgaaataagcgataccattattagtggtacctttcaccagtggcgggaggggacaacaaaaagcgaggtgttctacccgggagagaccgtggtgcacggacccggagaagcaactgcagtggagtggggaccaaacacttggatggtcgaatacgggaggggggtcatccccagtacattagcatttgcactagctgataccgtattcagcactcaggacttcctgaccctgttttacactctgcgttcctatgcaaggggcttgagacttgagctgaccacatacctgtttggacaggacccttag

SEQ ID NO: 100545 - DNA, 1479 bp, Artificial Sequence
  derived and/or modified sequence
atgcagtgggccgtgggccggcggtgggcgtgggccgcgctgctcctggctgtcgcagcggtgctgacccaggtcgtctggctctggctggggctggaccacgagctggccttctctcgtctgatcgaggagctgcagtgggtgttcgtgaatgcgggtggctggatgggcgccatgtgccttctgcacgcctcgctgtccgagtatgtgctgctcttcggcaccgccttgggctcccgcggccactcggggcgctactgggctgagatctcggataccatcatctctggcaccttccaccagtggagagagggcaccaccaaaagtgaggtcttctacccaggggagacggtagtacacgggcctggtgaggcaacagctgtggagtgggggccaaacacatggatggtggagtacggccggggcgtcatcccatccaccctggccttcgcgctggccgacactgtcttcagcacccaggacttcctcaccctcttctatactcttcgctcctatgctcggggcctccggcttgagctcaccacctacctctttggccaggacccttgaccagccaggcctgaaggaagacctgcggatagacaggagcgggcaggcccgcacatatccacttgctggagcccatgtttacagacagggacatacaccatgcagatcctgagttcctgctgtatgagcagggatatccatgcttatgtatccaaacacagagacccatgggaacaaatgagacacatatagatactgagacctgtgtgtacagtaggaccatgcactcacacccatctggagagggagcccccggtataccaagggagccagttgtgttcagacacacacatcacagcttgactcactaactgaggcctttccatagctccacagcttcccacctcctccccaccaaaccggggttctagagttaaggatgggggagggtattatactgcctcagtctgactcctcaacccagcagcaatttgaggggatgagggggaagaggagctgccttttggaggcccccttcacctgcagctatgatgcccttccccttctcccctgtcctcaccatatgccttatccccattctactcccctgctatgcaagtgcccctgtggcttgtccccaaccccctcagcaacaaagctcagctggggaacgagagtaatttgaagaatgcttgaagtcagcgtcttccattccagaaagacccccattcttcctttgggggtatgatgtggaagctggtttcagcccaggacccaccactgaggagaggatctagacaggtgggcctaattccaaggggcccttcctggcctggagaaggccttttacacacacacaacacatacacacacacacacacacacacatatcacagttttcacacagcccctgctgcattctctgtccatctgtctgtttctattaataaagatttgttgatctgttcc

SEQ ID NO: 100546 - DNA, 570 bp, Artificial Sequence
  derived and/or modified sequence
atgcagtgggccgtgggcagaagatgggcctgggccgccctgctgctggccgtggccgccgtgctgacccaggtggtgtggctgtggctgggcctggaccacgagctggccttcagcagactgatcgaggagctgcagtgggtgttcgtgaacgccggcggctggatgggcgccatgtgcctgctgcacgccagcctgagcgagtacgtgctgctgttcggcaccgccctgggcagcagaggccacagcggcagatactgggccgagatcagcgacaccatcatcagcggcaccttccaccagtggagagagggcaccaccaagagcgaggtgttctaccccggcgagaccgtggtgcacggccccggcgaggccaccgccgtggagtggggccccaacacctggatggtggagtacggcagaggcgtgatccccagcaccctggccttcgccctggccgacaccgtgttcagcacccaggacttcctgaccctgttctacaccctgagaagctacgccagaggcctgagactggagctgaccacctacctgttcggccaggacccctag

SEQ ID NO: 100547 - DNA, 405 bp, Artificial Sequence
  derived and/or modified sequence
atgggcgccatgtgcctgctgcacgccagcctgagcgagtacgtgctgctgttcggcaccgccctgggcagcagaggccacagcggcagatactgggccgagatcagcgacaccatcatcagcggcaccttccaccagtggagagagggcaccaccaagagcgaggtgttctaccccggcgagaccgtggtgcacggccccggcgaggccaccgccgtggagtggggccccaacacctggatggtggagtacggcagaggcgtgatccccagcaccctggccttcgccctggccgacaccgtgttcagcacccaggacttcctgaccctgttctacaccctgagaagctacgccagaggcctgagactggagctgaccacctacctgttcggccaggacccctag

SEQ ID NO: 100548 - protein, 328 aa, Artificial Sequence
  derived and/or modified sequence
MAELQEVQITEEKPLLPGQTPEAAKTHSVETPYGSVTFTVYGTPKPKRPAILTYHDVGLNYKSCFQPLFQFEDMQEIIQNFVRVHVDAPGMEEGAPVFPLGYQYPSLDQLADMIPCVLQYLNFSTIIGVGVGAGAYILARYALTGLTSSIPEMILGHLFSQEELSGNSELIQKYRNIITHAPNLDNIELYWNSYNNRRDLNFERGGDITLRCPVMLVVGDQAPHEDAVVECNSKLDPTQTSFLKMADSGGQPQLTQPGKLTEAFKYFLQGMGYMASSCMTRLSRSRTASLTSAASVDGNRSRSRTLSQSSESGTLSSGPPGHTMEVSC

SEQ ID NO: 100549 - protein, 357 aa, Artificial Sequence
  derived and/or modified sequence
MAELQEVQITEEKPLLPGQTPEAAKTHSVETPYGSVTFTVYGTPKPKRPAILTYHDVGLNYKSCFQPLFQFEDMQEIIQNFVRVHVDAPGMEEGAPVFPLGYQYPSLDQLADMIPCVLQYLNFSTIIGVGVGAGAYILARYALNHPDTVEGLVLINIDPNAKGWMDWAAHKLTGLTSSIPEMILGHLFSQEELSGNSELIQKYRNIITHAPNLDNIELYWNSYNNRRDLNFERGGDITLRCPVMLVVGDQAPHEDAVVECNSKLDPTQTSFLKMADSGGQPQLTQPGKLTEAFKYFLQGMGYMASSCMTRLSRSRTASLTSAASVDGNRSRSRTLSQSSESGTLSSGPPGHTMEVSC

SEQ ID NO: 100550 - protein, 367 aa, Artificial Sequence
  derived and/or modified sequence
MENGGSMQATMAELQEVQITEEKPLLPGQTPEAAKTHSVETPYGSVTFTVYGTPKPKRPAILTYHDVGLNYKSCFQPLFQFEDMQEIIQNFVRVHVDAPGMEEGAPVFPLGYQYPSLDQLADMIPCVLQYLNFSTIIGVGVGAGAYILARYALNHPDTVEGLVLINIDPNAKGWMDWAAHKLTGLTSSIPEMILGHLFSQEELSGNSELIQKYRNIITHAPNLDNIELYWNSYNNRRDLNFERGGDITLRCPVMLVVGDQAPHEDAVVECNSKLDPTQTSFLKMADSGGQPQLTQPGKLTEAFKYFLQGMGYMASSCMTRLSRSRTASLTSAASVDGNRSRSRTLSQSSESGTLSSGPPGHTMEVSC

SEQ ID NO: 100551 - protein, 167 aa, Artificial Sequence
  derived and/or modified sequence
MAELQEVQITEEKPLLPGQTPEAAKTHSVETPYGSVTFTVYGTPKPKRPAILTYHDVGLNYKSCFQPLFQFEDMQEIIQNFVRVHVDAPGMEEGAPVFPLGYQYPSLDQLADMIPCVLQYLNFSTIIGVGVGAGAYILARYALNHPDTVEGLVLINIDPNAKGWMDW

SEQ ID NO: 100552 - protein, 174 aa, Artificial Sequence
  derived and/or modified sequence
MAELQEVQITEEKPLLPGQTPEAAKTHSVETPYGSVTFTVYGTPKPKRPAILTYHDVGLNYKSCFQPLFQFEDMQEIIQNFVRVHVDAPGMEEGAPVFPLGYQYPSLDQLADMIPCVLQYLNFSTIIGVGVGAGAYILARYALNHPDTVEGLVLINIDPNAKGWMDWAAHKLTG

SEQ ID NO: 100553 - protein, 134 aa, Artificial Sequence
  derived and/or modified sequence
MAELQEVQITEEKPLLPGQTPEAAKTHSVETPYGSVTFTVYGTPKPKRPAILTYHDVGLNYKSCFQPLFQFEDMQEIIQNFVRVHVDAPGMEEGAPVFPLGYQYPSLDQLADMIPCVLQYLNFSTIIGVGVGAG

SEQ ID NO: 100554 - protein, 108 aa, Artificial Sequence
  derived and/or modified sequence
MAELQEVQITEEKPLLPGQTPEAAKTHSVETPYGSVTFTVYGTPKPKRPAILTYHDVGLNYKSCFQPLFQFEDMQEIIQNFVRVHVDAPGMEEGAPVFPLGYQYPSLD

SEQ ID NO: 100555 - protein, 120 aa, Artificial Sequence
  derived and/or modified sequence
MAELQEVQITEEKPLLPGQTPEAAKTHSVETPYGSVTFTVYGTPKPKRPAILTYHDVGLNYKSCFQPLFQFEDMQEIIQNFVRVHVDAPGMEEGAPVFPLGYQYPSLDQLADMIPCVLQY

SEQ ID NO: 100556 - protein, 92 aa, Artificial Sequence
  derived and/or modified sequence
MAELQEVQITEEKPLLPGQTPEAAKTHSVETPYGSVTFTVYGTPKPKRPAILTYHDVGLNYKSCFQPLFQFEDMQEIIQNFVRVHVDAPGME

SEQ ID NO: 100557 - protein, 153 aa, Artificial Sequence
  derived and/or modified sequence
MAELQEVQITEEKPLLPGQTPEAAKTHSVETPYGSVTFTVYGTPKPKRPAILTYHDVGLNYKSCFQPLFQFEDMQEIIQNFVRVHVDAPGMEEGAPVFPLGYQYPSLDQLADMIPCVLQYLNFSTIIGVGVGAGAYILARYALNHPDTVEGLV

SEQ ID NO: 100558 - protein, 128 aa, Artificial Sequence
  derived and/or modified sequence
MAELQEVQITEEKPLLPGQTPEAAKTHSVETPYGSVTFTVYGTPKPKRPAILTYHDVGLNYKSCFQPLFQFEDMQEIIQNFVRVHVDAPGMEEGAPVFPLGYQYPSLDQLADMIPCVLQYLNFSTIIG

SEQ ID NO: 100559 - protein, 221 aa, Artificial Sequence
  derived and/or modified sequence
MAELQEVQITEEKPLLPGQTPEAAKTHSVETPYGSVTFTVYGTPKPKRPAILTYHDVGLNYKSCFQPLFQFEDMQEIIQNFVRVHVDAPGMEEGAPVFPLGYQYPSLDQLADMIPCVLQYLNFSTIIGVGVGAGAYILARYALNHPDTVEGLVLINIDPNAKGWMDWAAHKLTGLTSSIPEMILGHLFSQEELSGNSELIQKYRNIITHAPNLDNIELYWN

SEQ ID NO: 100560 - protein, 160 aa, Artificial Sequence
  derived and/or modified sequence
MAELQEVQITEEKPLLPGQTPEAAKTHSVETPYGSVTFTVYGTPKPKRPAILTYHDVGLNYKSCFQPLFQFEDMQEIIQNFVRVHVDAPGMEEGAPVFPLGYQYPSLDQLADMIPCVLQYLNFSTIIGVGVGAGAYILARYALNHPDTVEGLVLINIDPN

SEQ ID NO: 100561 - protein, 144 aa, Artificial Sequence
  derived and/or modified sequence
MAELQEVQITEEKPLLPGQTPEAAKTHSVETPYGSVTFTVYGTPKPKRPAILTYHDVGLNYKSCFQPLFQFEDMQEIIQNFVRVHVDAPGMEEGAPVFPLGYQYPSLDQLADMIPCVLQYLNFSTIIGVGVGAGAYILARYALN

SEQ ID NO: 100562 - protein, 224 aa, Artificial Sequence
  derived and/or modified sequence
MAELQEVQITEEKPLLPGQTPEAAKTHSVETPYGSVTFTVYGTPKPKRPAILTYHDVGLNYKSCFQPLFQFEDMQEIIQNFVRVHVDAPGMEEGAPVFPLGYQYPSLDQLADMIPCVLQYLNFSTIIGVGVGAGAYILARYALNHPDTVEGLVLINIDPNAKGWMDWAAHKLTGLTSSIPEMILGHLFSQEELSGNSELIQKYRNIITHAPNLDNIELYWNSYN

SEQ ID NO: 100563 - protein, 150 aa, Artificial Sequence
  derived and/or modified sequence
MAELQEVQITEEKPLLPGQTPEAAKTHSVETPYGSVTFTVYGTPKPKRPAILTYHDVGLNYKSCFQPLFQFEDMQEIIQNFVRVHVDAPGMEEGAPVFPLGYQYPSLDQLADMIPCVLQYLNFSTIIGVGVGAGAYILARYALNHPDTVE

SEQ ID NO: 100564 - protein, 127 aa, Artificial Sequence
  derived and/or modified sequence
MAELQEVQITEEKPLLPGQTPEAAKTHSVETPYGSVTFTVYGTPKPKRPAILTYHDVGLNYKSCFQPLFQFEDMQEIIQNFVRVHVDAPGMEEGAPVFPLGYQYPSLDQLADMIPCVLQYLNFSTII

SEQ ID NO: 100565 - protein, 149 aa, Artificial Sequence
  derived and/or modified sequence
MAELQEVQITEEKPLLPGQTPEAAKTHSVETPYGSVTFTVYGTPKPKRPAILTYHDVGLNYKSCFQPLFQFEDMQEIIQNFVRVHVDAPGMEEGAPVFPLGYQYPSLDQLADMIPCVLQYLNFSTIIGVGVGAGAYILARYALNHPDTV

SEQ ID NO: 100566 - DNA, 1104 bp, Artificial Sequence
  derived and/or modified sequence
atggagaacggcggcagcatgcaggccaccatggccgagctgcaggaggtgcagatcaccgaggagaagcccctgctgcccggccagacccccgaggccgccaagacccacagcgtggagaccccctacggcagcgtgaccttcaccgtgtacggcacccccaagcccaagagacccgccatcctgacctaccacgacgtgggcctgaactacaagagctgcttccagcccctgttccagttcgaggacatgcaggagatcatccagaacttcgtgagagtgcacgtggacgcccccggcatggaggagggcgcccccgtgttccccctgggctaccagtaccccagcctggaccagctggccgacatgatcccctgcgtgctgcagtacctgaacttcagcaccatcatcggcgtgggcgtgggcgccggcgcctacatcctggccagatacgccctgaaccaccccgacaccgtggagggcctggtgctgatcaacatcgaccccaacgccaagggctggatggactgggccgcccacaagctgaccggcctgaccagcagcatccccgagatgatcctgggccacctgttcagccaggaggagctgagcggcaacagcgagctgatccagaagtacagaaacatcatcacccacgcccccaacctggacaacatcgagctgtactggaacagctacaacaacagaagagacctgaacttcgagagaggcggcgacatcaccctgagatgccccgtgatgctggtggtgggcgaccaggccccccacgaggacgccgtggtggagtgcaacagcaagctggaccccacccagaccagcttcctgaagatggccgacagcggcggccagccccagctgacccagcccggcaagctgaccgaggccttcaagtacttcctgcagggcatgggctacatggccagcagctgcatgaccagactgagcagaagcagaaccgccagcctgaccagcgccgccagcgtggacggcaacagaagcagaagcagaaccctgagccagagcagcgagagcggcaccctgagcagcggcccccccggccacaccatggaggtgagctgctag

SEQ ID NO: 100567 - DNA, 1104 bp, Artificial Sequence
  derived and/or modified sequence
atggagaatggggggagcatgcaagccacaatggcagagcttcaagaagtgcagattactgaggagaagcccttactgccgggacagacaccagaagccgcaaagacacattcagtggaaaccccctatggctccgtcaccttcactgtgtatggcactcccaaaccaaaacgacccgctattctcacgtatcatgatgtgggtcttaattataagtcctgcttccagccactatttcaattcgaggacatgcaggagattattcagaactttgtgcgagttcacgtggacgctccgggcatggaggagggggcacccgtttttcccctgggatatcagtacccctctttggatcagctagctgatatgatcccctgcgtactccaatacctcaacttctccaccatcatcggagtcggtgtgggcgccggtgcttacatcctcgcgaggtatgccttaaaccaccctgacaccgtcgaaggacttgtgctcattaatatagatcccaatgcaaaagggtggatggactgggccgcccataagcttacggggctcacatcatccattcctgagatgatcttgggtcacctcttctctcaggaagagctgtctggaaattctgagctcatccagaaataccggaatatcatcacccatgcccctaatttggataatattgagctgtactggaactcatataataatcgacgagatctgaactttgagcgcggaggcgacattacattgagatgtcccgttatgctggttgtgggtgatcaggccccgcatgaggatgctgtggtggaatgcaattcgaagctagaccctactcaaaccagcttcttgaaaatggccgatagtggcggccagccccagttaacgcagccaggcaaactgaccgaagcctttaaatatttcctccagggcatgggctacatggccagctcttgcatgacccgcctctctaggtcaagaacagcatctctcacaagtgcggccagtgtggatggaaacaggtcccgctctagaacgctcagccagagctcagagagtggaacactttctagtggcccacccgggcacactatggaagtgtcgtgttag

SEQ ID NO: 100568 - DNA, 1104 bp, Artificial Sequence
  derived and/or modified sequence
atggagaatggaggctccatgcaggccaccatggccgagctgcaggaggtgcagatcacagaggagaagcccctgctgcccggccagaccccagaggccgccaagacccacagcgtggagaccccctacggctctgtgaccttcaccgtgtatggcacccccaagcccaagaggcctgccatcctgacctaccatgatgtgggcctgaactacaagagctgcttccagcccctcttccagtttgaggacatgcaggagatcatccagaactttgtgcgggtgcacgtggatgcccctggcatggaggagggcgcccctgtgttccccctgggctaccagtaccccagcctggaccagctggccgacatgatcccctgtgtgctgcagtacctgaacttcagcaccatcattggagtgggcgtgggcgctggggcctacatcctggcccgctatgccctgaaccacccagacacagtggagggcctggtgctgatcaacatcgaccccaatgccaagggctggatggactgggccgcccacaagctgaccggcctgaccagcagcatccctgagatgatcctgggccacctgttcagccaggaggagctgagcggcaacagcgagctgatccagaagtacagaaacatcatcacccacgcccccaacctggacaacatcgagctgtactggaacagctacaacaacagaagagacctgaactttgagcggggcggggacatcaccctgcgctgccctgtgatgctggtggtgggggaccaggcccctcatgaagatgctgtggtggagtgcaacagcaagctggaccccacccagaccagcttcctgaagatggctgacagcggcggccagccccagctgacccagcccgggaagctgacagaggccttcaagtacttcctgcagggcatgggctacatggccagcagctgcatgacccggctgagccgcagcaggacagccagcctgaccagcgctgcctctgtggatggcaacagaagccgcagcaggaccctgagccagagcagcgagagcggcaccctgagcagcggccccccaggccacaccatggaggtgtcctgctag

SEQ ID NO: 100569 - DNA, 1104 bp, Artificial Sequence
  derived and/or modified sequence
atggagaacggcggcagcatgcaggccaccatggccgagctgcaggaggtgcagattactgaagagaaaccacttctgcctggccagacccctgaggctgctaaaacccactccgtggaaaccccatacggatctgttacgttcacggtctacgggacccctaaacctaagcggccagccatcctgacataccacgatgtcgggctaaattacaagagctgcttccagccactgtttcagtttgaagacatgcaagagataattcagaattttgtgagggtgcacgtagatgccccaggcatggaggagggtgcacctgtgttccccttgggatatcaatatccaagtctggatcagctggccgacatgatcccctgcgtgcttcagtacctcaatttttccaccattattggagtcggagtgggtgctggagcctacatccttgcacgatatgctctcaaccaccccgacacagtagaaggattggtgcttataaacatagaccctaatgcgaagggctggatggactgggccgcccataagttaacaggcctgacaagtagtatccctgagatgattttaggccacctgttcagtcaggaggagctctctggcaacagcgagctcatccagaaataccgaaacatcataactcacgctcctaacctcgataatattgagctgtattggaactcctacaataacagaagggacctcaattttgagcggggtggagatatcacattgagatgtcccgtgatgctggtggtgggcgatcaggcgcctcacgaggacgcagtggttgagtgtaactccaaactggatcccactcagactagctttctgaagatggcagactccggaggtcagccccaactgacacagccgggcaaactgaccgaggcgtttaaatactttctgcaggggatggggtatatggcctccagctgcatgacccgcctgagcagatccagaaccgcaagcctcacgtccgccgcatcggtggacgggaaccggagtcggtccaggaccctgtctcagagctccgagtccggcactttatcatcgggacccccgggccatacgatggaagtgagctgctag

SEQ ID NO: 100570 - DNA, 1784 bp, Artificial Sequence
  derived and/or modified sequence
tgccaggccaccatggcggagctgcaggaggtgcagatcacagaggagaagccactgttgccaggacagacgcctgaggcggccaagactcactctgtggagacaccatacggctctgtcactttcactgtctatggcacccccaaacccaaacgcccagcgatccttacctaccacgatgtgggactcaactataaatcttgcttccagccactgtttcagttcgaggacatgcaggaaatcattcagaactttgtgcgggttcatgtggatgcccctggaatggaagagggagcccctgtgttccctttgggatatcagtacccatctctggaccagcttgcagacatgatcccttgcgtcctgcagtacctaaatttctctacaataattggagttggtgttggagctggagcctacatcctggcgagatatgctctaacaggcctcacctcttccattccggagatgatccttggacatcttttcagccaggaagagctctctggaaattctgagttgatacaaaagtacagaaatatcattacacatgcacccaacctggataacattgaattgtactggaacagctacaacaaccgccgagacctgaactttgagcgtggaggtgatatcaccctcaggtgtcctgtgatgctggtggtaggagaccaagcacctcatgaagatgcagtggtggaatgtaactcaaaactggaccccacccagacctcgttcctcaagatggctgactccggaggtcagccccagctgactcagccaggcaagctgaccgaggccttcaagtacttcctgcaaggcatgggctacatggcctcatcctgcatgactcgcctgtcccggtctcgtacagcctctctgaccagtgcagcatccgttgatggcaaccggtcccgctctcgcaccctgtcccagagcagcgagtctggaactctttcttcggggcccccggggcacaccatggaggtctcctgttgaatggcccttgttgccctagagtgggacccagccctcacctcccccagagctaacctgggaggtgctgaaggggcattgggccaccgtaagcaagggaaaaagggcagatcatgcggggagatgaccttgatctttgattgctaccctaaccttgacctttaacccgtgattccccccagctcctggaagagatgtcctaatatctcttagggacccagacccctaaattctcctcctcccccattttgatgttaaggtggagagggcatatgcatcctctgtcctgatctaggtgtctatagctgaggggtaagaggttgttgtagttgtcctggtgcctccatcagactctccctacttgtcccatatttgcaaggggaggggatttggggctggggctccattcaccaaagctgaggtggcttctcattaaccctttaggactctgaagggtatggacctacgtgaatgtgtgtcagggggagacttgctggtgggttagtggtcctcaggatgtgatagaaacatccagtgtaaaaaggaagttggaatgggagttggcgggcagtgaacgagtgtggggaaggattggtgctggggcaacaggaaggggcctggggccgtttggctgcactaactttggtagctcagtgtgcatctagagtgggactggggagggagctaagcttgggctgggctgcttggggcttggcatagggtggaaagggctaccctggggctctgaccacactgtagtatgtgtggagggtgccctcccgtctccc

SEQ ID NO: 100571 - DNA, 2127 bp, Artificial Sequence
  derived and/or modified sequence
atcctctccccaccccccgcctgcccgcgatcgccctctatttatagcggccccccgcattccccgcccccacctccccgccttgttgtccaacttctcccggagcagccggagagcaggcgtcgggacgcagcaaagagaggagagaccccagagtcagaaggagtgagaaccctgacccctaatcccactgcatccagccaataggagcccagccaccatggcggagctgcaggaggtgcagatcacagaggagaagccactgttgccaggacagacgcctgaggcggccaagactcactctgtggagacaccatacggctctgtcactttcactgtctatggcacccccaaacccaaacgcccagcgatccttacctaccacgatgtgggactcaactataaatcttgcttccagccactgtttcagttcgaggacatgcaggaaatcattcagaactttgtgcgggttcatgtggatgcccctggaatggaagagggagcccctgtgttccctttgggatatcagtacccatctctggaccagcttgcagacatgatcccttgcgtcctgcagtacctaaatttctctacaataattggagttggtgttggagctggagcctacatcctggcgagatatgctcttaaccacccggacactgttgaaggtcttgtcctcatcaacattgatcccaatgccaagggttggatggattgggcagcccacaagctaacaggcctcacctcttccattccggagatgatccttggacatcttttcagccaggaagagctctctggaaattctgagttgatacaaaagtacagaaatatcattacacatgcacccaacctggataacattgaattgtactggaacagctacaacaaccgccgagacctgaactttgagcgtggaggtgatatcaccctcaggtgtcctgtgatgctggtggtaggagaccaagcacctcatgaagatgcagtggtggaatgtaactcaaaactggaccccacccagacctcgttcctcaagatggctgactccggaggtcagccccagctgactcagccaggcaagctgaccgaggccttcaagtacttcctgcaaggcatgggctacatggcctcatcctgcatgactcgcctgtcccggtctcgtacagcctctctgaccagtgcagcatccgttgatggcaaccggtcccgctctcgcaccctgtcccagagcagcgagtctggaactctttcttcggggcccccggggcacaccatggaggtctcctgttgaatggcccttgttgccctagagtgggacccagccctcacctcccccagagctaacctgggaggtgctgaaggggcattgggccaccgtaagcaagggaaaaagggcagatcatgcggggagatgaccttgatctttgattgctaccctaaccttgacctttaacccgtgattccccccagctcctggaagagatgtcctaatatctcttagggacccagacccctaaattctcctcctcccccattttgatgttaaggtggagagggcatatgcatcctctgtcctgatctaggtgtctatagctgaggggtaagaggttgttgtagttgtcctggtgcctccatcagactctccctacttgtcccatatttgcaaggggaggggatttggggctggggctccattcaccaaagctgaggtggcttctcattaaccctttaggactctgaagggtatggacctacgtgaatgtgtgtcagggggagacttgctggtgggttagtggtcctcaggatgtgatagaaacatccagtgtaaaaaggaagttggaatgggagttggcgggcagtgaacgagtgtggggaaggattggtgctggggcaacaggaaggggcctggggccgtttggctgcactaactttggtagctcagtgtgcatctagagtgggactggggagggagctaagcttgggctgggctgcttggggcttggcatagggtggaaagggctaccctggggctctgaccacactgtagtatgtgtggagggtgccctcccgtctcccacaacttctgctataacaataaactgtagaggaatctgagtaccgtta

SEQ ID NO: 100572 - DNA, 2047 bp, Artificial Sequence
  derived and/or modified sequence
tctccccaccccccgcctgcccgcgatcgccctctatttatagcggccccccgcattccccgcccccacctccccgccttgttgtccaacttctcccggagcagccggagagcaggcgtcgggacgcagcaaagagaggagaggccaccatggcggagctgcaggaggtgcagatcacagaggagaagccactgttgccaggacagacgcctgaggcggccaagactcactctgtggagacaccatacggctctgtcactttcactgtctatggcacccccaaacccaaacgcccagcgatccttacctaccacgatgtgggactcaactataaatcttgcttccagccactgtttcagttcgaggacatgcaggaaatcattcagaactttgtgcgggttcatgtggatgcccctggaatggaagagggagcccctgtgttccctttgggatatcagtacccatctctggaccagcttgcagacatgatcccttgcgtcctgcagtacctaaatttctctacaataattggagttggtgttggagctggagcctacatcctggcgagatatgctcttaaccacccggacactgttgaaggtcttgtcctcatcaacattgatcccaatgccaagggttggatggattgggcagcccacaagctaacaggcctcacctcttccattccggagatgatccttggacatcttttcagccaggaagagctctctggaaattctgagttgatacaaaagtacagaaatatcattacacatgcacccaacctggataacattgaattgtactggaacagctacaacaaccgccgagacctgaactttgagcgtggaggtgatatcaccctcaggtgtcctgtgatgctggtggtaggagaccaagcacctcatgaagatgcagtggtggaatgtaactcaaaactggaccccacccagacctcgttcctcaagatggctgactccggaggtcagccccagctgactcagccaggcaagctgaccgaggccttcaagtacttcctgcaaggcatgggctacatggcctcatcctgcatgactcgcctgtcccggtctcgtacagcctctctgaccagtgcagcatccgttgatggcaaccggtcccgctctcgcaccctgtcccagagcagcgagtctggaactctttcttcggggcccccggggcacaccatggaggtctcctgttgaatggcccttgttgccctagagtgggacccagccctcacctcccccagagctaacctgggaggtgctgaaggggcattgggccaccgtaagcaagggaaaaagggcagatcatgcggggagatgaccttgatctttgattgctaccctaaccttgacctttaacccgtgattccccccagctcctggaagagatgtcctaatatctcttagggacccagacccctaaattctcctcctcccccattttgatgttaaggtggagagggcatatgcatcctctgtcctgatctaggtgtctatagctgaggggtaagaggttgttgtagttgtcctggtgcctccatcagactctccctacttgtcccatatttgcaaggggaggggatttggggctggggctccattcaccaaagctgaggtggcttctcattaaccctttaggactctgaagggtatggacctacgtgaatgtgtgtcagggggagacttgctggtgggttagtggtcctcaggatgtgatagaaacatccagtgtaaaaaggaagttggaatgggagttggcgggcagtgaacgagtgtggggaaggattggtgctggggcaacaggaaggggcctggggccgtttggctgcactaactttggtagctcagtgtgcatctagagtgggactggggagggagctaagcttgggctgggctgcttggggcttggcatagggtggaaagggctaccctggggctctgaccacactgtagtatgtgtggagggtgccctcccgtctcccacaacttctgctataacaataaactgtagaggaatctga

SEQ ID NO: 100573 - DNA, 1915 bp, Artificial Sequence
  derived and/or modified sequence
agtgaaggtggaagcggccgcggcggcagcagaccccagagtcagaaggagtgagaaccctgacccctaatcccactgcatccagccaataggagcccagccaccatggcggagctgcaggaggtgcagatcacagaggagaagccactgttgccaggacagacgcctgaggcggccaagactcactctgtggagacaccatacggctctgtcactttcactgtctatggcacccccaaacccaaacgcccagcgatccttacctaccacgatgtgggactcaactataaatcttgcttccagccactgtttcagttcgaggacatgcaggaaatcattcagaactttgtgcgggttcatgtggatgcccctggaatggaagagggagcccctgtgttccctttgggatatcagtacccatctctggaccagcttgcagacatgatcccttgcgtcctgcagtacctaaatttctctacaataattggagttggtgttggagctggagcctacatcctggcgagatatgctctaacaggcctcacctcttccattccggagatgatccttggacatcttttcagccaggaagagctctctggaaattctgagttgatacaaaagtacagaaatatcattacacatgcacccaacctggataacattgaattgtactggaacagctacaacaaccgccgagacctgaactttgagcgtggaggtgatatcaccctcaggtgtcctgtgatgctggtggtaggagaccaagcacctcatgaagatgcagtggtggaatgtaactcaaaactggaccccacccagacctcgttcctcaagatggctgactccggaggtcagccccagctgactcagccaggcaagctgaccgaggccttcaagtacttcctgcaaggcatgggctacatggcctcatcctgcatgactcgcctgtcccggtctcgtacagcctctctgaccagtgcagcatccgttgatggcaaccggtcccgctctcgcaccctgtcccagagcagcgagtctggaactctttcttcggggcccccggggcacaccatggaggtctcctgttgaatggcccttgttgccctagagtgggacccagccctcacctcccccagagctaacctgggaggtgctgaaggggcattgggccaccgtaagcaagggaaaaagggcagatcatgcggggagatgaccttgatctttgattgctaccctaaccttgacctttaacccgtgattccccccagctcctggaagagatgtcctaatatctcttagggacccagacccctaaattctcctcctcccccattttgatgttaaggtggagagggcatatgcatcctctgtcctgatctaggtgtctatagctgaggggtaagaggttgttgtagttgtcctggtgcctccatcagactctccctacttgtcccatatttgcaaggggaggggatttggggctggggctccattcaccaaagctgaggtggcttctcattaaccctttaggactctgaagggtatggacctacgtgaatgtgtgtcagggggagacttgctggtgggttagtggtcctcaggatgtgatagaaacatccagtgtaaaaaggaagttggaatgggagttggcgggcagtgaacgagtgtggggaaggattggtgctggggcaacaggaaggggcctggggccgtttggctgcactaactttggtagctcagtgtgcatctagagtgggactggggagggagctaagcttgggctgggctgcttggggcttggcatagggtggaaagggctaccctggggctctgaccacactgtagtatgtgtggagggtgccctcccgtctcccacaacttctgctataacaataaactgtagaggaatctg

SEQ ID NO: 100574 - DNA, 1500 bp, Artificial Sequence
  derived and/or modified sequence
ctcaccgggttggggacagggatggaaaatggtggttccatgcaggccaccatggcggagctgcaggaggtgcagatcacagaggagaagccactgttgccaggacagacgcctgaggcggccaagactcactctgtggagacaccatacggctctgtcactttcactgtctatggcacccccaaacccaaacgcccagcgatccttacctaccacgatgtgggactcaactataaatcttgcttccagccactgtttcagttcgaggacatgcaggaaatcattcagaactttgtgcgggttcatgtggatgcccctggaatggaagagggagcccctgtgttccctttgggatatcagtacccatctctggaccagcttgcagacatgatcccttgcgtcctgcagtacctaaatttctctacaataattggagttggtgttggagctggagcctacatcctggcgagatatgctcttaaccacccggacactgttgaaggtcttgtcctcatcaacattgatcccaatgccaagggttggatggattgggcagcccacaagctaacaggcctcacctcttccattccggagatgatccttggacatcttttcagccaggaagagctctctggaaattctgagttgatacaaaagtacagaaatatcattacacatgcacccaacctggataacattgaattgtactggaacagctacaacaaccgccgagacctgaactttgagcgtggaggtgatatcaccctcaggtgtcctgtgatgctggtggtaggagaccaagcacctcatgaagatgcagtggtggaatgtaactcaaaactggaccccacccagacctcgttcctcaagatggctgactccggaggtcagccccagctgactcagccaggcaagctgaccgaggccttcaagtacttcctgcaaggcatgggctacatggcctcatcctgcatgactcgcctgtcccggtctcgtacagcctctctgaccagtgcagcatccgttgatggcaaccggtcccgctctcgcaccctgtcccagagcagcgagtctggaactctttcttcggggcccccggggcacaccatggaggtctcctgttgaatggcccttgttgccctagagtgggacccagccctcacctcccccagagctaacctgggaggtgctgaaggggcattgggccaccgtaagcaagggaaaaagggcagatcatgcggggagatgaccttgatctttgattgctaccctaaccttgacctttaacccgtgattccccccagctcctggaagagatgtcctaatatctcttagggacccagacccctaaattctcctcctcccccattttgatgttaaggtggagagggcatatgcatcctctgtcctgatctaggtgtctatagctgaggggtaagaggttgttgtagttgtcctggtgcctccatcagactctccctacttgtcccatatttgcaa

SEQ ID NO: 100575 - DNA, 639 bp, Artificial Sequence
  derived and/or modified sequence
gtggggtgtcagtatcccggaccccagagtcagaaggagtgagaaccctgacccctaatcccactgcatccagccaataggagcccagtaagtgaccccaccccgcaggctgcaggctccttcctgtgcaggccaccatggcggagctgcaggaggtgcagatcacagaggagaagccactgttgccaggacagacgcctgaggcggccaagactcactctgtggagacaccatacggctctgtcactttcactgtctatggcacccccaaacccaaacgcccagcgatccttacctaccacgatgtgggactcaactataaatcttgcttccagccactgtttcagttcgaggacatgcaggaaatcattcagaactttgtgcgggttcatgtggatgcccctggaatggaagagggagcccctgtgttccctttgggatatcagtacccatctctggaccagcttgcagacatgatcccttgcgtcctgcagtacctaaatttctctacaataattggagttggtgttggagctggagcctacatcctggcgagatatgctcttaaccacccggacactgttgaaggtcttgtcctcatcaacattgatcccaatgccaagggttggatggattggg

SEQ ID NO: 100576 - DNA, 2162 bp, Artificial Sequence
  derived and/or modified sequence
ggcggcagcaggtagggggaggggcaggcgaggggccgtagggcctggaaggcgccagccgggccggcgggcggtgtgattgatccgcgtcccctggagctggaggctcgggggaaagggccagcacggagcgggcgctcggttgctgcgcacaaaggctgaggctccaagagctgcagggcgtgtttgggaccccagagtcagaaggagtgagaaccctgacccctaatcccactgcatccagccaataggagcccagccaccatggcggagctgcaggaggtgcagatcacagaggagaagccactgttgccaggacagacgcctgaggcggccaagactcactctgtggagacaccatacggctctgtcactttcactgtctatggcacccccaaacccaaacgcccagcgatccttacctaccacgatgtgggactcaactataaatcttgcttccagccactgtttcagttcgaggacatgcaggaaatcattcagaactttgtgcgggttcatgtggatgcccctggaatggaagagggagcccctgtgttccctttgggatatcagtacccatctctggaccagcttgcagacatgatcccttgcgtcctgcagtacctaaatttctctacaataattggagttggtgttggagctggagcctacatcctggcgagatatgctcttaaccacccggacactgttgaaggtcttgtcctcatcaacattgatcccaatgccaagggttggatggattgggcagcccacaagctaacaggcctcacctcttccattccggagatgatccttggacatcttttcagccaggaagagctctctggaaattctgagttgatacaaaagtacagaaatatcattacacatgcacccaacctggataacattgaattgtactggaacagctacaacaaccgccgagacctgaactttgagcgtggaggtgatatcaccctcaggtgtcctgtgatgctggtggtaggagaccaagcacctcatgaagatgcagtggtggaatgtaactcaaaactggaccccacccagacctcgttcctcaagatggctgactccggaggtcagccccagctgactcagccaggcaagctgaccgaggccttcaagtacttcctgcaaggcatgggctacatggcctcatcctgcatgactcgcctgtcccggtctcgtacagcctctctgaccagtgcagcatccgttgatggcaaccggtcccgctctcgcaccctgtcccagagcagcgagtctggaactctttcttcggggcccccggggcacaccatggaggtctcctgttgaatggcccttgttgccctagagtgggacccagccctcacctcccccagagctaacctgggaggtgctgaaggggcattgggccaccgtaagcaagggaaaaagggcagatcatgcggggagatgaccttgatctttgattgctaccctaaccttgacctttaacccgtgattccccccagctcctggaagagatgtcctaatatctcttagggacccagacccctaaattctcctcctcccccattttgatgttaaggtggagagggcatatgcatcctctgtcctgatctaggtgtctatagctgaggggtaagaggttgttgtagttgtcctggtgcctccatcagactctccctacttgtcccatatttgcaaggggaggggatttggggctggggctccattcaccaaagctgaggtggcttctcattaaccctttaggactctgaagggtatggacctacgtgaatgtgtgtcagggggagacttgctggtgggttagtggtcctcaggatgtgatagaaacatccagtgtaaaaaggaagttggaatgggagttggcgggcagtgaacgagtgtggggaaggattggtgctggggcaacaggaaggggcctggggccgtttggctgcactaactttggtagctcagtgtgcatctagagtgggactggggagggagctaagcttgggctgggctgcttggggcttggcatagggtggaaagggctaccctggggctctgaccacactgtagtatgtgtggagggtgccctcccgtctcccacaacttctgctataacaataaactgtagaggaatctga

SEQ ID NO: 100577 - DNA, 595 bp, Artificial Sequence
  derived and/or modified sequence
aatgttgaacttgcggagtttattcagagttgggaggaagggtcttgggaggaagggaggcattgggccaccatggcggagctgcaggaggtgcagatcacagaggagaagccactgttgccaggacagacgcctgaggcggccaagactcactctgtggagacaccatacggctctgtcactttcactgtctatggcacccccaaacccaaacgcccagcgatccttacctaccacgatgtgggactcaactataaatcttgcttccagccactgtttcagttcgaggacatgcaggaaatcattcagaactttgtgcgggttcatgtggatgcccctggaatggaagagggagcccctgtgttccctttgggatatcagtacccatctctggaccagcttgcagacatgatcccttgcgtcctgcagtacctaaatttctctacaataattggagttggtgttggagctggagcctacatcctggcgagatatgctcttaaccacccggacactgttgaaggtcttgtcctcatcaacattgatcccaatgccaagggttggatggattgggcagcccacaagctaacaggcc

SEQ ID NO: 100578 - DNA, 1980 bp, Artificial Sequence
  derived and/or modified sequence
gggtctgcgggaagcccgagccggggcgggcccgagtcaaaggcaagtgaaggtggaagcggccgcggcggcagcaggccaccatggcggagctgcaggaggtgcagatcacagaggagaagccactgttgccaggacagacgcctgaggcggccaagactcactctgtggagacaccatacggctctgtcactttcactgtctatggcacccccaaacccaaacgcccagcgatccttacctaccacgatgtgggactcaactataaatcttgcttccagccactgtttcagttcgaggacatgcaggaaatcattcagaactttgtgcgggttcatgtggatgcccctggaatggaagagggagcccctgtgttccctttgggatatcagtacccatctctggaccagcttgcagacatgatcccttgcgtcctgcagtacctaaatttctctacaataattggagttggtgttggagctggagcctacatcctggcgagatatgctcttaaccacccggacactgttgaaggtcttgtcctcatcaacattgatcccaatgccaagggttggatggattgggcagcccacaagctaacaggcctcacctcttccattccggagatgatccttggacatcttttcagccaggaagagctctctggaaattctgagttgatacaaaagtacagaaatatcattacacatgcacccaacctggataacattgaattgtactggaacagctacaacaaccgccgagacctgaactttgagcgtggaggtgatatcaccctcaggtgtcctgtgatgctggtggtaggagaccaagcacctcatgaagatgcagtggtggaatgtaactcaaaactggaccccacccagacctcgttcctcaagatggctgactccggaggtcagccccagctgactcagccaggcaagctgaccgaggccttcaagtacttcctgcaaggcatgggctacatggcctcatcctgcatgactcgcctgtcccggtctcgtacagcctctctgaccagtgcagcatccgttgatggcaaccggtcccgctctcgcaccctgtcccagagcagcgagtctggaactctttcttcggggcccccggggcacaccatggaggtctcctgttgaatggcccttgttgccctagagtgggacccagccctcacctcccccagagctaacctgggaggtgctgaaggggcattgggccaccgtaagcaagggaaaaagggcagatcatgcggggagatgaccttgatctttgattgctaccctaaccttgacctttaacccgtgattccccccagctcctggaagagatgtcctaatatctcttagggacccagacccctaaattctcctcctcccccattttgatgttaaggtggagagggcatatgcatcctctgtcctgatctaggtgtctatagctgaggggtaagaggttgttgtagttgtcctggtgcctccatcagactctccctacttgtcccatatttgcaaggggaggggatttggggctggggctccattcaccaaagctgaggtggcttctcattaaccctttaggactctgaagggtatggacctacgtgaatgtgtgtcagggggagacttgctggtgggttagtggtcctcaggatgtgatagaaacatccagtgtaaaaaggaagttggaatgggagttggcgggcagtgaacgagtgtggggaaggattggtgctggggcaacaggaaggggcctggggccgtttggctgcactaactttggtagctcagtgtgcatctagagtgggactggggagggagctaagcttgggctgggctgcttggggcttggcatagggtggaaagggctaccctggggctctgaccacactgtagtatgtgtggagggtgccctcccgtctcccacaacttctgctataacaataaactgtagaggaatctg

SEQ ID NO: 100579 - DNA, 561 bp, Artificial Sequence
  derived and/or modified sequence
aagtgaaggtggaagcggccgcggcggcagcagaccccagagtcagaaggagtgagaaccctgacccctaatcccactgcatccagccaataggagcccagtaagtgaccccaccccgcaggctgcaggctccttcctgtgcaggtctgtccaggccaccatggcggagctgcaggaggtgcagatcacagaggagaagccactgttgccaggacagacgcctgaggcggccaagactcactctgtggagacaccatacggctctgtcactttcactgtctatggcacccccaaacccaaacgcccagcgatccttacctaccacgatgtgggactcaactataaatcttgcttccagccactgtttcagttcgaggacatgcaggaaatcattcagaactttgtgcgggttcatgtggatgcccctggaatggaagagggagcccctgtgttccctttgggatatcagtacccatctctggaccagcttgcagacatgatcccttgcgtcctgcagtacctaaatttctctacaataattggagttggtgttggagctgg

SEQ ID NO: 100580 - DNA, 573 bp, Artificial Sequence
  derived and/or modified sequence
agggcctggaaggcgccagccgggccggcgggcggtgtgattgatccgcgtcccctggagctggaggctcgggggaaagggccagcacggagcgggcgctcggttgctgcgcacaaaggctgaggctccaagagctgcagggcgtgtttggggtgcgcgcgaggttgtgtgcaagaccccagagtcagaaggagtgagaaccctgacccctaatcccactgcatccagccaataggagcccagccaccatggcggagctgcaggaggtgcagatcacagaggagaagccactgttgccaggacagacgcctgaggcggccaagactcactctgtggagacaccatacggctctgtcactttcactgtctatggcacccccaaacccaaacgcccagcgatccttacctaccacgatgtgggactcaactataaatcttgcttccagccactgtttcagttcgaggacatgcaggaaatcattcagaactttgtgcgggttcatgtggatgcccctggaatggaagagggagcccctgtgttccctttgggatatcagtacccatctctggacc

SEQ ID NO: 100581 - DNA, 632 bp, Artificial Sequence
  derived and/or modified sequence
cttgtagcctatattgattccggctcgagcctagagaggacgtgttctctggacttaggggtagacagacactggggagggttagtgacccgaggaggttgatgaccctgggagtctgggtcttggctgaggctttccgtccctgaaagaccccaggtctgtctcccatgtcattcacctcgttgctgtgttttctcagaccccagagtcagaaggagtgagaaccctgacccctaatcccactgcatccagccaataggagcccagccaccatggcggagctgcaggaggtgcagatcacagaggagaagccactgttgccaggacagacgcctgaggcggccaagactcactctgtggagacaccatacggctctgtcactttcactgtctatggcacccccaaacccaaacgcccagcgatccttacctaccacgatgtgggactcaactataaatcttgcttccagccactgtttcagttcgaggacatgcaggaaatcattcagaactttgtgcgggttcatgtggatgcccctggaatggaagagggagcccctgtgttccctttgggatatcagtacccatctctggaccagcttgcagacatgatcccttgcgtcctgcagtac

SEQ ID NO: 100582 - DNA, 578 bp, Artificial Sequence
  derived and/or modified sequence
agcaggtagggggaggggcaggcgaggggccgtagggcctggaaggcgccagccgggccggcgggcggtgtgattgatccgcgtcccctggagctggaggctcgggggaaagggccagcacggagcgggcgctcggttgctgcgcacaaaggctgaggctccaagagctgcagggcgtgtttgggaccccagagtcagaaggagtgagaaccctgacccctaatcccactgcatccagccaataggagcccagtaagtgaccccaccccgcaggctgcaggctccttcctgtgcaggccaccatggcggagctgcaggaggtgcagatcacagaggagaagccactgttgccaggacagacgcctgaggcggccaagactcactctgtggagacaccatacggctctgtcactttcactgtctatggcacccccaaacccaaacgcccagcgatccttacctaccacgatgtgggactcaactataaatcttgcttccagccactgtttcagttcgaggacatgcaggaaatcattcagaactttgtgcgggttcatgtggatgcccctggaatggaa

SEQ ID NO: 100583 - DNA, 609 bp, Artificial Sequence
  derived and/or modified sequence
agcgcccgtgggcgggctggggcgggccgggggcgggtctgcgggaagcccgagccggggcgggcccgagtcaaagaccccagagtcagaaggagtgagaaccctgacccctaatcccactgcatccagccaataggagcccagccaccatggcggagctgcaggaggtgcagatcacagaggagaagccactgttgccaggacagacgcctgaggcggccaagactcactctgtggagacaccatacggctctgtcactttcactgtctatggcacccccaaacccaaacgcccagcgatccttacctaccacgatgtgggactcaactataaatcttgcttccagccactgtttcagttcgaggacatgcaggaaatcattcagaactttgtgcgggttcatgtggatgcccctggaatggaagagggagcccctgtgttccctttgggatatcagtacccatctctggaccagcttgcagacatgatcccttgcgtcctgcagtacctaaatttctctacaataattggagttggtgttggagctggagcctacatcctggcgagatatgctcttaaccacccggacactgttgaaggtcttgtcc

SEQ ID NO: 100584 - DNA, 2216 bp, Artificial Sequence
  derived and/or modified sequence
agggggaggggcaggcgaggggccgtagggcctggaaggcgccagccgggccggcgggcggtgtgattgatccgcgtcccctggagctggaggctcgggggaaagggccagcacggagcgggcgctcggttgctgcgcacaaaggctgaggctccaagagctgcagggcgtgtttggggtgcgcgcgaggttgtgtgcaagaccccagagtcagaaggagtgagaaccctgacccctaatcccactgcatccagccaataggagcccagtaagtgaccccaccccgcaggctgcaggctccttcctgtgcaggccaccatggcggagctgcaggaggtgcagatcacagaggagaagccactgttgccaggacagacgcctgaggcggccaagactcactctgtggagacaccatacggctctgtcactttcactgtctatggcacccccaaacccaaacgcccagcgatccttacctaccacgatgtgggactcaactataaatcttgcttccagccactgtttcagttcgaggacatgcaggaaatcattcagaactttgtgcgggttcatgtggatgcccctggaatggaagagggagcccctgtgttccctttgggatatcagtacccatctctggaccagcttgcagacatgatcccttgcgtcctgcagtacctaaatttctctacaataattggagttggtgttggagctggagcctacatcctggcgagatatgctcttaaccacccggacactgttgaaggtcttgtcctcatcaacattgatcccaatgccaagggttggatggattgggcagcccacaagctaacaggcctcacctcttccattccggagatgatccttggacatcttttcagccaggaagagctctctggaaattctgagttgatacaaaagtacagaaatatcattacacatgcacccaacctggataacattgaattgtactggaacagctacaacaaccgccgagacctgaactttgagcgtggaggtgatatcaccctcaggtgtcctgtgatgctggtggtaggagaccaagcacctcatgaagatgcagtggtggaatgtaactcaaaactggaccccacccagacctcgttcctcaagatggctgactccggaggtcagccccagctgactcagccaggcaagctgaccgaggccttcaagtacttcctgcaaggcatgggctacatggcctcatcctgcatgactcgcctgtcccggtctcgtacagcctctctgaccagtgcagcatccgttgatggcaaccggtcccgctctcgcaccctgtcccagagcagcgagtctggaactctttcttcggggcccccggggcacaccatggaggtctcctgttgaatggcccttgttgccctagagtgggacccagccctcacctcccccagagctaacctgggaggtgctgaaggggcattgggccaccgtaagcaagggaaaaagggcagatcatgcggggagatgaccttgatctttgattgctaccctaaccttgacctttaacccgtgattccccccagctcctggaagagatgtcctaatatctcttagggacccagacccctaaattctcctcctcccccattttgatgttaaggtggagagggcatatgcatcctctgtcctgatctaggtgtctatagctgaggggtaagaggttgttgtagttgtcctggtgcctccatcagactctccctacttgtcccatatttgcaaggggaggggatttggggctggggctccattcaccaaagctgaggtggcttctcattaaccctttaggactctgaagggtatggacctacgtgaatgtgtgtcagggggagacttgctggtgggttagtggtcctcaggatgtgatagaaacatccagtgtaaaaaggaagttggaatgggagttggcgggcagtgaacgagtgtggggaaggattggtgctggggcaacaggaaggggcctggggccgtttggctgcactaactttggtagctcagtgtgcatctagagtgggactggggagggagctaagcttgggctgggctgcttggggcttggcatagggtggaaagggctaccctggggctctgaccacactgtagtatgtgtggagggtgccctcccgtctcccacaacttctgctataacaataaactgtagaggaatctga

SEQ ID NO: 100585 - DNA, 578 bp, Artificial Sequence
  derived and/or modified sequence
aggcgaggggccgtagggcctggaaggcgccagccgggccggcgggcggtgtgattgatccgcgtcccctggagctggaggctcgggggaaagggccagcacggagcgggcgctcggttgctgcgcacaaaggctgaggctccaagagctgcagggcgtgtttggggtgcgcgcgaggttgtgtgcaaggccaccatggcggagctgcaggaggtgcagatcacagaggagaagccactgttgccaggacagacgcctgaggcggccaagactcactctgtggagacaccatacggctctgtcactttcactgtctatggcacccccaaacccaaacgcccagcgatccttacctaccacgatgtgggactcaactataaatcttgcttccagccactgtttcagttcgaggacatgcaggaaatcattcagaactttgtgcgggttcatgtggatgcccctggaatggaagagggagcccctgtgttccctttgggatatcagtacccatctctggaccagcttgcagacatgatcccttgcgtcctgcagtacctaaatttctctacaataattgg

SEQ ID NO: 100586 - DNA, 871 bp, Artificial Sequence
  derived and/or modified sequence
ctagttctctgtgttcgggcggggggagtcgaactcgtggggtgtcagtatcccgggttcgtctccccactaccggttcccaccactgagtctgggggcgaaggaaggagccagagtgcaattgcagatccagaccccagagtcagaaggagtgagaaccctgacccctaatcccactgcatccagccaataggagcccagccaccatggcggagctgcaggaggtgcagatcacagaggagaagccactgttgccaggacagacgcctgaggcggccaagactcactctgtggagacaccatacggctctgtcactttcactgtctatggcacccccaaacccaaacgcccagcgatccttacctaccacgatgtgggactcaactataaatcttgcttccagccactgtttcagttcgaggacatgcaggaaatcattcagaactttgtgcgggttcatgtggatgcccctggaatggaagagggagcccctgtgttccctttgggatatcagtacccatctctggaccagcttgcagacatgatcccttgcgtcctgcagtacctaaatttctctacaataattggagttggtgttggagctggagcctacatcctggcgagatatgctcttaaccacccggacactgttgaaggtcttgtcctcatcaacattgatcccaatgccaagggttggatggattgggcagcccacaagctaacaggcctcacctcttccattccggagatgatccttggacatcttttcagccaggaagagctctctggaaattctgagttgatacaaaagtacagaaatatcattacacatgcacccaacctggataacattgaattgtactggaacag

SEQ ID NO: 100587 - DNA, 611 bp, Artificial Sequence
  derived and/or modified sequence
aagcccgagccggggcgggcccgagtcaaaggcaagtgaaggtggaagcggccgcggcggcagcagaccccagagtcagaaggagtgagaaccctgacccctaatcccactgcatccagccaataggagcccagtaagtgaccccaccccgcaggctgcaggctccttcctgtgcaggccaccatggcggagctgcaggaggtgcagatcacagaggagaagccactgttgccaggacagacgcctgaggcggccaagactcactctgtggagacaccatacggctctgtcactttcactgtctatggcacccccaaacccaaacgcccagcgatccttacctaccacgatgtgggactcaactataaatcttgcttccagccactgtttcagttcgaggacatgcaggaaatcattcagaactttgtgcgggttcatgtggatgcccctggaatggaagagggagcccctgtgttccctttgggatatcagtacccatctctggaccagcttgcagacatgatcccttgcgtcctgcagtacctaaatttctctacaataattggagttggtgttggagctggagcctacatcctggcgagatatgctct

SEQ ID NO: 100588 - DNA, 671 bp, Artificial Sequence
  derived and/or modified sequence
agcaggtagggggaggggcaggcgaggggccgtagggcctggaaggcgccagccgggccggcgggcggtgtgattgatccgcgtcccctggagctggaggctcgggggaaagggccagcacggagcgggcgctcggttgctgcgcacaaaggctgaggctccaagagctgcagggcgtgtttggggccaccatggcggagctgcaggaggtgcagatcacagaggagaagccactgttgccaggacagacgcctgaggcggccaagactcactctgtggagacaccatacggctctgtcactttcactgtctatggcacccccaaacccaaacgcccagcgatccttacctaccacgatgtgggactcaactataaatcttgcttccagccactgtttcagttcgaggacatgcaggaaatcattcagaactttgtgcgggttcatgtggatgcccctggaatggaagagggagcccctgtgttccctttgggatatcagtacccatctctggaccagcttgcagacatgatcccttgcgtcctgcagtacctaaatttctctacaataattggagttggtgttggagctggagcctacatcctggcgagatatgctcttaaccacccggacactgttgaaggtcttgtcctcatcaacattgatcccaat

SEQ ID NO: 100589 - DNA, 603 bp, Artificial Sequence
  derived and/or modified sequence
gttttggtgagccgagcagagcctggaagcgtccagccgcccgcccctcgccccccggccccagcacaaccctttcctgagcggcagtctgggcgggaccccagagtcagaaggagtgagaaccctgacccctaatcccactgcatccagccaataggagcccagccaccatggcggagctgcaggaggtgcagatcacagaggagaagccactgttgccaggacagacgcctgaggcggccaagactcactctgtggagacaccatacggctctgtcactttcactgtctatggcacccccaaacccaaacgcccagcgatccttacctaccacgatgtgggactcaactataaatcttgcttccagccactgtttcagttcgaggacatgcaggaaatcattcagaactttgtgcgggttcatgtggatgcccctggaatggaagagggagcccctgtgttccctttgggatatcagtacccatctctggaccagcttgcagacatgatcccttgcgtcctgcagtacctaaatttctctacaataattggagttggtgttggagctggagcctacatcctggcgagatatgctcttaacc

SEQ ID NO: 100590 - DNA, 583 bp, Artificial Sequence
  derived and/or modified sequence
atattgattccggctcgagcctagagaggacgtgttctctggacttagggaccccagagtcagaaggagtgagaaccctgacccctaatcccactgcatccagccaataggagcccagccaccatggcggagctgcaggaggtgcagatcacagaggagaagccactgttgccaggacagacgcctgaggcggccaagactcactctgtggagacaccatacggctctgtcactttcactgtctatggcacccccaaacccaaacgcccagcgatccttacctaccacgatgtgggactcaactataaatcttgcttccagccactgtttcagttcgaggacatgcaggaaatcattcagaactttgtgcgggttcatgtggatgcccctggaatggaagagggagcccctgtgttccctttgggatatcagtacccatctctggaccagcttgcagacatgatcccttgcgtcctgcagtacctaaatttctctacaataattggagttggtgttggagctggagcctacatcctggcgagatatgctcttaaccacccggacactgttgaaggtcttgtcc

SEQ ID NO: 100591 - DNA, 851 bp, Artificial Sequence
  derived and/or modified sequence
ctggaaacggagctgggggcaggaaaggccctctgtgtgttctagagtagtcttcaacccctgggtccctctgttccctgcatcttcctgtgctgagagaggaagcctggtgtttgaggcgatgtggggatgtagagacaacttcccagtctcatttcctcatcctgccaggccaccatggcggagctgcaggaggtgcagatcacagaggagaagccactgttgccaggacagacgcctgaggcggccaagactcactctgtggagacaccatacggctctgtcactttcactgtctatggcacccccaaacccaaacgcccagcgatccttacctaccacgatgtgggactcaactataaatcttgcttccagccactgtttcagttcgaggacatgcaggaaatcattcagaactttgtgcgggttcatgtggatgcccctggaatggaagagggagcccctgtgttccctttgggatatcagtacccatctctggaccagcttgcagacatgatcccttgcgtcctgcagtacctaaatttctctacaataattggagttggtgttggagctggagcctacatcctggcgagatatgctcttaaccacccggacactgttgaaggtcttgtcctcatcaacattgatcccaatgccaagggttggatggattgggcagcccacaagctaacaggcctcacctcttccattccggagatgatccttggacatcttttcagccaggaagagctctctggaaattctgagttgatacaaaagtacagaaatatcattacacatgcacccaacctggataacattgaattgtactggaacagctacaacaa

SEQ ID NO: 100592 - DNA, 593 bp, Artificial Sequence
  derived and/or modified sequence
atattgattccggctcgagcctagagaggacgtgttctctggacttaggggtagacagacactggggaggaccccagagtcagaaggagtgagaaccctgacccctaatcccactgcatccagccaataggagcccagccaccatggcggagctgcaggaggtgcagatcacagaggagaagccactgttgccaggacagacgcctgaggcggccaagactcactctgtggagacaccatacggctctgtcactttcactgtctatggcacccccaaacccaaacgcccagcgatccttacctaccacgatgtgggactcaactataaatcttgcttccagccactgtttcagttcgaggacatgcaggaaatcattcagaactttgtgcgggttcatgtggatgcccctggaatggaagagggagcccctgtgttccctttgggatatcagtacccatctctggaccagcttgcagacatgatcccttgcgtcctgcagtacctaaatttctctacaataattggagttggtgttggagctggagcctacatcctggcgagatatgctcttaaccacccggacactgttgaa

SEQ ID NO: 100593 - DNA, 571 bp, Artificial Sequence
  derived and/or modified sequence
gaggggcaggcgaggggccgtagggcctggaaggcgccagccgggccggcgggcggtgtgattgatccgcgtcccctggagctggaggctcgggggaaagggccagcacggagcgggcgctcggttgctgcgcacaaaggctgaggctccaagagctgcagggcgtgtttggggtgcgcgcgaggccaccatggcggagctgcaggaggtgcagatcacagaggagaagccactgttgccaggacagacgcctgaggcggccaagactcactctgtggagacaccatacggctctgtcactttcactgtctatggcacccccaaacccaaacgcccagcgatccttacctaccacgatgtgggactcaactataaatcttgcttccagccactgtttcagttcgaggacatgcaggaaatcattcagaactttgtgcgggttcatgtggatgcccctggaatggaagagggagcccctgtgttccctttgggatatcagtacccatctctggaccagcttgcagacatgatcccttgcgtcctgcagtacctaaatttctctacaataatt

SEQ ID NO: 100594 - DNA, 633 bp, Artificial Sequence
  derived and/or modified sequence
tagcgcccgtgggcgggctggggcgggccgggggcgggtctgcgggaagcccgagccggggcgggcccgagtcaaaggcaagtgaaggtggaagcggccgcggcggcagcagaccccagagtcagaaggagtgagaaccctgacccctaatcccactgcatccagccaataggagcccagccaccatggcggagctgcaggaggtgcagatcacagaggagaagccactgttgccaggacagacgcctgaggcggccaagactcactctgtggagacaccatacggctctgtcactttcactgtctatggcacccccaaacccaaacgcccagcgatccttacctaccacgatgtgggactcaactataaatcttgcttccagccactgtttcagttcgaggacatgcaggaaatcattcagaactttgtgcgggttcatgtggatgcccctggaatggaagagggagcccctgtgttccctttgggatatcagtacccatctctggaccagcttgcagacatgatcccttgcgtcctgcagtacctaaatttctctacaataattggagttggtgttggagctggagcctacatcctggcgagatatgctcttaaccacccggacactgttg

SEQ ID NO: 100595 - DNA, 1104 bp, Artificial Sequence
  derived and/or modified sequence
atggagaacgggggaagtatgcaggctacaatggccgagctgcaggaggtgcaaatcacagaggagaagcccttgctcccaggtcagacaccagaagcggcaaagacccactcagtggagacaccgtatgggtcagtaacctttactgtctatggcactcctaagcctaagcggcctgccatactcacttaccatgacgtcggccttaattataagtcttgtttccagccactctttcagttcgaggacatgcaagaaataatccaaaattttgtgcgggtccatgtggacgcgcctggcatggaagagggtgctcccgttttccccttgggataccagtacccaagccttgaccagcttgcggacatgattccgtgcgttctacagtacctgaatttctctacaattatcggcgtgggtgtcggcgctggagcttacattttggcgaggtacgctcttaatcaccccgacactgttgaaggacttgtcctgatcaatatcgacccgaacgctaaaggatggatggactgggcggctcacaagctgacgggcctgacaagttccataccggagatgatacttggtcatctgtttagtcaggaggaactctccggaaatagtgagttaattcagaaataccgcaatataattacccacgccccaaatctggacaacatcgagctctactggaactcatataataacaggcgggaccttaactttgaaagggggggtgacatcacgcttcggtgccccgtcatgttggtggtaggtgatcaggctcctcatgaggatgccgtggtcgagtgtaatagtaaactcgatccaacccagacgagttttctcaaaatggcagattctgggggacagccacagctgacccaacctggcaaactgaccgaagcgtttaaatactttctccaggggatgggctatatggccagcagttgtatgacacggctgtctaggagtagaacagcgagcttaactagtgctgcctctgttgacggcaatcgatctagatcaagaaccctgtcccaatccagcgagtcgggaactctgtcatctggacctccaggccatactatggaagtgagctgttag

SEQ ID NO: 100596 - protein, 341 aa, Artificial Sequence
  derived and/or modified sequence
MAELQEVQITEEKPLLPGQTPEAAKTHSVETPYGSVTFTVYGTPKPKRPAILTYHDVGLNYKSCFQPLFQFEDMQEIIQNFVRVHVDAPGMEEGAPVFPLGYQYPSLDQLADMIPCVLQYLNFSTIIGVGVGAGAYILARYALNHPDTVEGLVLINIDPNAKGWMDWAAHKLTGLTSSIPEMILGHLFSQEELSGNSELIQKYRNIITHAPNLDNIELYWNSYNNRRDLNFERGGDITLRCPVMLVVGDQAPHEDAVMADSGGQPQLTQPGKLTEAFKYFLQGMGYMASSCMTRLSRSRTASLTSAASVDGNRSRSRTLSQSSESGTLSSGPPGHTMEVSC

SEQ ID NO: 100597 - DNA, 1026 bp, Artificial Sequence
  derived and/or modified sequence
atggccgagctgcaggaggtgcagatcaccgaggagaagcccctgctgcccggccagacccccgaggccgccaagacccacagcgtggagaccccctacggcagcgtgaccttcaccgtgtacggcacccccaagcccaagagacccgccatcctgacctaccacgacgtgggcctgaactacaagagctgcttccagcccctgttccagttcgaggacatgcaggagatcatccagaacttcgtgagagtgcacgtggacgcccccggcatggaggagggcgcccccgtgttccccctgggctaccagtaccccagcctggaccagctggccgacatgatcccctgcgtgctgcagtacctgaacttcagcaccatcatcggcgtgggcgtgggcgccggcgcctacatcctggccagatacgccctgaaccaccccgacaccgtggagggcctggtgctgatcaacatcgaccccaacgccaagggctggatggactgggccgcccacaagctgaccggcctgaccagcagcatccccgagatgatcctgggccacctgttcagccaggaggagctgagcggcaacagcgagctgatccagaagtacagaaacatcatcacccacgcccccaacctggacaacatcgagctgtactggaacagctacaacaacagaagagacctgaacttcgagagaggcggcgacatcaccctgagatgccccgtgatgctggtggtgggcgaccaggccccccacgaggacgccgtgatggccgacagcggcggccagccccagctgacccagcccggcaagctgaccgaggccttcaagtacttcctgcagggcatgggctacatggccagcagctgcatgaccagactgagcagaagcagaaccgccagcctgaccagcgccgccagcgtggacggcaacagaagcagaagcagaaccctgagccagagcagcgagagcggcaccctgagcagcggcccccccggccacaccatggaggtgagctgctag

SEQ ID NO: 100598 - DNA, 504 bp, Artificial Sequence
  derived and/or modified sequence
atggccgagctgcaggaggtgcagatcaccgaggagaagcccctgctgcccggccagacccccgaggccgccaagacccacagcgtggagaccccctacggcagcgtgaccttcaccgtgtacggcacccccaagcccaagagacccgccatcctgacctaccacgacgtgggcctgaactacaagagctgcttccagcccctgttccagttcgaggacatgcaggagatcatccagaacttcgtgagagtgcacgtggacgcccccggcatggaggagggcgcccccgtgttccccctgggctaccagtaccccagcctggaccagctggccgacatgatcccctgcgtgctgcagtacctgaacttcagcaccatcatcggcgtgggcgtgggcgccggcgcctacatcctggccagatacgccctgaaccaccccgacaccgtggagggcctggtgctgatcaacatcgaccccaacgccaagggctggatggactggtag

SEQ ID NO: 100599 - DNA, 525 bp, Artificial Sequence
  derived and/or modified sequence
atggccgagctgcaggaggtgcagatcaccgaggagaagcccctgctgcccggccagacccccgaggccgccaagacccacagcgtggagaccccctacggcagcgtgaccttcaccgtgtacggcacccccaagcccaagagacccgccatcctgacctaccacgacgtgggcctgaactacaagagctgcttccagcccctgttccagttcgaggacatgcaggagatcatccagaacttcgtgagagtgcacgtggacgcccccggcatggaggagggcgcccccgtgttccccctgggctaccagtaccccagcctggaccagctggccgacatgatcccctgcgtgctgcagtacctgaacttcagcaccatcatcggcgtgggcgtgggcgccggcgcctacatcctggccagatacgccctgaaccaccccgacaccgtggagggcctggtgctgatcaacatcgaccccaacgccaagggctggatggactgggccgcccacaagctgaccggctag

SEQ ID NO: 100600 - DNA, 405 bp, Artificial Sequence
  derived and/or modified sequence
atggccgagctgcaggaggtgcagatcaccgaggagaagcccctgctgcccggccagacccccgaggccgccaagacccacagcgtggagaccccctacggcagcgtgaccttcaccgtgtacggcacccccaagcccaagagacccgccatcctgacctaccacgacgtgggcctgaactacaagagctgcttccagcccctgttccagttcgaggacatgcaggagatcatccagaacttcgtgagagtgcacgtggacgcccccggcatggaggagggcgcccccgtgttccccctgggctaccagtaccccagcctggaccagctggccgacatgatcccctgcgtgctgcagtacctgaacttcagcaccatcatcggcgtgggcgtgggcgccggctag

SEQ ID NO: 100601 - DNA, 327 bp, Artificial Sequence
  derived and/or modified sequence
atggccgagctgcaggaggtgcagatcaccgaggagaagcccctgctgcccggccagacccccgaggccgccaagacccacagcgtggagaccccctacggcagcgtgaccttcaccgtgtacggcacccccaagcccaagagacccgccatcctgacctaccacgacgtgggcctgaactacaagagctgcttccagcccctgttccagttcgaggacatgcaggagatcatccagaacttcgtgagagtgcacgtggacgcccccggcatggaggagggcgcccccgtgttccccctgggctaccagtaccccagcctggactag

SEQ ID NO: 100602 - DNA, 363 bp, Artificial Sequence
  derived and/or modified sequence
atggccgagctgcaggaggtgcagatcaccgaggagaagcccctgctgcccggccagacccccgaggccgccaagacccacagcgtggagaccccctacggcagcgtgaccttcaccgtgtacggcacccccaagcccaagagacccgccatcctgacctaccacgacgtgggcctgaactacaagagctgcttccagcccctgttccagttcgaggacatgcaggagatcatccagaacttcgtgagagtgcacgtggacgcccccggcatggaggagggcgcccccgtgttccccctgggctaccagtaccccagcctggaccagctggccgacatgatcccctgcgtgctgcagtactag

SEQ ID NO: 100603 - DNA, 279 bp, Artificial Sequence
  derived and/or modified sequence
atggccgagctgcaggaggtgcagatcaccgaggagaagcccctgctgcccggccagacccccgaggccgccaagacccacagcgtggagaccccctacggcagcgtgaccttcaccgtgtacggcacccccaagcccaagagacccgccatcctgacctaccacgacgtgggcctgaactacaagagctgcttccagcccctgttccagttcgaggacatgcaggagatcatccagaacttcgtgagagtgcacgtggacgcccccggcatggagtag

SEQ ID NO: 100604 - DNA, 462 bp, Artificial Sequence
  derived and/or modified sequence
atggccgagctgcaggaggtgcagatcaccgaggagaagcccctgctgcccggccagacccccgaggccgccaagacccacagcgtggagaccccctacggcagcgtgaccttcaccgtgtacggcacccccaagcccaagagacccgccatcctgacctaccacgacgtgggcctgaactacaagagctgcttccagcccctgttccagttcgaggacatgcaggagatcatccagaacttcgtgagagtgcacgtggacgcccccggcatggaggagggcgcccccgtgttccccctgggctaccagtaccccagcctggaccagctggccgacatgatcccctgcgtgctgcagtacctgaacttcagcaccatcatcggcgtgggcgtgggcgccggcgcctacatcctggccagatacgccctgaaccaccccgacaccgtggagggcctggtgtag

SEQ ID NO: 100605 - DNA, 387 bp, Artificial Sequence
  derived and/or modified sequence
atggccgagctgcaggaggtgcagatcaccgaggagaagcccctgctgcccggccagacccccgaggccgccaagacccacagcgtggagaccccctacggcagcgtgaccttcaccgtgtacggcacccccaagcccaagagacccgccatcctgacctaccacgacgtgggcctgaactacaagagctgcttccagcccctgttccagttcgaggacatgcaggagatcatccagaacttcgtgagagtgcacgtggacgcccccggcatggaggagggcgcccccgtgttccccctgggctaccagtaccccagcctggaccagctggccgacatgatcccctgcgtgctgcagtacctgaacttcagcaccatcatcggctag

SEQ ID NO: 100606 - DNA, 666 bp, Artificial Sequence
  derived and/or modified sequence
atggccgagctgcaggaggtgcagatcaccgaggagaagcccctgctgcccggccagacccccgaggccgccaagacccacagcgtggagaccccctacggcagcgtgaccttcaccgtgtacggcacccccaagcccaagagacccgccatcctgacctaccacgacgtgggcctgaactacaagagctgcttccagcccctgttccagttcgaggacatgcaggagatcatccagaacttcgtgagagtgcacgtggacgcccccggcatggaggagggcgcccccgtgttccccctgggctaccagtaccccagcctggaccagctggccgacatgatcccctgcgtgctgcagtacctgaacttcagcaccatcatcggcgtgggcgtgggcgccggcgcctacatcctggccagatacgccctgaaccaccccgacaccgtggagggcctggtgctgatcaacatcgaccccaacgccaagggctggatggactgggccgcccacaagctgaccggcctgaccagcagcatccccgagatgatcctgggccacctgttcagccaggaggagctgagcggcaacagcgagctgatccagaagtacagaaacatcatcacccacgcccccaacctggacaacatcgagctgtactggaactag

SEQ ID NO: 100607 - DNA, 432 bp, Artificial Sequence
  derived and/or modified sequence
atggccgagctgcaggaggtgcagatcaccgaggagaagcccctgctgcccggccagacccccgaggccgccaagacccacagcgtggagaccccctacggcagcgtgaccttcaccgtgtacggcacccccaagcccaagagacccgccatcctgacctaccacgacgtgggcctgaactacaagagctgcttccagcccctgttccagttcgaggacatgcaggagatcatccagaacttcgtgagagtgcacgtggacgcccccggcatggaggagggcgcccccgtgttccccctgggctaccagtaccccagcctggaccagctggccgacatgatcccctgcgtgctgcagtacctgaacttcagcaccatcatcggcgtgggcgtgggcgccggcgcctacatcctggccagatacgccctgtag

SEQ ID NO: 100608 - DNA, 483 bp, Artificial Sequence
  derived and/or modified sequence
atggccgagctgcaggaggtgcagatcaccgaggagaagcccctgctgcccggccagacccccgaggccgccaagacccacagcgtggagaccccctacggcagcgtgaccttcaccgtgtacggcacccccaagcccaagagacccgccatcctgacctaccacgacgtgggcctgaactacaagagctgcttccagcccctgttccagttcgaggacatgcaggagatcatccagaacttcgtgagagtgcacgtggacgcccccggcatggaggagggcgcccccgtgttccccctgggctaccagtaccccagcctggaccagctggccgacatgatcccctgcgtgctgcagtacctgaacttcagcaccatcatcggcgtgggcgtgggcgccggcgcctacatcctggccagatacgccctgaaccaccccgacaccgtggagggcctggtgctgatcaacatcgaccccaactag

SEQ ID NO: 100609 - DNA, 435 bp, Artificial Sequence
  derived and/or modified sequence
atggccgagctgcaggaggtgcagatcaccgaggagaagcccctgctgcccggccagacccccgaggccgccaagacccacagcgtggagaccccctacggcagcgtgaccttcaccgtgtacggcacccccaagcccaagagacccgccatcctgacctaccacgacgtgggcctgaactacaagagctgcttccagcccctgttccagttcgaggacatgcaggagatcatccagaacttcgtgagagtgcacgtggacgcccccggcatggaggagggcgcccccgtgttccccctgggctaccagtaccccagcctggaccagctggccgacatgatcccctgcgtgctgcagtacctgaacttcagcaccatcatcggcgtgggcgtgggcgccggcgcctacatcctggccagatacgccctgaactag

SEQ ID NO: 100610 - DNA, 675 bp, Artificial Sequence
  derived and/or modified sequence
atggccgagctgcaggaggtgcagatcaccgaggagaagcccctgctgcccggccagacccccgaggccgccaagacccacagcgtggagaccccctacggcagcgtgaccttcaccgtgtacggcacccccaagcccaagagacccgccatcctgacctaccacgacgtgggcctgaactacaagagctgcttccagcccctgttccagttcgaggacatgcaggagatcatccagaacttcgtgagagtgcacgtggacgcccccggcatggaggagggcgcccccgtgttccccctgggctaccagtaccccagcctggaccagctggccgacatgatcccctgcgtgctgcagtacctgaacttcagcaccatcatcggcgtgggcgtgggcgccggcgcctacatcctggccagatacgccctgaaccaccccgacaccgtggagggcctggtgctgatcaacatcgaccccaacgccaagggctggatggactgggccgcccacaagctgaccggcctgaccagcagcatccccgagatgatcctgggccacctgttcagccaggaggagctgagcggcaacagcgagctgatccagaagtacagaaacatcatcacccacgcccccaacctggacaacatcgagctgtactggaacagctacaactag

SEQ ID NO: 100611 - DNA, 453 bp, Artificial Sequence
  derived and/or modified sequence
atggccgagctgcaggaggtgcagatcaccgaggagaagcccctgctgcccggccagacccccgaggccgccaagacccacagcgtggagaccccctacggcagcgtgaccttcaccgtgtacggcacccccaagcccaagagacccgccatcctgacctaccacgacgtgggcctgaactacaagagctgcttccagcccctgttccagttcgaggacatgcaggagatcatccagaacttcgtgagagtgcacgtggacgcccccggcatggaggagggcgcccccgtgttccccctgggctaccagtaccccagcctggaccagctggccgacatgatcccctgcgtgctgcagtacctgaacttcagcaccatcatcggcgtgggcgtgggcgccggcgcctacatcctggccagatacgccctgaaccaccccgacaccgtggagtag

SEQ ID NO: 100612 - DNA, 384 bp, Artificial Sequence
  derived and/or modified sequence
atggccgagctgcaggaggtgcagatcaccgaggagaagcccctgctgcccggccagacccccgaggccgccaagacccacagcgtggagaccccctacggcagcgtgaccttcaccgtgtacggcacccccaagcccaagagacccgccatcctgacctaccacgacgtgggcctgaactacaagagctgcttccagcccctgttccagttcgaggacatgcaggagatcatccagaacttcgtgagagtgcacgtggacgcccccggcatggaggagggcgcccccgtgttccccctgggctaccagtaccccagcctggaccagctggccgacatgatcccctgcgtgctgcagtacctgaacttcagcaccatcatctag

SEQ ID NO: 100613 - DNA, 450 bp, Artificial Sequence
  derived and/or modified sequence
atggccgagctgcaggaggtgcagatcaccgaggagaagcccctgctgcccggccagacccccgaggccgccaagacccacagcgtggagaccccctacggcagcgtgaccttcaccgtgtacggcacccccaagcccaagagacccgccatcctgacctaccacgacgtgggcctgaactacaagagctgcttccagcccctgttccagttcgaggacatgcaggagatcatccagaacttcgtgagagtgcacgtggacgcccccggcatggaggagggcgcccccgtgttccccctgggctaccagtaccccagcctggaccagctggccgacatgatcccctgcgtgctgcagtacctgaacttcagcaccatcatcggcgtgggcgtgggcgccggcgcctacatcctggccagatacgccctgaaccaccccgacaccgtgtag

SEQ ID NO: 100614 - DNA, 1026 bp, Artificial Sequence
  derived and/or modified sequence
atggccgaactacaggaagtgcagatcactgaggaaaagcccctgctcccaggccagacccccgaggcagctaaaacgcatagcgtcgagacgccctacggatctgtgacttttactgtctatggaacgcctaaacctaagagacccgcgatactcacctatcatgacgtaggcctcaactacaagtcctgtttccaacctctcttccagtttgaggacatgcaggaaatcatccagaattttgtccgtgtgcacgtcgatgctcccggaatggaggaaggggctccggtcttcccgctgggctaccagtacccaagcctcgaccagctcgctgacatgattccatgcgtgttacaatatctgaacttcagtacaattatcggtgtcggcgttggtgcaggtgcatacatccttgcacgatacgccctgaaccatcccgacacagtggaaggactggtgctcatcaacatcgacccaaacgccaaagggtggatggattgggccgctcacaaacttacggggctgacgtcctcaatccccgagatgatcctcggccacctgttttcgcaggaggagctgagcggaaattcagagctgatccaaaagtaccgaaacattattacacatgccccgaatctcgacaatatcgagctgtattggaactcttacaataatagacgagatctgaactttgagcggggtggggacattacactgaggtgcccagtcatgctcgtggtcggggatcaggctccccacgaggatgccgtgatggctgactcggggggacaacctcagttgacacaacctggaaagctcaccgaggcctttaagtacttcctgcaggggatgggctatatggcatcctcctgcatgacaagattatctagaagccggacagccagccttactagcgccgcctcagtagatgggaaccgatcccgcagtaggactcttagccagtccagtgagtccgggacgctgtcgagtggaccacctggccacaccatggaagtgtcctgttag

SEQ ID NO: 100615 - DNA, 1026 bp, Artificial Sequence
  derived and/or modified sequence
atggccgagttgcaggaagtgcaaataacagaggagaaacccttattgcccgggcagacaccggaagcagcaaaaacgcattccgtagagaccccgtatggatctgtcacctttactgtctacggaacccctaagccaaagagacctgctattctaacctatcatgatgttggactgaactacaagagctgttttcagcccttatttcagttcgaggatatgcaggaaatcattcagaacttcgtgcgcgtgcatgtcgatgctccagggatggaagagggtgccccagtgttccctctgggatatcaatatccatcccttgaccaattagccgatatgatcccctgcgttttgcaatatctcaattttagcaccatcattggcgtgggggtgggggccggcgcatatattctggcgcggtatgctctgaaccatcccgataccgtggagggattagtgctgataaacattgatcctaatgcgaaaggttggatggactgggctgcacataagctgacaggcctaacaagttccatccccgagatgatcctgggccaccttttctcccaggaggagttaagcgggaactccgaactaattcagaagtacaggaacatcattacgcacgctcctaatctggacaatatcgagctgtactggaacagttataataaccgcagggacctgaatttcgaacgtggcggggatattactctgagatgccccgtgatgctagtggtaggggaccaggctccacacgaagacgccgtcatggcagacagcggcggccagccccaactgacacagccaggcaagctgaccgaagcattcaagtatttcctgcaggggatgggttacatggcatcctcatgcatgactcgcttgtcaaggtcccgtaccgcttccctcacatctgccgcctccgtcgatggcaaccgtagcaggagccggacactctcacaatcatccgagagcggcactctgagctccggcccacctggtcataccatggaagtgtcatgctag

SEQ ID NO: 100616 - DNA, 504 bp, Artificial Sequence
  derived and/or modified sequence
atggccgaactgcaggaagtccaaattacggaggagaagcctctgctccctggtcagactcctgaagcagccaagacacatagtgtggagacaccatatggatctgtgacatttaccgtctatgggaccccgaagccaaagcgccccgcaatcctgacttatcatgacgtcgggctgaactacaagagctgcttccagccactgttccagtttgaagacatgcaggagattattcagaacttcgtgagagtgcatgttgatgccccaggcatggaagaaggagcccctgttttcccactcgggtatcagtatccttctctcgatcagctagctgacatgatcccctgtgtgttgcagtacttgaatttcagcacaatcataggtgtaggggtcggagccggagcatacatactcgcacgctacgctctcaatcatccagatacagtggaaggccttgtgctgatcaatatcgatccgaatgccaagggatggatggactggtag

SEQ ID NO: 100617 - DNA, 525 bp, Artificial Sequence
  derived and/or modified sequence
atggcagagctacaggaagtccaaatcacggaagaaaaacctctgttaccgggccaaactccggaagctgcaaagacacactccgtggagacgccctacggcagcgtaaccttcaccgtgtacggcacaccaaaaccgaagaggcctgccatcctgacctaccacgatgttggactgaactataagtcctgttttcagcctctgttccagtttgaggatatgcaagagatcatccagaattttgttcgcgtacacgtggatgctccaggtatggaagagggagcccctgtgttccctctgggatatcagtaccccagccttgatcagctggctgatatgattccatgcgtactccagtatctgaacttcagcactatcattggcgtgggtgttggtgctggtgcctacatcctggcccggtatgccctcaaccacccagatacagtggaggggcttgttcttattaatattgaccccaacgcgaaagggtggatggactgggcggcccataagcttacggggtag

SEQ ID NO: 100618 - DNA, 405 bp, Artificial Sequence
  derived and/or modified sequence
atggcagagctgcaggaggtgcaaattactgaggaaaaacctcttctgccaggccagacccccgaggcggcaaagacccactctgtggagaccccttacggatctgtgacgttcacagtatacggcacgccgaagcctaaacgtcccgcgatcctgacttaccacgatgtaggtctgaactataagtcgtgctttcagcccctctttcagtttgaagacatgcaggagatcatccaaaattttgttcgagttcatgtcgatgcccccggcatggaggaaggcgccccagtgtttccactcgggtaccaatacccatccttagatcaactagcagatatgattccttgcgtgcttcagtacctgaacttttcaacaattattggggtgggagtgggagccggatag

SEQ ID NO: 100619 - DNA, 327 bp, Artificial Sequence
  derived and/or modified sequence
atggccgaattgcaggaggtccagattacagaggagaaaccccttttacccggtcaaacgcctgaggctgcaaaaacacactcagtcgaaacaccgtatgggtctgtgaccttcacggtttacggaacccccaaacctaaacggccggctatcttgacttaccatgacgtgggactgaactacaaaagctgtttccagccactatttcagttcgaagatatgcaggaaatcatccaaaactttgtgcgtgttcacgtggatgcaccagggatggaggagggagcccctgtcttcccactgggctaccagtatccatccctcgactag

SEQ ID NO: 100620 - DNA, 363 bp, Artificial Sequence
  derived and/or modified sequence
atggctgaactgcaggaagtacagattaccgaagaaaagccgcttctgcccgggcagactcccgaagccgctaaaacacactccgtggagacaccatatgggtctgttacctttaccgtgtatggcactccaaaacccaagagacctgccatactcacttatcacgacgtcggactcaattacaagtcttgtttccagcctctcttccaatttgaagacatgcaggagattatccaaaatttcgtgagggtccacgtggatgctcctggtatggaagagggagctcctgtgtttccattaggctatcaatatccgtctctggatcagctagctgacatgattccctgcgtacttcagtactag

SEQ ID NO: 100621 - DNA, 279 bp, Artificial Sequence
  derived and/or modified sequence
atggccgaactccaggaagtgcagatcacagaagagaagccactactgcccggccagactcccgaggccgcgaagacacattcagttgaaaccccgtatggatccgtgacatttacagtctacggaacacccaaacccaagcggcctgcaattctgacctatcacgacgtcgggctcaactataaatcttgctttcaaccgttattccaatttgaagacatgcaagaaatcatccagaattttgtgagagtgcacgtggacgcacctgggatggaatag

SEQ ID NO: 100622 - DNA, 462 bp, Artificial Sequence
  derived and/or modified sequence
atggctgagctgcaggaagtgcagatcacagaagaaaaaccattgctgcccgggcagacaccagaggccgctaaaactcactctgtcgagaccccgtacggcagcgtaacgttcaccgtgtacggcacaccaaagcccaaaagacccgcgatcctgacttatcacgatgtcgggctcaattataagagctgttttcagcccctgttccagtttgaagatatgcaggagattattcaaaacttcgtgcgcgtgcacgtggatgcccccggaatggaagagggagcacccgttttccctctcggatatcagtatccatctctggaccagttggctgacatgatcccctgcgttctccagtacctgaatttctctaccatcatcggcgtgggcgtgggtgccggggcctacattctggctcgatacgccttgaatcatcccgacacagttgaaggcctggtgtag

SEQ ID NO: 100623 - DNA, 387 bp, Artificial Sequence
  derived and/or modified sequence
atggccgaactgcaggaggtgcagattaccgaagaaaaaccactgttacccgggcagacccctgaagcggcgaagacacactcagtggaaaccccatacggaagcgtgacctttacagtgtacggcacgcctaagcccaaacgccccgccattctgacttatcacgacgtggggttaaattataaatcatgtttccagccactctttcagtttgaagacatgcaggagataatccaaaatttcgtccgggtccacgtagatgcgccaggaatggaggagggcgccccagtctttccactgggttaccaataccccagtctcgaccagctggccgacatgattccttgcgttctgcaatacttgaatttttctacgatcataggatag

SEQ ID NO: 100624 - DNA, 666 bp, Artificial Sequence
  derived and/or modified sequence
atggccgagcttcaggaggtgcaaatcacagaagagaaaccgttattgcctggacagactcctgaggcagcaaagacacacagcgttgaaactccttatgggtccgtcacatttaccgtgtacggcactcctaaacccaagaggccagccattctgacttaccatgacgttgggcttaattacaaaagctgcttccaacccctttttcagttcgaagacatgcaagaaattattcagaattttgtgcgcgtgcacgttgacgcgcccgggatggaggagggagcccctgtgtttccactgggttaccagtacccgagtttggaccagctggcagacatgatcccttgcgtattacagtatctgaacttctctactatcatcggcgtcggagtcggcgcaggtgcatacattttagcgcggtatgccctgaaccacccagacacggtggaggggctggttcttattaacattgaccctaacgcgaaggggtggatggattgggcggcccacaaattgacagggctgacatcctccatcccagaaatgatccttggccatctgttcagccaagaagagctgtccggtaactctgagttgatccagaagtaccgaaatataatcacgcatgctccaaatctggataacatcgagctgtattggaactag

SEQ ID NO: 100625 - DNA, 432 bp, Artificial Sequence
  derived and/or modified sequence
atggcagaacttcaagaagttcaaatcaccgaagagaagcccctcctgcctggccagacccctgaagctgctaaaactcatagcgtggaaacaccttacggatccgtgacttttactgtttacggcacacccaagccaaagcgtcctgctatcctgacataccacgatgtcggcctgaattataagagctgtttccaacctctgttccagtttgaagatatgcaggaaatcatccagaacttcgtcagggttcacgtggacgcacctggcatggaggaaggcgctccagtgttccctctcggataccagtatccctcgttagaccagctggctgacatgatcccatgcgttttgcagtaccttaattttagcacaatcattggcgttggggtgggggcaggcgcctacattctggctagatatgccctatag

SEQ ID NO: 100626 - DNA, 483 bp, Artificial Sequence
  derived and/or modified sequence
atggccgagctgcaggaagtacagatcacagaagagaaacccttacttccgggacagacccccgaggccgctaagacacattccgtcgaaacaccatacggaagcgtcaccttcacagtgtatggcactcccaaacctaagaggcctgctattctgacatatcatgacgtcggactgaactacaaaagttgtttccagccactctttcagttcgaagatatgcaggagataatacagaacttcgtcagggtgcatgtggacgcccccggcatggaagagggggcgccagtctttcccttggggtaccagtacccatccctagatcagttagctgatatgatcccttgtgtgctgcaatatctaaatttcagcacaattattggcgttggagtgggcgccggagcctatatcctcgcccggtacgccttgaaccatcccgacacggtggaaggtttagtgctcattaatatagaccccaattag

SEQ ID NO: 100627 - DNA, 435 bp, Artificial Sequence
  derived and/or modified sequence
atggctgagctgcaggaggtccagatcaccgaggagaaacccttattgcctggacagactcctgaggctgcgaagacacacagtgttgagaccccgtatgggagcgtcactttcaccgtctacgggactccaaagcccaaacggccagcgattctgacctatcacgacgtgggtctgaactataaatcttgctttcagccgttattccagtttgaggacatgcaggagattatccagaatttcgttcgggtgcacgtggacgcccctggaatggaggagggagctccagtgttccccctcggttatcagtatccgtcactggaccagttggctgatatgatcccttgtgtgctccaatacctgaacttttccacgatcatcggggtgggagtgggcgcaggagcctatatcctggcaagatacgcccttaattag

SEQ ID NO: 100628 - DNA, 462 bp, Artificial Sequence
  derived and/or modified sequence
atggcggaactccaagaggttcaaattactgaggaaaaacccttgctgcctggtcaaacccccgaggcagccaaaacacacagcgtcgagacaccgtacggaagcgtgacatttacagtgtatggcactcccaagcctaagcgccctgcgattctcacataccacgacgtcggactgaactacaagagctgttttcagcccttgttccaatttgaagacatgcaggaaatcatccaaaactttgtccgcgtgcacgtcgacgcgccgggaatggaagagggggcaccagtgttcccgctgggataccaatatcctagtttagatcagctcgctgatatgatcccctgtgtcctgcagtatcttaatttttcaaccattattggagtgggcgtgggcgccggcgcctacatccttgcgagatatgctctgaatcacccggataccgtcgagggcctggtctag

SEQ ID NO: 100629 - DNA, 675 bp, Artificial Sequence
  derived and/or modified sequence
atggctgagttgcaggaagtccagatcacagaggaaaagcccctcctgcctgggcaaacccctgaggctgcgaaaacacattccgtagaaaccccctacggttccgtgacgttcacagtatacggcacacctaagcccaagcgtcctgccattctcacgtaccacgacgtcgggctgaactacaaaagttgttttcaacccttattccagtttgaggacatgcaggagattattcagaacttcgtgagagtgcacgtggatgctcccggaatggaagaaggggcaccagtttttcccttgggatatcaataccctagcctggatcagctcgcagacatgatcccttgtgtgttacagtacttgaatttctctacgatcatcggcgtgggggtgggagcgggcgcgtatatcctggcccgctatgcactgaatcaccccgacaccgtagagggactggtgctgattaatatcgatccaaatgcaaagggctggatggattgggcagcgcacaaactgactggcctgacgagcagcattccagaaatgatcttgggacacctgttcagtcaagaggaactgtctggaaattctgaacttattcaaaaataccggaatataatcacgcatgctcctaatttggacaacatcgagctctattggaactcatataattag

SEQ ID NO: 100630 - DNA, 453 bp, Artificial Sequence
  derived and/or modified sequence
atggccgagctccaggaagttcagataactgaggaaaaaccactgctgcccggtcagacccccgaggccgcaaagacccattccgtggagaccccatatgggagcgtcacctttaccgtgtatggaactcccaagcctaagcgtcccgccattctgacttatcacgatgtcggcctgaattacaaatcctgctttcaaccactctttcagtttgaagacatgcaagagatcattcagaactttgttcgcgtccatgtcgacgcacccgggatggaggaaggtgctcccgtgttcccccttggttatcaatatccgagcctggaccagctggcagatatgatcccctgtgttctccagtatcttaacttttctacgatcataggcgtgggcgtgggcgccggagcctacattctcgcacggtacgccctcaatcacccggacacagtggaatag

SEQ ID NO: 100631 - DNA, 384 bp, Artificial Sequence
  derived and/or modified sequence
atggcggaactccaagaggttcaaattaccgaagagaaacccttgctgcctgggcaaactcccgaggccgccaaaacacatagtgtcgagacgccctacggctcggtgacttttacagtgtatggtacacctaagccaaagcgtcccgccatccttacttaccatgacgttggacttaactacaagtcttgctttcagcccctctttcagtttgaggacatgcaagagatcatccagaatttcgtgcgcgtccacgtcgacgcccctgggatggaggagggggcccccgtgttccccctgggttatcagtatccctctcttgaccagctggcagacatgatcccttgcgtattacagtacttgaatttcagtacgattatctag

SEQ ID NO: 100632 - DNA, 450 bp, Artificial Sequence
  derived and/or modified sequence
atggccgagctccaagaagtgcaaatcacagaagagaagcccttgctacctgggcagactcctgaagccgctaagacccatagcgtggagacgccgtacggctctgttacctttaccgtgtacggcacacctaaacctaaaagacccgctatattgacctaccacgacgtggggcttaactataagtcatgttttcagccactgtttcagtttgaggatatgcaggagatcattcagaacttcgtgagagtgcacgtggacgccccgggtatggaagagggagcccctgtcttccccttaggctatcagtacccaagtttagatcagctggccgacatgatcccgtgcgtgttgcagtacttgaatttctctaccatcatcggagtgggtgtcggggccggcgcctacatactggccagatacgccctgaatcatccggatactgtgtag

SEQ ID NO: 100633 - DNA, 1026 bp, Artificial Sequence
  derived and/or modified sequence
atggccgagctgcaggaggtgcagatcacagaggagaagcccctgctgcccggccagaccccagaggccgccaagacccacagcgtggagaccccctacggctctgtgaccttcaccgtgtatggcacccccaagcccaagaggcctgccatcctgacctaccatgatgtgggcctgaactacaagagctgcttccagcccctcttccagtttgaggacatgcaggagatcatccagaactttgtgcgggtgcacgtggatgcccctggcatggaggagggcgcccctgtgttccccctgggctaccagtaccccagcctggaccagctggccgacatgatcccctgtgtgctgcagtacctgaacttcagcaccatcattggagtgggcgtgggcgctggggcctacatcctggcccgctatgccctgaaccacccagacacagtggagggcctggtgctgatcaacatcgaccccaatgccaagggctggatggactgggccgcccacaagctgaccggcctgaccagcagcatccctgagatgatcctgggccacctgttcagccaggaggagctgagcggcaacagcgagctgatccagaagtacagaaacatcatcacccacgcccccaacctggacaacatcgagctgtactggaacagctacaacaacagaagagacctgaactttgagcggggcggggacatcaccctgcgctgccctgtgatgctggtggtgggggaccaggcccctcatgaagatgctgtgatggctgacagcggcggccagccccagctgacccagcccgggaagctgacagaggccttcaagtacttcctgcagggcatgggctacatggccagcagctgcatgacccggctgagccgcagcaggacagccagcctgaccagcgctgcctctgtggatggcaacagaagccgcagcaggaccctgagccagagcagcgagagcggcaccctgagcagcggccccccaggccacaccatggaggtgtcctgctag

SEQ ID NO: 100634 - DNA, 504 bp, Artificial Sequence
  derived and/or modified sequence
atggccgagctgcaggaggtgcagatcacagaggagaagcccctgctgcccggccagaccccagaggccgccaagacccacagcgtggagaccccctacggctctgtgaccttcaccgtgtatggcacccccaagcccaagaggcctgccatcctgacctaccatgatgtgggcctgaactacaagagctgcttccagcccctcttccagtttgaggacatgcaggagatcatccagaactttgtgcgggtgcacgtggatgcccctggcatggaggagggcgcccctgtgttccccctgggctaccagtaccccagcctggaccagctggccgacatgatcccctgtgtgctgcagtacctgaacttcagcaccatcattggagtgggcgtgggcgctggggcctacatcctggcccgctatgccctgaaccacccagacacagtggagggcctggtgctgatcaacatcgaccccaatgccaagggctggatggactggtag

SEQ ID NO: 100635 - DNA, 525 bp, Artificial Sequence
  derived and/or modified sequence
atggccgagctgcaggaggtgcagatcacagaggagaagcccctgctgcccggccagaccccagaggccgccaagacccacagcgtggagaccccctacggctctgtgaccttcaccgtgtatggcacccccaagcccaagaggcctgccatcctgacctaccatgatgtgggcctgaactacaagagctgcttccagcccctcttccagtttgaggacatgcaggagatcatccagaactttgtgcgggtgcacgtggatgcccctggcatggaggagggcgcccctgtgttccccctgggctaccagtaccccagcctggaccagctggccgacatgatcccctgtgtgctgcagtacctgaacttcagcaccatcattggagtgggcgtgggcgctggggcctacatcctggcccgctatgccctgaaccacccagacacagtggagggcctggtgctgatcaacatcgaccccaatgccaagggctggatggactgggccgcccacaagctgactggatag

SEQ ID NO: 100636 - DNA, 405 bp, Artificial Sequence
  derived and/or modified sequence
atggccgagctgcaggaggtgcagatcacagaggagaagcccctgctgcccggccagaccccagaggccgccaagacccacagcgtggagaccccctacggctctgtgaccttcaccgtgtatggcacccccaagcccaagaggcctgccatcctgacctaccatgatgtgggcctgaactacaagagctgcttccagcccctcttccagtttgaggacatgcaggagatcatccagaactttgtgcgggtgcacgtggatgcccctggcatggaggagggcgcccctgtgttccccctgggctaccagtaccccagcctggaccagctggccgacatgatcccctgtgtgctgcagtacctgaacttcagcaccatcattggagtgggcgtgggcgccggctag

SEQ ID NO: 100637 - DNA, 327 bp, Artificial Sequence
  derived and/or modified sequence
atggccgagctgcaggaggtgcagatcacagaggagaagcccctgctgcccggccagaccccagaggccgccaagacccacagcgtggagaccccctacggctctgtgaccttcaccgtgtatggcacccccaagcccaagaggcctgccatcctgacctaccatgatgtgggcctgaactacaagagctgcttccagcccctcttccagtttgaggacatgcaggagatcatccagaactttgtgcgggtgcacgtggatgcccctggcatggaggagggcgcccctgtgttccccctgggctaccagtaccccagcctggactag

SEQ ID NO: 100638 - DNA, 363 bp, Artificial Sequence
  derived and/or modified sequence
atggccgagctgcaggaggtgcagatcacagaggagaagcccctgctgcccggccagaccccagaggccgccaagacccacagcgtggagaccccctacggctctgtgaccttcaccgtgtatggcacccccaagcccaagaggcctgccatcctgacctaccatgatgtgggcctgaactacaagagctgcttccagcccctcttccagtttgaggacatgcaggagatcatccagaactttgtgcgggtgcacgtggatgcccctggcatggaggagggcgcccctgtgttccccctgggctaccagtaccccagcctggaccagctggccgacatgatcccctgtgtgctgcagtactag

SEQ ID NO: 100639 - DNA, 279 bp, Artificial Sequence
  derived and/or modified sequence
atggccgagctgcaggaggtgcagatcacagaggagaagcccctgctgcccggccagaccccagaggccgccaagacccacagcgtggagaccccctacggctctgtgaccttcaccgtgtatggcacccccaagcccaagaggcctgccatcctgacctaccatgatgtgggcctgaactacaagagctgcttccagcccctcttccagtttgaggacatgcaggagatcatccagaactttgtgcgggtgcacgtggatgcccctggcatggagtag

SEQ ID NO: 100640 - DNA, 462 bp, Artificial Sequence
  derived and/or modified sequence
atggccgagctgcaggaggtgcagatcacagaggagaagcccctgctgcccggccagaccccagaggccgccaagacccacagcgtggagaccccctacggctctgtgaccttcaccgtgtatggcacccccaagcccaagaggcctgccatcctgacctaccatgatgtgggcctgaactacaagagctgcttccagcccctcttccagtttgaggacatgcaggagatcatccagaactttgtgcgggtgcacgtggatgcccctggcatggaggagggcgcccctgtgttccccctgggctaccagtaccccagcctggaccagctggccgacatgatcccctgtgtgctgcagtacctgaacttcagcaccatcattggagtgggcgtgggcgctggggcctacatcctggcccgctatgccctgaaccacccagacacagtggagggcctggtgtag

SEQ ID NO: 100641 - DNA, 387 bp, Artificial Sequence
  derived and/or modified sequence
atggccgagctgcaggaggtgcagatcacagaggagaagcccctgctgcccggccagaccccagaggccgccaagacccacagcgtggagaccccctacggctctgtgaccttcaccgtgtatggcacccccaagcccaagaggcctgccatcctgacctaccatgatgtgggcctgaactacaagagctgcttccagcccctcttccagtttgaggacatgcaggagatcatccagaactttgtgcgggtgcacgtggatgcccctggcatggaggagggcgcccctgtgttccccctgggctaccagtaccccagcctggaccagctggccgacatgatcccctgtgtgctgcagtacctgaacttcagcaccatcattggatag

SEQ ID NO: 100642 - DNA, 666 bp, Artificial Sequence
  derived and/or modified sequence
atggccgagctgcaggaggtgcagatcacagaggagaagcccctgctgcccggccagaccccagaggccgccaagacccacagcgtggagaccccctacggctctgtgaccttcaccgtgtatggcacccccaagcccaagaggcctgccatcctgacctaccatgatgtgggcctgaactacaagagctgcttccagcccctcttccagtttgaggacatgcaggagatcatccagaactttgtgcgggtgcacgtggatgcccctggcatggaggagggcgcccctgtgttccccctgggctaccagtaccccagcctggaccagctggccgacatgatcccctgtgtgctgcagtacctgaacttcagcaccatcattggagtgggcgtgggcgctggggcctacatcctggcccgctatgccctgaaccacccagacacagtggagggcctggtgctgatcaacatcgaccccaatgccaagggctggatggactgggccgcccacaagctgaccggcctgaccagcagcatccctgagatgatcctgggccacctgttcagccaggaggagctgagcggcaacagcgagctgatccagaagtacagaaacatcatcacccacgcccccaacctggacaacatcgagctgtactggaactag

SEQ ID NO: 100643 - DNA, 432 bp, Artificial Sequence
  derived and/or modified sequence
atggccgagctgcaggaggtgcagatcacagaggagaagcccctgctgcccggccagaccccagaggccgccaagacccacagcgtggagaccccctacggctctgtgaccttcaccgtgtatggcacccccaagcccaagaggcctgccatcctgacctaccatgatgtgggcctgaactacaagagctgcttccagcccctcttccagtttgaggacatgcaggagatcatccagaactttgtgcgggtgcacgtggatgcccctggcatggaggagggcgcccctgtgttccccctgggctaccagtaccccagcctggaccagctggccgacatgatcccctgtgtgctgcagtacctgaacttcagcaccatcattggagtgggcgtgggcgctggggcctacatcctggcccgctatgccctgtag

SEQ ID NO: 100644 - DNA, 483 bp, Artificial Sequence
  derived and/or modified sequence
atggccgagctgcaggaggtgcagatcacagaggagaagcccctgctgcccggccagaccccagaggccgccaagacccacagcgtggagaccccctacggctctgtgaccttcaccgtgtatggcacccccaagcccaagaggcctgccatcctgacctaccatgatgtgggcctgaactacaagagctgcttccagcccctcttccagtttgaggacatgcaggagatcatccagaactttgtgcgggtgcacgtggatgcccctggcatggaggagggcgcccctgtgttccccctgggctaccagtaccccagcctggaccagctggccgacatgatcccctgtgtgctgcagtacctgaacttcagcaccatcattggagtgggcgtgggcgctggggcctacatcctggcccgctatgccctgaaccacccagacacagtggagggcctggtgctgatcaacatcgaccccaactag

SEQ ID NO: 100645 - DNA, 435 bp, Artificial Sequence
  derived and/or modified sequence
atggccgagctgcaggaggtgcagatcacagaggagaagcccctgctgcccggccagaccccagaggccgccaagacccacagcgtggagaccccctacggctctgtgaccttcaccgtgtatggcacccccaagcccaagaggcctgccatcctgacctaccatgatgtgggcctgaactacaagagctgcttccagcccctcttccagtttgaggacatgcaggagatcatccagaactttgtgcgggtgcacgtggatgcccctggcatggaggagggcgcccctgtgttccccctgggctaccagtaccccagcctggaccagctggccgacatgatcccctgtgtgctgcagtacctgaacttcagcaccatcattggagtgggcgtgggcgctggggcctacatcctggcccgctatgccctgaactag

SEQ ID NO: 100646 - DNA, 675 bp, Artificial Sequence
  derived and/or modified sequence
atggccgagctgcaggaggtgcagatcacagaggagaagcccctgctgcccggccagaccccagaggccgccaagacccacagcgtggagaccccctacggctctgtgaccttcaccgtgtatggcacccccaagcccaagaggcctgccatcctgacctaccatgatgtgggcctgaactacaagagctgcttccagcccctcttccagtttgaggacatgcaggagatcatccagaactttgtgcgggtgcacgtggatgcccctggcatggaggagggcgcccctgtgttccccctgggctaccagtaccccagcctggaccagctggccgacatgatcccctgtgtgctgcagtacctgaacttcagcaccatcattggagtgggcgtgggcgctggggcctacatcctggcccgctatgccctgaaccacccagacacagtggagggcctggtgctgatcaacatcgaccccaatgccaagggctggatggactgggccgcccacaagctgaccggcctgaccagcagcatccctgagatgatcctgggccacctgttcagccaggaggagctgagcggcaacagcgagctgatccagaagtacagaaacatcatcacccacgcccccaacctggacaacatcgagctgtactggaacagctacaactag

SEQ ID NO: 100647 - DNA, 453 bp, Artificial Sequence
  derived and/or modified sequence
atggccgagctgcaggaggtgcagatcacagaggagaagcccctgctgcccggccagaccccagaggccgccaagacccacagcgtggagaccccctacggctctgtgaccttcaccgtgtatggcacccccaagcccaagaggcctgccatcctgacctaccatgatgtgggcctgaactacaagagctgcttccagcccctcttccagtttgaggacatgcaggagatcatccagaactttgtgcgggtgcacgtggatgcccctggcatggaggagggcgcccctgtgttccccctgggctaccagtaccccagcctggaccagctggccgacatgatcccctgtgtgctgcagtacctgaacttcagcaccatcattggagtgggcgtgggcgctggggcctacatcctggcccgctatgccctgaaccacccagacacagtggagtag

SEQ ID NO: 100648 - DNA, 384 bp, Artificial Sequence
  derived and/or modified sequence
atggccgagctgcaggaggtgcagatcacagaggagaagcccctgctgcccggccagaccccagaggccgccaagacccacagcgtggagaccccctacggctctgtgaccttcaccgtgtatggcacccccaagcccaagaggcctgccatcctgacctaccatgatgtgggcctgaactacaagagctgcttccagcccctcttccagtttgaggacatgcaggagatcatccagaactttgtgcgggtgcacgtggatgcccctggcatggaggagggcgcccctgtgttccccctgggctaccagtaccccagcctggaccagctggccgacatgatcccctgtgtgctgcagtacctgaacttcagcaccatcatctag

SEQ ID NO: 100649 - DNA, 450 bp, Artificial Sequence
  derived and/or modified sequence
atggccgagctgcaggaggtgcagatcacagaggagaagcccctgctgcccggccagaccccagaggccgccaagacccacagcgtggagaccccctacggctctgtgaccttcaccgtgtatggcacccccaagcccaagaggcctgccatcctgacctaccatgatgtgggcctgaactacaagagctgcttccagcccctcttccagtttgaggacatgcaggagatcatccagaactttgtgcgggtgcacgtggatgcccctggcatggaggagggcgcccctgtgttccccctgggctaccagtaccccagcctggaccagctggccgacatgatcccctgtgtgctgcagtacctgaacttcagcaccatcattggagtgggcgtgggcgctggggcctacatcctggcccgctatgccctgaaccacccagacacagtgtag

SEQ ID NO: 100650 - DNA, 1026 bp, Artificial Sequence
  derived and/or modified sequence
atggccgagctgcaggaggtgcagatcaccgaggagaagcccctgttaccagggcagacacctgaggccgccaagacacatagcgtcgaaacgccttacgggtctgtgacattcaccgtgtacgggacacctaagcccaaaagacccgctatcctgacctaccacgacgttgggctgaattataagagttgctttcagcccctgttccaattcgaagacatgcaggagattatccaaaacttcgtaagggtgcacgtggatgccccagggatggaggaaggggctcccgtgttcccactcggatatcagtacccgtccctcgatcagctggccgatatgataccttgtgtgttgcagtatttgaacttctctaccatcatcggggtgggcgttggcgcaggggcctacatattagctaggtatgccttgaatcatcctgacactgtcgaaggtctcgttctcattaacatcgaccctaatgctaagggctggatggattgggccgcacacaaattgacaggtctgactagcagcatcccagagatgatcttaggacacttatttagccaggaggagctctccgggaattccgagcttatccagaagtacagaaatattatcacacacgcccctaatctggataatattgagttgtactggaattcatacaataatcgacgcgacctgaactttgaaagaggcggggacatcacactaaggtgcccagttatgctggtggtgggggaccaggcccctcacgaggatgctgtcatggctgatagcggggggcagccccagctgacccagcccggcaagctgacggaggcctttaagtattttctgcagggcatgggttatatggcatcatcatgcatgacccgcctaagtcggtcaagaacagccagcttgacctcagcagcctccgtcgatggcaaccggagtcgttcccgtacactgagccagagcagtgagagcgggactctgagcagcggtcccccaggccatacaatggaggtgagttgttag

SEQ ID NO: 100651 - DNA, 1026 bp, Artificial Sequence
  derived and/or modified sequence
atggccgagctgcaggaggtgcagatcaccgaggagaagcccctgcttccgggccaaacccctgaggctgccaaaacgcactccgtggaaacaccctacgggagcgttacgttcactgtatacggaaccccaaaaccaaaacgccccgccatcttaacctaccacgatgtaggcctgaattataaaagttgctttcaacctctctttcagtttgaagacatgcaggaaattatccagaactttgttcgcgtgcacgttgacgcccccggaatggaggagggcgcccccgttttcccgctcgggtatcagtacccttcgctggatcagttggcagacatgattccatgtgttttacaatacttgaatttttctaccatcatcggtgtgggagtgggcgccggtgcttacattcttgctagatatgctctgaaccacccggatacagttgaagggttagtgcttattaacattgacccaaatgctaaggggtggatggattgggctgctcacaaattaaccggacttacctcatcgattccagagatgattctcgggcacctattttctcaagaggaattgagcggtaacagtgagcttattcaaaaatacaggaacattataactcatgcccctaacctggataatatcgagttgtactggaattcctataataacagacgtgaccttaacttcgaacgagggggggatatcacactgcggtgcccagttatgcttgtggtaggtgaccaagcacctcacgaggatgccgtgatggccgattctggcgggcaaccgcagctgactcagcctggtaaattgaccgaggcctttaagtacttcctgcagggtatggggtatatggcctcctcttgcatgacccgtctcagtagatcccgcactgccagtcttacttctgccgctagcgtcgatgggaatagaagccgctctcgcaccctgagtcagtccagcgagtcgggaaccctgagctcaggccccccaggacacacaatggaagtgagttgttag

SEQ ID NO: 100652 - DNA, 504 bp, Artificial Sequence
  derived and/or modified sequence
atggccgagctgcaggaggtgcagatcaccgaggagaagcccctgctcccaggccagacgccagaggctgccaaaactcactctgtggaaacgccttacggctctgtgaccttcaccgtatacggaactccaaaaccgaagcggccggccatccttacctaccacgacgtgggcctgaactacaagagctgttttcagccccttttccagtttgaagatatgcaggaaatcatccagaattttgtacgtgtccacgtggacgcccctggtatggaggagggagcccccgtcttcccacttggctaccagtacccgtccttagatcaactggctgacatgatcccctgtgtgctgcaatacttgaatttctccactattattggagttggagttggtgcaggagcctatatactggcacggtacgcgttaaatcaccccgatacagtggagggtctggtgctcatcaatatagaccctaatgctaagggatggatggactggtag

SEQ ID NO: 100653 - DNA, 525 bp, Artificial Sequence
  derived and/or modified sequence
atggccgagctgcaggaggtgcagatcaccgaggagaagcccctgttgcctggccagaccccggaagccgcaaaaacacacagtgtagagaccccttatggaagtgtcacatttaccgtgtacggaacgcccaagcctaaacgcccggccattttgacataccatgacgtggggctgaactacaaaagctgcttccagcctttatttcaattcgaggacatgcaggaaattattcagaacttcgtgcgtgtgcatgtcgacgcgcctggaatggaagagggcgcccctgtgtttcccctgggataccagtacccatctcttgatcagctggccgatatgattccttgcgtcctgcagtacctgaatttttccacgatcatcggcgtaggagtaggcgctggtgcctatatcctggccaggtatgctctcaaccaccctgatacggtggaagggctcgtgctcatcaacatagatcccaacgcaaaggggtggatggactgggccgcccacaaacttacaggctag

SEQ ID NO: 100654 - DNA, 405 bp, Artificial Sequence
  derived and/or modified sequence
atggccgagctgcaggaggtgcagatcaccgaggagaagcccctgctgccagggcagacccctgaggctgcaaagactcacagcgtggagacaccttatggctcagtaaccttcaccgtttacggaactcctaaaccaaaaagaccggcaatcttgacctatcatgacgttggcttaaattacaagagttgcttccagcccctgttccagtttgaggacatgcaagagattatccagaatttcgttagagttcatgttgacgctccgggcatggaggaaggggcgccagtgttccctctgggttaccagtacccatccctggatcagcttgctgatatgataccctgcgtgctccagtatctgaacttttccactatcattggagttggggttggggcagggtag

SEQ ID NO: 100655 - DNA, 327 bp, Artificial Sequence
  derived and/or modified sequence
atggccgagctgcaggaggtgcagatcaccgaggagaagcccctgctccccggacagacaccagaagcggcaaaaacccattctgtggagactccatacggcagtgttacctttacggtgtacggtacacctaagcccaagcgtcctgccatcctgacttatcacgacgtagggcttaactataagtcctgcttccaacctctttttcagttcgaagatatgcaagaaatcatacagaactttgtgagagtgcatgtcgacgccccaggcatggaggagggcgctcccgtctttcctctcggatatcagtaccccagcctggactag

SEQ ID NO: 100656 - DNA, 363 bp, Artificial Sequence
  derived and/or modified sequence
atggccgagctgcaggaggtgcagatcaccgaggagaagcccctgctgcccggacagacccctgaggctgctaagacgcattccgtggagaccccctacggttccgtgacatttaccgtgtacggcacccccaagcccaaacggcccgcaatcctgacttaccatgacgtggggctgaactacaagtcttgttttcagcctctcttccaattcgaggacatgcaagaaattattcagaatttcgtaagggttcatgtggacgcccctgggatggaggagggggctcctgtgtttccactcggctaccagtatcccagcttggatcagttggctgatatgattccctgtgtgctccagtattag

SEQ ID NO: 100657 - DNA, 279 bp, Artificial Sequence
  derived and/or modified sequence
atggccgagctgcaggaggtgcagatcaccgaggagaagcccctgctgcccgggcagacacccgaagccgctaaaacacactctgtggaaacaccttacggtagtgtgaccttcaccgtttatggcactccaaagccgaaaaggcccgccatcctgacctatcacgatgtggggcttaattacaaatcttgtttccagcccctgttccaattcgaggatatgcaggagattattcagaattttgtgcgcgtgcatgttgatgcgccagggatggagtag

SEQ ID NO: 100658 - DNA, 462 bp, Artificial Sequence
  derived and/or modified sequence
atggccgagctgcaggaggtgcagatcaccgaggagaagcccctgcttcccggccagacccctgaggccgccaagacccatagtgtcgagacaccctatggctccgtgacattcacagtgtacggcacccctaaaccaaagagacccgctatcctgacgtatcatgatgtcggtttgaactacaagtcctgcttccaacctctctttcagtttgaggatatgcaagagatcatacagaattttgtgagagtacatgtcgacgccccaggcatggaggaaggcgctcctgtttttcccctggggtatcagtacccgagcttggaccagctggccgacatgattccctgtgttctgcagtatttgaatttttccaccataataggcgtgggtgtgggtgccggagcgtatatcctggcccgctatgctctgaatcacccggacactgttgagggtcttgtgtag

SEQ ID NO: 100659 - DNA, 387 bp, Artificial Sequence
  derived and/or modified sequence
atggccgagctgcaggaggtgcagatcaccgaggagaagcccctgttgcctggacagaccccagaggccgctaaaacacactctgtggagaccccatatggtagcgtgacatttactgtgtacgggacaccaaaacctaagaggcccgctattctcacttaccacgatgtcggattaaattacaaatcttgtttccagccgctgttccagttcgaagatatgcaagagatcattcaaaattttgtccgcgtccatgtggatgcgccaggcatggaagaaggagctccggtgttcccgttgggataccaatacccaagtctggaccaactcgccgacatgatcccatgcgtgttacagtacctcaacttcagcactattattggctag

SEQ ID NO: 100660 - DNA, 666 bp, Artificial Sequence
  derived and/or modified sequence
atggccgagctgcaggaggtgcagatcaccgaggagaagcccctgctccctgggcagacacccgaggctgctaagacccacagtgtcgagaccccgtatggatcagtgactttcacagtttatggaacacctaagcccaagcgcccagccatattaacttaccacgacgtgggtctcaactacaagtcctgctttcagcctctcttccagtttgaagatatgcaggaaattatccagaattttgttagagttcacgtggacgctccagggatggaagagggcgcccccgtcttcccattgggctaccagtacccaagcctggaccagctggccgatatgatcccatgcgtgctgcagtacctgaacttctccacgatcatcggggtgggcgtaggagcaggcgcatatatattggcccggtacgctcttaatcatccagataccgtcgaaggactggtgttgattaacattgatcccaacgccaagggttggatggattgggcagctcataagttaacaggtctgacatcaagcatcccggagatgatactgggtcacctgtttagccaagaggaactatcaggaaactccgagctcattcagaagtacaggaatatcataactcacgcacctaatttagacaatatagagctgtactggaactag

SEQ ID NO: 100661 - DNA, 432 bp, Artificial Sequence
  derived and/or modified sequence
atggccgagctgcaggaggtgcagatcaccgaggagaagcccctgctgccaggccaaacacccgaagcggcgaagactcactccgtggagactccatacggctccgtaacttttacggtatacggaaccccaaagccaaaacgtccagccattcttacctatcatgacgtgggcctgaactacaagtcctgtttccagcccctgtttcaattcgaggatatgcaggagattattcagaattttgtgcgggtacacgtggatgctcctggtatggaagaaggagccccagtgtttcctctgggatatcagtaccccagcttggaccaacttgccgatatgatcccttgcgtgttgcagtacctcaactttagcaccattattggtgtgggggtgggcgccggggcttatatactcgcacgatacgctctttag

SEQ ID NO: 100662 - DNA, 483 bp, Artificial Sequence
  derived and/or modified sequence
atggccgagctgcaggaggtgcagatcaccgaggagaagcccctgctacccggccaaacccctgaagctgccaaaacccactctgtcgagaccccctatggcagcgtgaccttcactgtgtatgggacacccaagcctaagcggcccgccattctgacttaccacgacgtcgggttgaactataaatcatgttttcagccattgtttcagtttgaagatatgcaggagatcattcagaatttcgtgcgcgtccacgttgacgcccccggtatggaggagggagcccccgtatttcctctgggataccaatatccctcccttgaccagttagctgacatgattccgtgtgtgctccaatacctcaacttcagcaccatcattggggtcggcgtgggcgcaggcgcctacattttggctagatatgcattaaaccatcccgatactgtggaagggctcgtgctaatcaacattgaccccaactag

SEQ ID NO: 100663 - DNA, 435 bp, Artificial Sequence
  derived and/or modified sequence
atggccgagctgcaggaggtgcagatcaccgaggagaagcccctgctgcctgggcagaccccagaggccgctaaaacacactccgtagagacaccttacggatccgtgacctttacagtatatggaacaccgaaaccaaagcggcctgccattcttacttatcatgacgtggggttaaactataagtcatgctttcagcctttgtttcagtttgaggacatgcaggagatcattcaaaactttgtgagagtgcacgttgatgccccaggcatggaagaaggagcccctgtcttccccctcggctaccaatacccttctttggaccaactcgccgatatgatcccttgtgtgctccagtacttaaactttagtactatcatcggagtgggtgtaggagccggcgcttacattctagcccgatatgccctcaactag

SEQ ID NO: 100664 - DNA, 462 bp, Artificial Sequence
  derived and/or modified sequence
atggccgagctgcaggaggtgcagatcaccgaggagaagcccctgctcccggggcagactcctgaggccgcaaaaacacattccgtggagaccccttatggctctgttactttcacagtgtatggtactcctaagcccaaaaggccagctattctcacttaccacgatgtaggcttgaactataaatcctgcttccagcccctgttccagtttgaggatatgcaggagattatccagaatttcgtgagggtgcacgtggacgcccccggaatggaggaaggtgctcctgtcttccccctggggtaccagtatccatctctggaccagctggccgacatgattccctgcgtactgcagtacctcaatttttccactattattggtgtcggagtgggggccggggcctacattttagccaggtatgcactcaatcaccccgatacagttgagggactcgtatag

SEQ ID NO: 100665 - DNA, 675 bp, Artificial Sequence
  derived and/or modified sequence
atggccgagctgcaggaggtgcagatcaccgaggagaagcccctgctccccggccagacccctgaggcagcaaaaacccactcagtggaaactccatacggcagcgttaccttcacagtttatgggactcccaaaccaaagaggccagccatccttacctaccacgatgtcggtctgaattacaaatcatgctttcagccccttttccagtttgaggacatgcaagagattatccagaactttgtcagagtgcacgttgacgcccccggcatggaggagggggcgccagtgttccccttggggtatcaatatccctctctggatcagttggccgacatgatcccttgcgtcctgcagtatttgaacttcagtacaataattggcgttggggtcggagccggcgcctacatcctggctcggtatgctcttaaccaccccgacaccgtggaaggtctcgtcctgattaacattgaccctaacgcaaaggggtggatggactgggcagcccataagctcacaggactcaccagctcaatccccgaaatgattctggggcatctgttttcacaagaagaactttccgggaactctgaactgatacagaaatacagaaacatcattacacatgctcctaatctggataatattgagctgtactggaatagttataactag

SEQ ID NO: 100666 - DNA, 453 bp, Artificial Sequence
  derived and/or modified sequence
atggccgagctgcaggaggtgcagatcaccgaggagaagcccctgctgcctggacaaacgcctgaggccgcaaagacgcactctgtagaaaccccctacggctccgtcactttcaccgtatacggtacgcccaaaccgaaaagacccgcaattctaacttaccatgatgtcggtctgaactacaagagctgtttccagcccttgttccaatttgaagacatgcaggagatcattcagaacttcgtccgggtccacgtggatgcccccggcatggaagaaggcgcccccgtctttccattggggtatcagtacccatcactggaccagttggctgacatgataccttgtgtgctccagtatctgaatttcagcacaattattggggtgggtgtcggggctggcgcttacattctggcccggtacgctctgaaccacccggatactgtggaatag

SEQ ID NO: 100667 - DNA, 384 bp, Artificial Sequence
  derived and/or modified sequence
atggccgagctgcaggaggtgcagatcaccgaggagaagcccctgctccctggccaaactccagaggcagcaaaaactcacagtgtggagactccttacggatctgtgacatttaccgtgtacggtacccccaaaccaaagaggcctgcaattctcacctatcatgacgtaggcctgaactacaaatcttgcttccagcccctttttcaattcgaggatatgcaagaaataatccagaatttcgttagagttcacgtggacgcgccgggcatggaggagggcgccccagtgttccctctggggtaccagtatccgtccttggatcagcttgccgacatgattccctgtgtgctgcagtacttgaatttctccacaattatctag

SEQ ID NO: 100668 - DNA, 450 bp, Artificial Sequence
  derived and/or modified sequence
atggccgagctgcaggaggtgcagatcaccgaggagaagcccctgctgccgggccagacacctgaggctgcgaagactcacagtgtggagaccccgtatggctccgtgaccttcaccgtgtatggcactccaaagcccaaacgccctgcaatcctcacatatcatgatgtcggtctgaactataaatcatgttttcagcctctcttccaatttgaggatatgcaagagatcatccaaaactttgtgcgcgtccacgtggatgccccaggcatggaagagggagctcccgtgttcccacttggctaccagtacccctcgctcgaccagctggcagatatgattccttgtgttctccagtatttgaacttctctactattataggtgtgggtgtgggagctggtgcttacatcctcgcgcgctacgcactgaatcacccggacacagtttag

SEQ ID NO: 100669 - DNA, 2096 bp, Artificial Sequence
  derived and/or modified sequence
actcctgcgccctcgacgttcccccgtgccccctttcggcgccagcacacctgcccctgccagccggcgagacccccgcctcctcagcggcggtcccgcccacctcctcctttcttaatctagttctctgtgttcgggcggggggagtcgaactcgtggggtgtcagtatcccgggttcgtctccccactaccggttcccaccactgagtctgggggcgaaggaaggagccagagtgcaattgcagatccagaccccagagtcagaaggagtgagaaccctgacccctaatcccactgcatccagccaataggagcccagccaccatggcggagctgcaggaggtgcagatcacagaggagaagccactgttgccaggacagacgcctgaggcggccaagactcactctgtggagacaccatacggctctgtcactttcactgtctatggcacccccaaacccaaacgcccagcgatccttacctaccacgatgtgggactcaactataaatcttgcttccagccactgtttcagttcgaggacatgcaggaaatcattcagaactttgtgcgggttcatgtggatgcccctggaatggaagagggagcccctgtgttccctttgggatatcagtacccatctctggaccagcttgcagacatgatcccttgcgtcctgcagtacctaaatttctctacaataattggagttggtgttggagctggagcctacatcctggcgagatatgctcttaaccacccggacactgttgaaggtcttgtcctcatcaacattgatcccaatgccaagggttggatggattgggcagcccacaagctaacaggcctcacctcttccattccggagatgatccttggacatcttttcagccaggaagagctctctggaaattctgagttgatacaaaagtacagaaatatcattacacatgcacccaacctggataacattgaattgtactggaacagctacaacaaccgccgagacctgaactttgagcgtggaggtgatatcaccctcaggtgtcctgtgatgctggtggtaggagaccaagcacctcatgaagatgcagtgatggctgactccggaggtcagccccagctgactcagccaggcaagctgaccgaggccttcaagtacttcctgcaaggcatgggctacatggcctcatcctgcatgactcgcctgtcccggtctcgtacagcctctctgaccagtgcagcatccgttgatggcaaccggtcccgctctcgcaccctgtcccagagcagcgagtctggaactctttcttcggggcccccggggcacaccatggaggtctcctgttgaatggcccttgttgccctagagtgggacccagccctcacctcccccagagctaacctgggaggtgctgaaggggcattgggccaccgtaagcaagggaaaaagggcagatcatgcggggagatgaccttgatctttgattgctaccctaaccttgacctttaacccgtgattccccccagctcctggaagagatgtcctaatatctcttagggacccagacccctaaattctcctcctcccccattttgatgttaaggtggagagggcatatgcatcctctgtcctgatctaggtgtctatagctgaggggtaagaggttgttgtagttgtcctggtgcctccatcagactctccctacttgtcccatatttgcaaggggaggggatttggggctggggctccattcaccaaagctgaggtggcttctcattaaccctttaggactctgaagggtatggacctacgtgaatgtgtgtcagggggagacttgctggtgggttagtggtcctcaggatgtgatagaaacatccagtgtaaaaaggaagttggaatgggagttggcgggcagtgaacgagtgtggggaaggattggtgctggggcaacaggaaggggcctggggccgtttggctgcactaactttggtagctcagtgtgcatctagagtgggactggggagggagctaagcttgggctgggctgcttggggcttggcatagggtggaaagggctaccctggggctctga

SEQ ID NO: 100670 - DNA, 1954 bp, Artificial Sequence
  derived and/or modified sequence
agtgaaggtggaagcggccgcggcggcagcagaccccagagtcagaaggagtgagaaccctgacccctaatcccactgcatccagccaataggagcccagccaccatggcggagctgcaggaggtgcagatcacagaggagaagccactgttgccaggacagacgcctgaggcggccaagactcactctgtggagacaccatacggctctgtcactttcactgtctatggcacccccaaacccaaacgcccagcgatccttacctaccacgatgtgggactcaactataaatcttgcttccagccactgtttcagttcgaggacatgcaggaaatcattcagaactttgtgcgggttcatgtggatgcccctggaatggaagagggagcccctgtgttccctttgggatatcagtacccatctctggaccagcttgcagacatgatcccttgcgtcctgcagtacctaaatttctctacaataattggagttggtgttggagctggagcctacatcctggcgagatatgctcttaaccacccggacactgttgaaggtcttgtcctcatcaacattgatcccaatgccaagggttggatggattgggcagcccacaagctaacaggcctcacctcttccattccggagatgatccttggacatcttttcagccaggaagagctctctggaaattctgagttgatacaaaagtacagaaatatcattacacatgcacccaacctggataacattgaattgtactggaacagctacaacaaccgccgagacctgaactttgagcgtggaggtgatatcaccctcaggtgtcctgtgatgctggtggtaggagaccaagcacctcatgaagatgcagtgatggctgactccggaggtcagccccagctgactcagccaggcaagctgaccgaggccttcaagtacttcctgcaaggcatgggctacatggcctcatcctgcatgactcgcctgtcccggtctcgtacagcctctctgaccagtgcagcatccgttgatggcaaccggtcccgctctcgcaccctgtcccagagcagcgagtctggaactctttcttcggggcccccggggcacaccatggaggtctcctgttgaatggcccttgttgccctagagtgggacccagccctcacctcccccagagctaacctgggaggtgctgaaggggcattgggccaccgtaagcaagggaaaaagggcagatcatgcggggagatgaccttgatctttgattgctaccctaaccttgacctttaacccgtgattccccccagctcctggaagagatgtcctaatatctcttagggacccagacccctaaattctcctcctcccccattttgatgttaaggtggagagggcatatgcatcctctgtcctgatctaggtgtctatagctgaggggtaagaggttgttgtagttgtcctggtgcctccatcagactctccctacttgtcccatatttgcaaggggaggggatttggggctggggctccattcaccaaagctgaggtggcttctcattaaccctttaggactctgaagggtatggacctacgtgaatgtgtgtcagggggagacttgctggtgggttagtggtcctcaggatgtgatagaaacatccagtgtaaaaaggaagttggaatgggagttggcgggcagtgaacgagtgtggggaaggattggtgctggggcaacaggaaggggcctggggccgtttggctgcactaactttggtagctcagtgtgcatctagagtgggactggggagggagctaagcttgggctgggctgcttggggcttggcatagggtggaaagggctaccctggggctctgaccacactgtagtatgtgtggagggtgccctcccgtctcccacaacttctgctataacaataaactgtagaggaatctg

SEQ ID NO: 100671 - DNA, 1026 bp, Artificial Sequence
  derived and/or modified sequence
atggcggaactgcaggaggtccagatcacagaggagaagcccctgctgcccggacaaactccagaggcggctaagactcactcagtggaaactccttacgggtcagttacgttcacggtgtatggcacacctaagcccaagaggcccgcaattctgacatatcatgatgtgggacttaattacaaatcctgctttcagcccctcttccagtttgaggatatgcaagaaatcatacagaacttcgttcgcgtgcacgtagatgctccaggaatggaggagggtgcaccagtcttccctctgggataccagtatccgagtttggatcagctcgccgacatgattccctgcgttctccaatacctgaactttagcacaataataggggttggggtcggggctggcgcatacatactggctcgatacgctctgaatcaccccgatactgtggaggggctcgtgctgataaatattgaccctaatgccaagggatggatggattgggcagcccacaaactcaccgggctgacttcctcgatccccgaaatgatactgggacacctgttctcccaggaagaactcagcggtaattccgagctgatacagaaataccggaacatcataactcatgctcccaacctggacaacatcgagctttattggaacagttataacaaccgacgcgatttgaattttgagagaggcggagacataaccctgcgctgcccagtcatgctggtagtaggggaccaggccccacacgaggatgccgtcatggcagactctggcggacagccacagctcacgcaacccggaaaactcaccgaggcttttaagtactttctgcagggcatgggctatatggcaagctcctgcatgactagactgtcgcgaagccggacagcttctctgactagcgccgcatctgtggatgggaaccgttcaagatcacgcacgttaagtcaatcttctgagtccggaacactctctagtggccctcccggacacacaatggaagtgtcctgttag

SEQ ID NO: 100672 - DNA, 1026 bp, Artificial Sequence
  derived and/or modified sequence
atggctgagcttcaagaggttcagataactgaggaaaaacccctgcttcccggtcagacacctgaggctgcaaagactcactctgtggagacaccctacgggagcgtaacatttacagtgtacggtacgcccaagcccaagcgaccagcaatcttgacatatcacgatgtggggttgaattataagtcatgtttccagcctctgtttcagttcgaagatatgcaggagattatccagaatttcgtacgagtgcatgtggatgccccaggtatggaggaaggtgctccagtgttcccacttgggtaccaatatccttccctcgaccagcttgcagacatgatcccttgtgttctacagtatctgaatttctctacgatcatcggggtcggggtgggagcaggcgcttatatcctggcacggtacgcgctaaaccacccagacaccgtcgaggggttggtgctgataaacatagaccccaacgcaaaaggctggatggactgggccgcacataaattgacaggtctgacatcctcaattccagagatgatcttggggcacttgttttcacaagaggaactgtccggaaactccgaactcatccagaaatatcgtaacattataacccacgcccctaatcttgacaacatagagctatattggaatagttataataacaggcgcgatctgaattttgagcggggaggggacattacacttcgatgtcctgtaatgctggttgttggcgatcaggctccccacgaggacgctgtcatggccgattccggtggccaacctcagctgacgcaaccaggcaagctgaccgaggcctttaaatactttcttcaaggtatgggttacatggcctcttcttgtatgacgaggctgtcgaggtctcggacagcctcacttacgtccgccgcttccgttgacggcaacaggtcccggagtcgcacactgagccagtcctctgagtccggcaccctctcttccggcccaccaggtcacaccatggaggtgtcctgttag

SEQ ID NO: 100673 - DNA, 504 bp, Artificial Sequence
  derived and/or modified sequence
atggctgagctccaagaagtccagattacagaagaaaagcctttactacccggacaaacacccgaggccgcaaagacccatagtgtggagacaccatatggctccgtgaccttcaccgtgtacggtacgcctaaaccaaaaaggcctgccatcttgacatatcatgatgttggcctgaactataagagttgtttccaaccactgtttcaattcgaagatatgcaagagattattcagaattttgtacgagttcacgtagatgctccagggatggaagagggcgcaccggtattccctctaggctaccagtacccttcacttgatcaattagctgacatgatcccctgcgttcttcagtaccttaatttctctacaataatcggagtgggagtgggcgctggtgcatatatcctggcaaggtatgctttgaatcacccggacactgtggagggcttggtgttgatcaatattgacccgaacgccaagggctggatggactggtag

SEQ ID NO: 100674 - DNA, 525 bp, Artificial Sequence
  derived and/or modified sequence
atggctgagctacaagaggtgcagataactgaagagaaacctctgcttcctggtcaaacaccagaggctgccaaaacccacagtgtcgagacgccttacggctctgttaccttcaccgtctacggcactcctaaacccaagaggccagcaattttgacttaccatgacgtggggctgaactacaagagctgttttcagcctctgttccagtttgaggacatgcaggagatcattcagaacttcgtacgagtgcacgtcgatgcacccggtatggaagagggtgctcctgttttccctcttggctatcaatatcccagcctagaccagctagctgatatgataccctgcgtgcttcaatatctgaactttagcactatcataggggtgggcgttggcgctggagcttatatccttgctcggtacgccctaaatcatcctgataccgtagagggtctggtccttattaacatcgaccctaacgccaagggttggatggattgggcagctcacaaactgactgggtag

SEQ ID NO: 100675 - DNA, 405 bp, Artificial Sequence
  derived and/or modified sequence
atggcagaattgcaagaggtccagatcacagaagagaaaccactcctgcccggtcagacacctgaagcggctaaaactcacagtgttgagacgccttacggaagtgtaacctttactgtgtacggcacacccaaacccaagaggcccgctatcctgacctatcacgacgttgggttgaactacaaaagttgttttcaaccactgttccagtttgaggacatgcaagagatcatacagaacttcgtgagggtgcatgtggatgctcccggtatggaagaaggcgcaccagtgttcccactcgggtaccagtatccatcacttgatcaactggcggatatgattccctgcgtactgcagtatctcaatttttccaccattattggggtcggagtgggtgcaggctag

SEQ ID NO: 100676 - DNA, 327 bp, Artificial Sequence
  derived and/or modified sequence
atggcagagctccaagaggtccagatcacagaggaaaaacctttgctccctggccagacccccgaagcagctaagacacattctgtggagaccccgtacggatcggtgaccttcaccgtttacgggacaccaaaaccaaaaagaccagccatactgacttatcacgatgttggcctcaattacaaatcttgcttccaaccactctttcagtttgaggatatgcaggagataatccagaattttgtccgggttcatgtggacgccccagggatggaggaaggagcccctgtgtttcccctgggctatcagtatccaagccttgattag

SEQ ID NO: 100677 - DNA, 363 bp, Artificial Sequence
  derived and/or modified sequence
atggcggagcttcaggaagtgcagattactgaagagaaacctctgttgccagggcagacccctgaagcggctaagactcacagcgtcgaaaccccctacggctcagtgacattcaccgtatatggaactcccaagcctaagagacctgccattctgacataccacgatgttggcctcaattataagagctgcttccaaccgttattccagttcgaggacatgcaagaaattattcagaatttcgttagggtgcacgtggacgcccctggaatggaggagggggcacccgtgtttcctcttggctatcaataccccagcttagaccagttggctgatatgatcccctgcgtgttgcagtactag

SEQ ID NO: 100678 - DNA, 279 bp, Artificial Sequence
  derived and/or modified sequence
atggcggagctgcaagaggtacagatcaccgaggaaaaaccactcttacccggacagacacccgaagccgcaaaaactcattccgtcgaaacaccttatggttccgtcaccttcaccgtgtacggtacccctaaacctaaaaggcctgcgatcttgacataccatgacgtcggtcttaactacaagagttgctttcaacccttatttcagtttgaagatatgcaagagattattcaaaactttgttagggtgcacgtagatgccccaggcatggaatag

SEQ ID NO: 100679 - DNA, 462 bp, Artificial Sequence
  derived and/or modified sequence
atggcggaactccaggaagtccagattactgaggagaagcccctgcttccaggtcagactcctgaggcggctaagactcactcagtggagacaccgtacgggagcgtcactttcacggtgtacggaacccctaaacctaagcggccagctattctgacatatcacgatgtgggactcaactataagagctgtttccaaccgctgttccaattcgaagatatgcaagagattatacagaatttcgtcagggtgcacgtggatgcgccaggcatggaagagggcgctcccgtgttccctctaggttatcagtaccccagcctcgatcagcttgccgatatgattccatgtgtgctgcagtatctcaacttcagtacaattatcggagtgggagtaggcgctggggcttacatcctggctaggtatgcgctaaaccatcccgatactgtggaaggcctggtgtag

SEQ ID NO: 100680 - DNA, 387 bp, Artificial Sequence
  derived and/or modified sequence
atggcagagctccaagaggttcagattactgaagagaaacctctgctgccaggccagacacctgaagctgccaaaacccactcggtggaaacaccttatggctccgtgactttcaccgtgtacggaactcctaaacctaagcgtccagctatattaacctaccatgatgtcgggctcaattataaaagctgttttcaaccactgtttcaattcgaggacatgcaggaaattattcagaactttgtgcgcgtccatgttgacgctcctgggatggaggaaggagcgcctgttttccccttgggttaccagtacccaagtcttgatcaactagccgatatgatcccatgtgttcttcagtacttgaatttctctaccatcatagggtag

SEQ ID NO: 100681 - DNA, 666 bp, Artificial Sequence
  derived and/or modified sequence
atggctgaactgcaggaagttcagattactgaagaaaagccccttttaccgggacagacacccgaggctgctaagacccacagcgtcgagaccccttacgggtcagtgaccttcactgtgtacggaacaccaaaacctaaacgtccggctattctgacctaccatgacgttggcctaaattataaatcttgctttcaaccactctttcagttcgaggatatgcaggaaatcatacaaaacttcgtacgggtgcatgtggatgcacccggaatggaggaaggcgcacccgtctttccactgggctatcaatatccatcactggatcagctggctgacatgattccatgcgtgcttcagtatctgaacttcagcaccatcatcggagtaggggtcggtgccggtgcatatattctggctcgctacgccttgaatcatccagacactgttgaaggtctggtccttatcaatattgatccaaatgcgaagggttggatggactgggccgctcacaagttgaccggactgacgtcttctatccctgaaatgattctggggcacctctttagccaggaagagctgtcaggaaatagtgagcttattcagaagtatcgcaatatcatcactcatgccccaaacctcgataacatcgagctgtactggaattag

SEQ ID NO: 100682 - DNA, 432 bp, Artificial Sequence
  derived and/or modified sequence
atggcagaactgcaggaggtgcagataaccgaggagaagcccctgctacctggccagactccagaggctgccaagacccatagcgtggaaaccccttatggttccgtcacattcaccgtttacggcacaccaaagcccaaacggccagccatccttacttaccacgatgttggcctcaactacaagagctgctttcagccacttttccaattcgaagacatgcaggagattatacagaattttgtgcgagtccacgtggacgccccaggcatggaggaaggcgcaccggtgttcccactgggatatcaatacccttcactggatcaactggcagatatgatcccatgcgtcctacagtacctcaacttttccactattatcggggtaggcgttggggctggggcttatatcctggccaggtacgccctgtag

SEQ ID NO: 100683 - DNA, 483 bp, Artificial Sequence
  derived and/or modified sequence
atggcagagctgcaggaagtgcaaatcactgaagaaaagcccctgctgccaggccagactcctgaggccgctaaaacacactctgtggaaaccccttatggatccgttacattcactgtctatggcacacccaagcccaaaagacccgcaatcctcacctatcatgacgttggcctcaactataaaagttgtttccagcctctgtttcagttcgaagacatgcaagagattattcagaacttcgtcagggtacatgtcgacgccccaggaatggaggagggagcgcctgtttttccacttggctatcagtacccatccctggatcagttagcagacatgatcccctgcgtgctacagtacctgaatttctcaaccattattggcgttggggtgggggctggcgcttacatcctggcacgctatgctctcaaccacccggatactgtagaaggtctggtactaatcaatatagatcctaactag

SEQ ID NO: 100684 - DNA, 435 bp, Artificial Sequence
  derived and/or modified sequence
atggcagagctgcaggaggtgcagatcaccgaagaaaagcctctcctccccggacagacacctgaggctgccaagacacactctgttgaaactccttatggaagcgtcacttttactgtttacggtactccaaaacctaaacgcccagctattcttacataccatgacgttggcctgaactacaaaagctgtttccagcctctgtttcagtttgaagatatgcaggaaatcatacagaacttcgttcgagtacatgttgatgctccagggatggaagagggagccccagtgtttcccctcggttatcagtacccttccctggaccaactggcagatatgattccatgcgtgctccaatatctgaacttttcaaccattataggtgttggggttggcgctggtgcatatatcctggcccgttacgctttgaactag

SEQ ID NO: 100685 - DNA, 462 bp, Artificial Sequence
  derived and/or modified sequence
atggctgaactgcaggaggttcaaataaccgaagagaagcctctgctgccgggtcaaactccagaagctgccaagacacactctgtagagactccctacggttccgtcacattcacagtttatggaacgccaaagcccaagcgaccggctatcctcacctaccacgacgtgggcttgaattacaaatcatgtttccagcccctatttcaatttgaggatatgcaggaaatcatccagaactttgtgcgggtgcatgtagacgcccctggaatggaggaaggagccccagtcttcccccttggatatcagtacccttctctcgaccagttagccgatatgatcccttgtgtcctgcaatatttgaattttagtaccataatcggcgtgggtgtaggagccggtgcctatattctggcacggtatgccttaaaccatcccgacacagttgaggggctggtttag

SEQ ID NO: 100686 - DNA, 675 bp, Artificial Sequence
  derived and/or modified sequence
atggccgagttacaagaggtgcaaattacagaagaaaagccactgctacctgggcaaacccctgaagcggctaagactcactctgtagaaacaccatacggctctgtaacttttacagtgtacgggaccccaaagcccaaacgtcccgctatccttacataccacgacgtgggcctcaattacaaaagctgttttcagcccctgttccaattcgaggatatgcaggagataattcagaacttcgttagagtgcatgttgacgcccctgggatggaggaaggcgctcctgtgttccctctgggctatcagtacccatccctggatcagctggccgacatgattccttgtgtactccagtacctcaatttctccactattatcggcgttggggtgggcgctggtgcttatattctggcgagatatgcactcaaccacccggacactgttgaggggctggtgctcattaatatcgacccaaatgccaaaggctggatggattgggcggctcacaagttaactgggctgacaagttctatacctgagatgatcctcggacacctcttctcccaggaggagctgtcaggaaactctgaactgatccaaaaatacagaaacatcattactcatgccccaaatttagataacattgagttgtactggaactcatacaactag

SEQ ID NO: 100687 - DNA, 453 bp, Artificial Sequence
  derived and/or modified sequence
atggctgaactgcaggaggtccaaatcaccgaagagaagcccctcctgccagggcagaccccagaggcagccaagacacatagcgtggaaaccccatacgggtccgtgactttcacagtttatgggaccccaaagcctaagcgtcctgcaatcttgacttaccacgatgttggactgaattacaaaagctgctttcagcctctatttcagttcgaagatatgcaagagatcatccagaatttcgttcgcgtacacgtagacgcacccggtatggaagaaggggctcctgtcttccctctcggttatcagtatccatcgctggatcagctagccgatatgatcccatgtgtgctccagtacctaaattttagtacgatcatcggagtgggcgtcggcgcaggcgcttatatactggccagatacgcactcaatcatccggatacagtcgaatag

SEQ ID NO: 100688 - DNA, 384 bp, Artificial Sequence
  derived and/or modified sequence
atggccgagcttcaggaagtccaaattaccgaggaaaagcccctcctgccaggccagaccccggaggccgctaaaacccactccgtggagactccatatggaagcgtaaccttcaccgtgtatggtactcctaagccaaaacgtcctgcaatcctgacgtatcacgacgtggggttgaattacaagagctgcttccagcccctgtttcaattcgaggacatgcaagaaattattcagaatttcgtccgggtgcacgttgatgcacctgggatggaggaaggagcccctgtctttcccctagggtaccagtatcccagcctggatcagctggccgacatgatcccatgcgttttacaatatttgaacttttcaacaataatctag

SEQ ID NO: 100689 - DNA, 450 bp, Artificial Sequence
  derived and/or modified sequence
atggctgagttgcaagaggtgcagatcactgaggaaaagcccttgctccctgggcaaaccccggaagccgctaagacccacagtgtcgagacaccttacggtagtgtgacatttacggtttatggcaccccaaagcctaagcgaccagcgatcctgacctatcacgatgttggactgaattacaaatcatgcttccagcccctgtttcagtttgaggacatgcaagagataattcagaacttcgtgcgtgttcatgttgacgcccctggaatggaggagggggcaccggtatttccactaggataccaatacccttcactcgaccaattagcagatatgatcccatgcgtactgcagtatcttaacttttctaccattatcggagtaggtgtcggagccggagcatacattcttgcgaggtacgccctgaaccacccagacaccgtgtag

SEQ ID NO: 100690 - protein, 360 aa, Artificial Sequence
  derived and/or modified sequence
MAELQEVQITEEKPLLPGQTPEAAKEAELAARILLDQGQTHSVETPYGSVTFTVYGTPKPKRPAILTYHDVGLNYKSCFQPLFQFEDMQEIIQNFVRVHVDAPGMEEGAPVFPLGYQYPSLDQLADMIPCVLQYLNFSTIIGVGVGAGAYILARYALNHPDTVEGLVLINIDPNAKGWMDWAAHKLTGLTSSIPEMILGHLFSQEELSGNSELIQKYRNIITHAPNLDNIELYWNSYNNRRDLNFERGGDITLRCPVMLVVECNSKLDPTQTSFLKMADSGGQPQLTQPGKLTEAFKYFLQGMGYMASSCMTRLSRSRTASLTSAASVDGNRSRSRTLSQSSESGTLSSGPPGHTMEVSC

SEQ ID NO: 100691 - protein, 173 aa, Artificial Sequence
  derived and/or modified sequence
MAELQEVQITEEKPLLPGQTPEAAKEAELAARILLDQGQTHSVETPYGSVTFTVYGTPKPKRPAILTYHDVGLNYKSCFQPLFQFEDMQEIIQNFVRVHVDAPGMEEGAPVFPLGYQYPSLDQLADMIPCVLQYLNFSTIIGVGVGAGAYILARYALNHPDTVEGLVLINIDP

SEQ ID NO: 100692 - protein, 252 aa, Artificial Sequence
  derived and/or modified sequence
MAELQEVQITEEKPLLPGQTPEAAKEAELAARILLDQGQTHSVETPYGSVTFTVYGTPKPKRPAILTYHDVGLNYKSCFQPLFQFEDMQEIIQNFVRVHVDAPGMEEGAPVFPLGYQYPSLDQLADMIPCVLQYLNFSTIIGVGVGAGAYILARYALNHPDTVEGLVLINIDPNAKGWMDWAAHKLTGLTSSIPEMILGHLFSQEELSGNSELIQKYRNIITHAPNLDNIELYWNSYNNRRDLNFERGGDIT

SEQ ID NO: 100693 - protein, 149 aa, Artificial Sequence
  derived and/or modified sequence
MAELQEVQITEEKPLLPGQTPEAAKEAELAARILLDQGQTHSVETPYGSVTFTVYGTPKPKRPAILTYHDVGLNYKSCFQPLFQFEDMQEIIQNFVRVHVDAPGMEEGAPVFPLGYQYPSLDQLADMIPCVLQYLNFSTIIGVGVGAGA

SEQ ID NO: 100694 - protein, 86 aa, Artificial Sequence
  derived and/or modified sequence
MAELQEVQITEEKPLLPGQTPEAAKEAELAARILLDQGQTHSVETPYGSVTFTVYGTPKPKRPAILTYHDVGLNYKSCFQPLFQFE

SEQ ID NO: 100695 - protein, 129 aa, Artificial Sequence
  derived and/or modified sequence
MAELQEVQITEEKPLLPGQTPEAAKEAELAARILLDQGQTHSVETPYGSVTFTVYGTPKPKRPAILTYHDVGLNYKSCFQPLFQFEDMQEIIQNFVRVHVDAPGMEEGAPVFPLGYQYPSLDQLADMIP

SEQ ID NO: 100696 - protein, 148 aa, Artificial Sequence
  derived and/or modified sequence
MAELQEVQITEEKPLLPGQTPEAAKEAELAARILLDQGQTHSVETPYGSVTFTVYGTPKPKRPAILTYHDVGLNYKSCFQPLFQFEDMQEIIQNFVRVHVDAPGMEEGAPVFPLGYQYPSLDQLADMIPCVLQYLNFSTIIGVGVGAG

SEQ ID NO: 100697 - protein, 194 aa, Artificial Sequence
  derived and/or modified sequence
MAELQEVQITEEKPLLPGQTPEAAKEAELAARILLDQGQTHSVETPYGSVTFTVYGTPKPKRPAILTYHDVGLNYKSCFQPLFQFEDMQEIIQNFVRVHVDAPGMEEGAPVFPLGYQYPSLDQLADMIPCVLQYLNFSTIIGVGVGAGAYILARYALNHPDTVEGLVLINIDPNAKGWMDWAAHKLTGLTSSIP

SEQ ID NO: 100698 - protein, 219 aa, Artificial Sequence
  derived and/or modified sequence
MAELQEVQITEEKPLLPGQTPEAAKEAELAARILLDQGQTHSVETPYGSVTFTVYGTPKPKRPAILTYHDVGLNYKSCFQPLFQFEDMQEIIQNFVRVHVDAPGMEEGAPVFPLGYQYPSLDQLADMIPCVLQYLNFSTIIGVGVGAGAYILARYALNHPDTVEGLVLINIDPNAKGWMDWAAHKLTGLTSSIPEMILGHLFSQEELSGNSELIQKYRN

SEQ ID NO: 100699 - protein, 141 aa, Artificial Sequence
  derived and/or modified sequence
MAELQEVQITEEKPLLPGQTPEAAKEAELAARILLDQGQTHSVETPYGSVTFTVYGTPKPKRPAILTYHDVGLNYKSCFQPLFQFEDMQEIIQNFVRVHVDAPGMEEGAPVFPLGYQYPSLDQLADMIPCVLQYLNFSTII

SEQ ID NO: 100700 - protein, 118 aa, Artificial Sequence
  derived and/or modified sequence
MAELQEVQITEEKPLLPGQTPEAAKEAELAARILLDQGQTHSVETPYGSVTFTVYGTPKPKRPAILTYHDVGLNYKSCFQPLFQFEDMQEIIQNFVRVHVDAPGMEEGAPVFPLGYQY

SEQ ID NO: 100701 - protein, 140 aa, Artificial Sequence
  derived and/or modified sequence
MAELQEVQITEEKPLLPGQTPEAAKEAELAARILLDQGQTHSVETPYGSVTFTVYGTPKPKRPAILTYHDVGLNYKSCFQPLFQFEDMQEIIQNFVRVHVDAPGMEEGAPVFPLGYQYPSLDQLADMIPCVLQYLNFSTI

SEQ ID NO: 100702 - DNA, 1083 bp, Artificial Sequence
  derived and/or modified sequence
atggccgagctgcaggaggtgcagatcaccgaggagaagcccctgctgcccggccagacccccgaggccgccaaggaggccgagctggccgccagaatcctgctggaccagggccagacccacagcgtggagaccccctacggcagcgtgaccttcaccgtgtacggcacccccaagcccaagagacccgccatcctgacctaccacgacgtgggcctgaactacaagagctgcttccagcccctgttccagttcgaggacatgcaggagatcatccagaacttcgtgagagtgcacgtggacgcccccggcatggaggagggcgcccccgtgttccccctgggctaccagtaccccagcctggaccagctggccgacatgatcccctgcgtgctgcagtacctgaacttcagcaccatcatcggcgtgggcgtgggcgccggcgcctacatcctggccagatacgccctgaaccaccccgacaccgtggagggcctggtgctgatcaacatcgaccccaacgccaagggctggatggactgggccgcccacaagctgaccggcctgaccagcagcatccccgagatgatcctgggccacctgttcagccaggaggagctgagcggcaacagcgagctgatccagaagtacagaaacatcatcacccacgcccccaacctggacaacatcgagctgtactggaacagctacaacaacagaagagacctgaacttcgagagaggcggcgacatcaccctgagatgccccgtgatgctggtggtggagtgcaacagcaagctggaccccacccagaccagcttcctgaagatggccgacagcggcggccagccccagctgacccagcccggcaagctgaccgaggccttcaagtacttcctgcagggcatgggctacatggccagcagctgcatgaccagactgagcagaagcagaaccgccagcctgaccagcgccgccagcgtggacggcaacagaagcagaagcagaaccctgagccagagcagcgagagcggcaccctgagcagcggcccccccggccacaccatggaggtgagctgctag

SEQ ID NO: 100703 - DNA, 1083 bp, Artificial Sequence
  derived and/or modified sequence
atggcagagctccaggaggtgcaaatcaccgaagagaagcccctactcccgggccagacccctgaggcagccaaggaggcagagctcgcagccagaatcctcctcgaccagggacagacacactccgtcgaaaccccgtatggatccgtgacgttcaccgtttatggtactcctaaacctaaaagacctgccatcctcacttaccatgatgtggggttgaattataagtcttgttttcaaccactttttcagttcgaggatatgcaggaaattatacaaaatttcgttcgggtccacgtggacgcccctgggatggaagagggagctccagtctttccacttggctaccagtacccgagcttggatcagctcgctgacatgataccctgtgtgctgcagtatctgaacttctccaccatcattggcgtcggcgtaggggcaggtgcttacatactggcccgttatgccttgaaccaccctgacacagttgagggattagtgttaattaacattgacccaaatgcaaagggatggatggactgggcagctcacaagctgacaggcctcaccagtagcatccctgaaatgatcctgggacacttattctcacaagaagagctgagcggcaactctgaactgattcagaagtaccggaacataatcactcacgcgcctaatctcgacaatatagaactgtactggaactcctacaataatcgcagggacctgaacttcgaacgaggtggggatattactctgcgatgcccggttatgctcgtggtggaatgcaacagcaaactggacccaacacagacctccttcttaaaaatggccgattctggggggcagcctcagctaactcagcctggcaagttgacagaggccttcaagtatttcctgcaggggatggggtacatggccagctcatgcatgacaagactatctagatcccgcacggcatctctcacatctgccgctagcgttgacggcaatagatcccggtcaagaacactttctcagtcatccgagtccggcacgttgagcagtggacctcctggccacacaatggaagtttcttgttag

SEQ ID NO: 100704 - DNA, 1083 bp, Artificial Sequence
  derived and/or modified sequence
atggccgagctgcaggaggtgcagatcacagaggagaagcccctgctgcccggccagaccccagaggccgccaaggaggccgagctggccgcccgcatcctgctggaccagggccagacccacagcgtggagaccccctacggctctgtgaccttcaccgtgtatggcacccccaagcccaagaggcctgccatcctgacctaccatgatgtgggcctgaactacaagagctgcttccagcccctcttccagtttgaggacatgcaggagatcatccagaactttgtgcgggtgcacgtggatgcccctggcatggaggagggcgcccctgtgttccccctgggctaccagtaccccagcctggaccagctggccgacatgatcccctgtgtgctgcagtacctgaacttcagcaccatcattggagtgggcgtgggcgctggggcctacatcctggcccgctatgccctgaaccacccagacacagtggagggcctggtgctgatcaacatcgaccccaatgccaagggctggatggactgggccgcccacaagctgaccggcctgaccagcagcatccctgagatgatcctgggccacctgttcagccaggaggagctgagcggcaacagcgagctgatccagaagtacagaaacatcatcacccacgcccccaacctggacaacatcgagctgtactggaacagctacaacaacagaagagacctgaactttgagcggggcggggacatcaccctgcgctgccctgtgatgctggtggtggagtgcaacagcaagctggaccccacccagaccagcttcctgaagatggctgacagcggcggccagccccagctgacccagcccgggaagctgacagaggccttcaagtacttcctgcagggcatgggctacatggccagcagctgcatgacccggctgagccgcagcaggacagccagcctgaccagcgctgcctctgtggatggcaacagaagccgcagcaggaccctgagccagagcagcgagagcggcaccctgagcagcggccccccaggccacaccatggaggtgtcctgctag

SEQ ID NO: 100705 - DNA, 1083 bp, Artificial Sequence
  derived and/or modified sequence
atggccgagctgcaggaggtgcagatcaccgaggagaagcccctgcttcccgggcaaacacccgaggccgcgaaggaagccgagctagccgcccgcatcctgttggatcaaggccagactcactccgtagagacaccttatggcagcgtgacttttactgtgtacggaacgcctaaaccgaaaagaccagcaatactaacgtaccacgatgtcggactaaactacaagtcatgtttccagccgttgttccagtttgaagatatgcaggaaatcatccagaacttcgtgagggtgcatgtcgacgcccccggcatggaggaaggagctcccgtgttccctctcgggtatcagtatcccagcctggatcagctcgcagacatgatcccctgcgtcctgcagtatctgaacttttcaactatcattggcgtgggggtgggagctggggcctacatactggcacgttacgccctgaatcatcctgataccgtggaaggcctggtccttatcaacatcgatcccaacgcgaaggggtggatggactgggcagcgcacaaactgacaggactgacttcctccattcctgagatgattttgggacacctgttctcacaggaggagctctcaggtaatagtgaactaattcagaagtacaggaatatcataacccacgcccccaacttagacaatattgaactgtactggaatagctacaacaacaggagagaccttaacttcgaacgcggaggcgatattaccctgcgatgccctgtgatgctggtggtcgaatgcaattccaagctcgaccccacccaaactagcttcctgaaaatggctgactccggcggtcagccccaactcactcagcctggaaaattgacagaagcctttaagtattttctgcagggcatggggtatatggcatcaagctgcatgaccaggctgtcaagaagtcggacggccagcctaacctcagcggcgagcgtggacggtaacagaagtcgaagcagaacgctttctcaatcttcagaatcgggtacactatcctccgggccccccgggcacactatggaggtcagctgctag

SEQ ID NO: 100706 - DNA, 2084 bp, Artificial Sequence
  derived and/or modified sequence
attgaccccagagtccctgttggccatcctctccccaccccccgcctgcccgcgatcgccctctatttatagcggccccccgcattccccgcccccacctccccgccttgttgtccaacttctcccggagcagccggagagcaggcgtcgggacgcagcaaagagaggagaggccaccatggcggagctgcaggaggtgcagatcacagaggagaagccactgttgccaggacagacgcctgaggcggccaaggaggctgagttagctgcccgaatcctcctggaccagggacagactcactctgtggagacaccatacggctctgtcactttcactgtctatggcacccccaaacccaaacgcccagcgatccttacctaccacgatgtgggactcaactataaatcttgcttccagccactgtttcagttcgaggacatgcaggaaatcattcagaactttgtgcgggttcatgtggatgcccctggaatggaagagggagcccctgtgttccctttgggatatcagtacccatctctggaccagcttgcagacatgatcccttgcgtcctgcagtacctaaatttctctacaataattggagttggtgttggagctggagcctacatcctggcgagatatgctcttaaccacccggacactgttgaaggtcttgtcctcatcaacattgatcccaatgccaagggttggatggattgggcagcccacaagctaacaggcctcacctcttccattccggagatgatccttggacatcttttcagccaggaagagctctctggaaattctgagttgatacaaaagtacagaaatatcattacacatgcacccaacctggataacattgaattgtactggaacagctacaacaaccgccgagacctgaactttgagcgtggaggtgatatcaccctcaggtgtcctgtgatgctggtggtggaatgtaactcaaaactggaccccacccagacctcgttcctcaagatggctgactccggaggtcagccccagctgactcagccaggcaagctgaccgaggccttcaagtacttcctgcaaggcatgggctacatggcctcatcctgcatgactcgcctgtcccggtctcgtacagcctctctgaccagtgcagcatccgttgatggcaaccggtcccgctctcgcaccctgtcccagagcagcgagtctggaactctttcttcggggcccccggggcacaccatggaggtctcctgttgaatggcccttgttgccctagagtgggacccagccctcacctcccccagagctaacctgggaggtgctgaaggggcattgggccaccgtaagcaagggaaaaagggcagatcatgcggggagatgaccttgatctttgattgctaccctaaccttgacctttaacccgtgattccccccagctcctggaagagatgtcctaatatctcttagggacccagacccctaaattctcctcctcccccattttgatgttaaggtggagagggcatatgcatcctctgtcctgatctaggtgtctatagctgaggggtaagaggttgttgtagttgtcctggtgcctccatcagactctccctacttgtcccatatttgcaaggggaggggatttggggctggggctccattcaccaaagctgaggtggcttctcattaaccctttaggactctgaagggtatggacctacgtgaatgtgtgtcagggggagacttgctggtgggttagtggtcctcaggatgtgatagaaacatccagtgtaaaaaggaagttggaatgggagttggcgggcagtgaacgagtgtggggaaggattggtgctggggcaacaggaaggggcctggggccgtttggctgcactaactttggtagctcagtgtgcatctagagtgggactggggagggagctaagcttgggctgggctgcttggggcttggcatagggtggaaagggctaccctggggctctgaccacactgtagtatgtgtggagggtgccctcccgtctcccacaacttctgctataacaataaactgtagaggaatctg

SEQ ID NO: 100707 - DNA, 1083 bp, Artificial Sequence
  derived and/or modified sequence
atggcagaactgcaagaagtgcagataactgaagagaagcccttattaccaggacaaactcctgaggccgctaaagaggcggagctcgccgctcggatcttactcgatcaaggacaaacccacagcgtagaaactccttacggatcagtcacatttaccgtttatggaactcctaagcctaagagaccggcaattctgacgtatcacgatgtcggtctgaattataagtcttgttttcagccactgttccaatttgaggatatgcaggaaatcatccagaacttcgtgcgggtacacgtggatgcgccaggcatggaggaaggcgcacccgtgtttcctctgggataccagtaccccagcttagatcagttggccgacatgataccctgtgtgctacagtatctgaatttctccacaatcattggagttggtgtaggtgcaggggcatatattctggctaggtatgctctaaaccatcctgataccgtggagggcctggtgctgatcaacatcgatcctaatgccaaaggctggatggactgggcggctcacaaactcaccggactgacctccagcatccccgagatgatcctgggacacttgttctcccaggaagagctctcgggaaactccgagctgattcaaaaatatcgcaacattattacgcacgcacctaacctcgataacatcgaactctattggaactcatataataaccgcagagacctgaactttgagagagggggagacattactctgcggtgcccagttatgctggtggtggagtgtaattctaagttagatcccacacagacttcttttctgaagatggccgactctggtggtcagccccagctgacacagccaggcaaactaaccgaagcctttaagtatttcctacaaggaatgggctacatggcttcttcttgtatgacacggctcagtagatcccgcactgcgtccttgacatcagctgcatctgtcgacggcaatcgcagcaggtcccgcacgctttctcagagctccgaaagtggaaccctgagctctggccctcctggacatactatggaggtgagctgctag

SEQ ID NO: 100708 - DNA, 1110 bp, Artificial Sequence
  derived and/or modified sequence
atgcacagcctgggctgcttcagagacagaaacaagctgctgcaggacctgctgagcgaggaggagaaccaggagaagatgatctacttcctgctgctggacagaaaggagagataccccagccaggaggacgaggacctgccccccagaaacgagatcgacccccccagaaagagagtggacagccccatgctgaacagacacggcaagagaagacccgagagaaagagcatggaggtgctgagcgtgaccgacggcggcagccccgtgcccgccagaagagccatcgagatggcccagcacggccagagaagcagaagcatcagcggcgccagcagcggcctgagcaccagccccctgagcagccccagagtgaccccccaccccagccccagaggcagccccctgcccacccccaagggcacccccgtgcacacccccaaggagagccccgccggcacccccaaccccaccccccccagcagccccagcgtgggcggcgtgccctggagagccagactgaacagcatcaagaacagcttcctgggcagccccagattccacagaagaaagctgcaggtgcccacccccgaggagatgagcaacctgacccccgagagcagccccgagctggccaagaagagctggttcggcaacttcatcagcctggagaaggaggagcagatcttcgtggtgatcaaggacaagcccctgagcagcatcaaggccgacatcgtgcacgccttcctgagcatccccagcctgagccacagcgtgatcagccagaccagcttcagagccgagtacaaggccaccggcggccccgccgtgttccagaagcccgtgaagttccaggtggacatcacctacaccgagggcggcgaggcccagaaggagaacggcatctacagcgtgaccttcaccctgctgagcggccccagcagaagattcaagagagtggtggagaccatccaggcccagctgctgagcacccacgacccccccgccgcccagcacctgagcgagccccccccccccgcccccggcctgagctggggcgccggcctgaagggccagaaggtggccaccagctacgagagcagcctgtag

SEQ ID NO: 100709 - DNA, 1110 bp, Artificial Sequence
  derived and/or modified sequence
atgcacagtctgggatgcttcagagatcggaacaagttgttgcaggatttgctgtctgaagaggagaaccaggaaaagatgatttattttcttctcctggatcggaaagaacgatatccttctcaggaggatgaggatctgcccccacggaacgagattgaccccccgaggaaacgcgtggactcacctatgctgaaccgccacggtaagagacgtcccgagcgcaagtccatggaagtgctgtcagtaacagacggggggtctcccgtcccagctaggagagctatcgaaatggcccagcatggccagcgctcacggagcatcagtggcgcgtcatcagggcttagcacttcacccctatcatctccccgagtcacaccccatcccagcccaagaggcagtcctctgcccacccctaaaggaacccccgtccacactccaaaggagtctccagctggcacccccaatccaactccccctagcagcccaagtgtcggaggggtcccatggcgcgctcggttgaatagcattaagaatagcttcctcgggtcccctcgatttcatcgtcgcaagctgcaagtacctactcccgaagagatgtcgaatctcacgcccgaatcatcccctgaattggctaagaagtcctggttcggaaactttatttccctggaaaaagaagagcagatttttgtggtgatcaaggataagcctctgagttccatcaaagccgatatagtccacgcgtttctttccataccctctcttagccacagcgtgatcagccaaacatcctttcgggccgagtataaagccaccggcgggccagcagtatttcagaaaccggtcaagttccaggtcgatattacgtacaccgagggcggtgaggctcagaaggagaacgggatttactcagtgactttcacgttgctgagtgggccctcaaggaggtttaagagagttgtcgaaaccatccaagcccagctcctgtctacacacgatcctcctgctgcacagcacctcagcgagcctcctccgccggccccaggcctctcctggggcgctggtctcaagggccaaaaagtcgctacttcttatgagtctagcctttag

SEQ ID NO: 100710 - DNA, 1110 bp, Artificial Sequence
  derived and/or modified sequence
atgcacagcctgggctgcttccgggacaggaacaagctgctgcaggacctgctgtctgaggaggagaaccaggagaagatgatctacttcctgctgctggacaggaaggagcgctaccccagccaggaggatgaggacctgcccccaagaaatgaaattgatcctcccaggaagagggtggacagccccatgctgaacagacatggcaagagaagacctgagaggaagtccatggaggtgctgtctgtgacagatggcggcagccctgtgcctgcccggcgggccatcgagatggcccagcacggccagaggagccgcagcatcagcggggccagcagcggcctgagcaccagccccctgagcagcccccgggtgaccccccaccccagcccccggggcagccccctgcccacccccaagggcacccctgtgcacacccccaaggagagccctgctggcacccccaaccccaccccacccagcagccccagcgtgggcggcgtgccctggagggcccggctgaacagcatcaagaacagcttcctgggcagcccccgcttccacaggaggaagctgcaggtgcccaccccagaggagatgagcaacctgaccccagagagcagccctgagctggccaagaagtcctggtttggaaacttcatcagcctggagaaggaggagcagatctttgtggtgatcaaggacaagcccctgagcagcatcaaggctgacatcgtgcacgccttcctgagcatccccagcctgagccacagcgtcatcagccagaccagcttccgggcagagtacaaggccaccggcggccctgctgtgttccagaagcctgtgaagttccaggtggacatcacctacacagaaggaggagaggcccagaaggaaaatggcatctacagcgtgaccttcaccctgctgagcggccccagccgccgcttcaagagggtggtggagaccatccaggcccagctgctgagcacccatgaccccccagctgcccagcacctgtctgagcccccacctccagcccctggcctgtcctggggcgccggcctgaagggccagaaggtggccaccagctatgagagcagcctgtag

SEQ ID NO: 100711 - DNA, 1110 bp, Artificial Sequence
  derived and/or modified sequence
atgcacagcctgggctgcttccgggaccggaacaagctgctgcaggacctgcttagtgaggaagagaaccaggagaagatgatctattttctactgctggatcgaaaagaaagataccctagccaggaggatgaggacctgcctccaaggaacgagatcgatccacctcgcaagcgcgtggatagcccaatgctgaaccggcacggaaagcgcaggccagaacgcaagagcatggaggtactgagcgtgacagacggagggagccctgtgcctgcacggcgcgccattgaaatggctcaacatgggcaaaggagccgctcaatatctggcgcgtcatcaggcctcagtacgtccccgctcagctccccccgcgtcaccccccacccaagtcctcgcggctcccctcttcccacccctaaagggacaccagtgcacacccctaaggaatctcctgcgggcacgccaaacccgactccacccagcagccccagcgtggggggagtgccatggcgggccaggctgaactctatcaaaaatagctttctcggatcccccagattccacaggcgaaagctccaagttcctacccctgaggagatgagcaatctcacccccgagtcctcaccggaattggctaaaaaatcgtggttcggcaatttcatcagcctcgaaaaagaggagcagatcttcgtggtcataaaagacaagccattgtccagcatcaaagccgatattgttcatgcattcctgtcgattcccagcctcagtcacagtgttatatctcagacttcattcagggccgagtacaaagcaaccggaggaccagcagtatttcagaaaccggtgaagttccaggtcgatatcacatatactgagggtggagaggcccagaaggagaacgggatctattctgttacctttaccttattgtctggaccttcaagaagattcaaaagagttgtagaaacaattcaagcccagctcctcagtacccacgacccccccgcagctcagcatctttctgagccccctcctcctgcccctggactgtcatggggcgcgggactgaagggccagaaggttgctacctcttatgaatcatcactctag

SEQ ID NO: 100712 - DNA, 1110 bp, Artificial Sequence
  derived and/or modified sequence
atgcacagtctcggttgctttagggacaggaacaaactgctacaagatcttctctccgaagaggagaaccaagaaaaaatgatctattttctgctcctggatcgtaaagaacgctacccgtcccaggaagatgaagacctgcctcccaggaacgaaattgatccacctcggaaacgggtcgatagtccgatgctcaatcgacacgggaaaagacgcccagaacgcaagagtatggaggtgctatccgttactgacgggggatcccccgtccctgctcgtcgggcaattgagatggcacagcatggtcagcgcagtcgcagcattagcggcgcaagttccggcctgtctacttcacctctaagcagtccgagagttactccacacccctccccaagaggctcgccactgccaacaccaaaagggactccagtgcacacaccaaaagaatcacccgcaggcactcctaatcccactcccccttcatcaccttctgttggcggagtgccatggagggccaggctgaactctatcaagaactctttcttaggatcccctcggttccaccgcaggaagctccaggtccccacaccagaggagatgtccaacctgacccccgagtcatctcccgagctcgctaaaaagtcctggttcggtaattttatttcactggaaaaagaggagcagatttttgtggtaataaaggacaagcccctttcctccatcaaggctgacattgtgcacgccttcttgagtattccatcacttagccactccgtgatcagccagacgagctttagagccgagtacaaagctaccggcggacccgctgtatttcagaagcccgtaaaatttcaagtagatatcacttacacagagggcggtgaagctcagaaggagaatggtatctacagcgtgacctttactcttttaagcggtccctcccgaaggttcaagagggtcgttgaaacgattcaagcacaactgctgagcacccacgatccacccgcagcacagcatctgtccgagccacctccaccagctccaggactctcctggggcgcaggtctgaagggccagaaagtcgcaacctcctatgagtccagcttatag

SEQ ID NO: 100713 - protein, 1422 aa, Artificial Sequence
  derived and/or modified sequence
MDPSMGVNSVTISVEGMTCNSCVWTIEQQIGKVNGVHHIKVSLEEKNATIIYDPKLQTPKTLQEAIDDMGFDAVIHNPDPLPVLTDTLFLTVTASLTLPWDHIQSTLLKTKGVTDIKIYPQKRTVAVTIIPSIVNANQIKELVPELSLDTGTLEKKSGACEDHSMAQAGEVVLKMKVEGMTCHSCTSTIEGKIGKLQGVQRIKVSLDNQEATIVYQPHLISVEEMKKQIEAMGFPAFVKKQPKYLKLGAIDVERLKNTPVKSSEGSQQRSPSYTNDSTATFIIDGMHCKSCVSNIESTLSALQYVSSIVVSLENRSAIVKYNASSVTPESLRKAIEAVSPGLYRVSITSEVESTSNSPSSSSLQKIPLNVVSQPLTQETVINIDGMTCNSCVQSIEGVISKKPGVKSIRVSLANSNGTVEYDPLLTSPETLRGAIEDMGFDATLSDTNEPLVVIAQPSSEMPLLTSTNEFYTKGMTPVQDKEEGKNSSKCYIQVTGMTCASCVANIERNLRREEGIYSILVALMAGKAEVRYNPAVIQPPMIAEFIRELGFGATVIENADEGDGVLELVVRGMTCASCVHKIESSLTKHRGILYCSVALATNKAHIKYDPEIIGPRDIIHTIESLGFEASLVKKDRSASHLDHKREIRQWRRSFLVSLFFCIPVMGLMIYMMVMDHHFATLHHNQNMSKEEMINLHSSMFLERQILPGLSVMNLLSFLLCVPVQGKTSEALAKLISLQATEATIVTLDSDNILLSEEQVDVELVQRGDIIKVVPGGKFPVDGRVIEGHSMVDESLITGEAMPVAKKPGSTVIAGSINQNGSLLICATHVGADTTLSQIVKLVEEAQTSKAPIQQFADKLSGYFVPFIVFVSIATLLVWIVIGFLNFEIVETYFPGYNRSISRTETIIRFAFQASITVLCIACPCSLGLATPTAVMVGTGVGAQNGILIKGGEPLEMAHKVKVVVFDKTGTITHGTPVVNQVKVLTESNRISHHKILAIVGTAESNSEHPLGTAITKYCKQELDTETLGTCIDFQVVPGCGISCKVTNIEGLLHKNNWNIEDNNIKNASLVQIDASNEQSSTSSSMIIDAQISNALNAQQYKVLIGNREWMIRNGLVINNDVNDFMTEHERKGRTAVLVAVDDELCGLIAIADTVKPEAELAIHILKSMGLEVVLMTGDNSKTARSIASQVGITKVFAEVLPSHKVAKVKQLQEEGKRVAMVGDGINDSPALAMANVGIAIGTGTDVAIEAADVVLIRNDLLDVVASIDLSRETVKRIRINFVFALIYNLVGIPIAAGVFMPIGLVLQPWMGSAAMAASSVSVVLSSLFLKLYRKPTYESYELPARSQIGQKSPSEISVHVGIDDTSRNSPKLGLLDRIVNYSRASINSLLSDKRSLNSVVTSEPDKHSLLVGDFREDDDTAL

SEQ ID NO: 100714 - protein, 503 aa, Artificial Sequence
  derived and/or modified sequence
MDPSMGVNSVTISVEGMTCNSCVWTIEQQIGKVNGVHHIKVKVVVFDKTGTITHGTPVVNQVKVLTESNRISHHKILAIVGTAESNSEHPLGTAITKYCKQELDTETLGTCIDFQVVPGCGISCKVTNIEGLLHKNNWNIEDNNIKNASLVQIDASNEQSSTSSSMIIDAQISNALNAQQYKVLIGNREWMIRNGLVINNDVNDFMTEHERKGRTAVLVAVDDELCGLIAIADTVKPEAELAIHILKSMGLEVVLMTGDNSKTARSIASQVGITKVFAEVLPSHKVAKVKQLQEEGKRVAMVGDGINDSPALAMANVGIAIGTGTDVAIEAADVVLIRNDLLDVVASIDLSRETVKRIRINFVFALIYNLVGIPIAAGVFMPIGLVLQPWMGSAAMAASSVSVVLSSLFLKLYRKPTYESYELPARSQIGQKSPSEISVHVGIDDTSRNSPKLGLLDRIVNYSRASINSLLSDKRSLNSVVTSEPDKHSLLVGDFREDDDTAL

SEQ ID NO: 100715 - protein, 682 aa, Artificial Sequence
  derived and/or modified sequence
RNQECNEEIKMDPSMGVNSVTISVEGMTCNSCVWTIEQQIGKVNGVHHIKVSLEEKNATIIYDPKLQTPKTLQEAIDDMGFDAVIHNPDPLPVLTDTLFLTVTASLTLPWDHIQSTLLKTKGVTDIKIYPQKRTVAVTIIPSIVNANQIKELVPELSLDTGTLEKKSGACEDHSMAQAGEVVLKMKVEGMTCHSCTSTIEGKIGKLQGVQRIKVSLDNQEATIVYQPHLISVEEMKKQIEAMGFPAFVKKQPKYLKLGAIDVERLKNTPVKSSEGSQQRSPSYTNDSTATFIIDGMHCKSCVSNIESTLSALQYVSSIVVSLENRSAIVKYNASSVTPESLRKAIEAVSPGLYRVSITSEVESTSNSPSSSSLQKIPLNVVSQPLTQETVINIDGMTCNSCVQSIEGVISKKPGVKSIRVSLANSNGTVEYDPLLTSPETLRGAIEDMGFDATLSDTNEPLVVIAQPSSEMPLLTSTNEFYTKGMTPVQDKEEGKNSSKCYIQVTGMTCASCVANIERNLRREEGIYSILVALMAGKAEVRYNPAVIQPPMIAEFIRELGFGATVIENADEGDGVLELVVRGMTCASCVHKIESSLTKHRGILYCSVALATNKAHIKYDPEIIGPRDIIHTIEVSAKNLCFCVLTYLISTPVNHFWFASDRGNEKKSNSFEHFKQDLSQNLM

SEQ ID NO: 100716 - protein, 274 aa, Artificial Sequence [sequence omitted]

SEQ ID NO: 100717 - DNA, 4269 bp, Artificial Sequence
  derived and/or modified sequence
atggacccttccatgggcgtaaacagcgttaccatttccgtcgaaggaatgacctgtaacagttgtgtctggacaatcgaacagcagattgggaaggtgaacggagtgcaccacattaaagttagcctcgaagagaagaatgctactatcatttatgaccccaagttacagacccccaagacgctgcaagaagcaatcgacgatatgggcttcgacgctgtgatccataacccggatccactgccagtgttaactgacacactgtttttaacggttacggctagcctgacacttccctgggaccacatacagagcacacttttgaaaactaaaggggtgacagacatcaaaatatacccccagaagagaaccgtggctgtgactatcatcccgtccattgtcaatgctaaccaaataaaggagctcgtgccagagctcagtctggacaccggcacactggaaaaaaaatcaggtgcctgtgaggatcattctatggctcaggcgggagaagtggtcctaaaaatgaaggtggagggcatgacgtgccactcctgcaccagcactattgaaggaaagatcggcaaacttcagggagttcagcggatcaaggtctcactcgacaaccaggaggccacaatagtgtatcagcctcacttgattagcgtcgaagaaatgaagaagcaaattgaagctatggggttccccgcctttgtcaaaaaacagcctaaatacttaaagctgggcgccatcgacgtcgagcgcctcaagaacacccccgtcaagtcgagcgagggctctcagcagcgttctccatcatacacaaatgattcgaccgcaactttcattatcgacggcatgcactgtaagtcatgtgttagcaacattgagtccacactgtcagcactgcagtacgtgtcctccattgtggtgtccctggaaaacagaagcgctattgttaagtacaacgcaagcagtgtcacaccagagagtctccgaaaggctattgaggcagtaagccctggtttatacagggtgagcataacctccgaagttgaaagcacttctaactccccttccagctcatctcttcagaagatccctctcaacgtcgtcagtcagcccctgacacaagaaactgttatcaacatcgacggtatgacttgcaatagttgcgtccaaagcattgaaggagtgattagcaaaaagccgggagtgaaaagtattcgcgtctcactcgctaattccaatggaacagtggaatatgatcccctgctgacctcccccgagaccctcaggggcgctatcgaggacatgggcttcgacgccaccttgtccgatactaatgagccactggtggtcatcgcccagcccagttcagaaatgcccctgctaactagcacaaatgagttttatacgaagggtatgacacctgtacaggacaaagaagaaggaaaaaattcatcaaagtgttatatccaggttaccggaatgacatgcgcatcttgcgtagctaatatcgagaggaatttacgaagagaagaaggcatctacagtatcctggtcgccttgatggccggcaaggcagaggtgcgatataatcctgcagttatccagccccccatgatcgcagaatttatcagggaacttggattcggtgccaccgtgattgaaaatgcagatgaaggtgacggggtgctggagctggtggtcagagggatgacatgcgccagttgcgtgcacaaaattgaatctagcctgaccaagcatcgtggcatcttgtactgttccgttgcgctcgccaccaacaaggcgcacatcaaatacgacccagaaattatcggacctagagatatcatacatactattgagagcttaggatttgaagcaagcctggtcaaaaaagatcgttctgcgagccaccttgatcacaagagggagatcaggcagtggcgccggagtttcctggtgtctctttttttttgtatccctgtgatgggccttatgatatacatgatggtcatggaccatcacttcgcaacactgcatcataatcagaacatgagcaaggaggagatgataaatcttcactcatccatgttccttgaacggcaaattttaccaggcctcagcgtcatgaatctattatcctttctcctgtgcgttccagtccagggaaagacttccgaggctcttgctaaactgatctcgctacaagcaaccgaggctaccattgtaaccctggactcagacaacatactgctgagcgaagagcaggtggacgttgagcttgtacagcgtggggatataattaaggtggtgcctggagggaagtttccagtggacggtcgggtgattgagggccattccatggtggatgaatcccttataacaggggaggcaatgcctgtcgcaaagaaaccggggtcaactgtcattgcaggctccatcaaccagaacggttccttgcttatttgcgcgacacacgtgggtgccgatacaactctgtcgcagatcgttaagctcgtggaggaggcgcagacctctaaggctcccatacaacagttcgctgataagctgtccggatattttgtgcccttcattgtcttcgtttcaattgctaccctcctggtctggattgtgattggtttcctgaactttgaaatcgtagaaacttacttccccgggtataatagaagtataagtcggacggagaccattattagatttgcctttcaagccagcatcaccgtgctttgcatcgcatgcccatgctcactgggcctcgctacccccaccgcggtaatggtgggtacaggagtgggtgctcagaatggtattctgattaagggaggggagcccctggagatggcccacaaggtgaaggtcgtggtgtttgacaaaactggcaccatcacccatggcacacccgtagtcaatcaagtgaaggtgctaacagaatccaatagaattagtcaccacaagatcctggccattgtggggactgccgaatctaactctgaacatccgctcggcacggctattaccaagtactgtaagcaggaattagatacagagaccctgggtacctgcatcgattttcaggtcgtcccaggatgcggcattagttgcaaagtgaccaatatcgagggcttgctacacaaaaataattggaatattgaagataacaacatcaagaacgcctcactcgtgcagatagacgcatccaacgagcagagctctaccagctccagtatgatcattgacgctcaaatctcgaatgctctcaacgcccagcagtacaaggttctgatcgggaaccgggaatggatgattaggaatgggcttgtcattaataacgacgtaaacgacttcatgacagagcatgagcggaagggccgcaccgcagtgctggttgccgtggacgatgagttatgcgggctgatagcgatcgccgatactgtgaagcctgaggctgagctggctatccatattcttaagtccatgggactggaggtggttctgatgaccggagataacagtaagactgctcgatcaatagccagccaggtgggcatcactaaggtctttgcggaggtgctgccaagccataaggtcgctaaggtcaagcagctccaagaggagggtaagagggtcgccatggtaggtgatgggatcaacgactctcctgcgctggccatggctaatgtcggtatcgctattgggaccgggacggacgtcgctatcgaggccgccgacgtggttctaatcaggaacgatctgcttgacgtagtagcttccatcgacctctcccgggagacagtgaagcgcattcgtattaatttcgtgttcgctttaatttacaaccttgtgggaataccaatcgctgccggagtttttatgccaattggcttagtgctgcaaccatggatgggctccgcagctatggctgcctcttccgtgtctgtcgtactgtcctcgctgtttttgaagctctacagaaaacctacctacgaatcttacgaattgccagcacgttcacaaatcgggcagaagagcccctccgagatctctgtgcatgtcggcatcgacgatacaagccgcaattcccctaaacttggactgctcgatcgcatcgtgaactacagtagagcttccatcaatagcctgctttcagataagaggtccttgaacagcgtcgtcacttctgagccggataagcactctttgctggttggcgattttcgggaggacgacgatactgctctgtag

SEQ ID NO: 100718 - DNA, 264 bp, Artificial Sequence
  derived and/or modified sequence
gaatgtaatgaggagatcaaaatggacccttcaatgggcgtcaattcagtcacaatctccgtggagggcatgacctgcaattcttgtgtgtggaccatcgaacagcagatcgggaaggttaacggagtgcaccatatcaaagtgtcactggaggaaaagaatgccacaattatcttttatgcgcattggttcggctttgccgcacttgacggcatttgctcaaatggctgtttcatttgcttttgcagtacttttttcagctag

SEQ ID NO: 100719 - DNA, 1512 bp, Artificial Sequence
  derived and/or modified sequence
atggaccccagtatgggagtcaatagcgtcactatctcggtcgaagggatgacctgcaatagttgtgtgtggacaatagaacaacagattgggaaggttaacggggtgcaccacatcaaggtcaaggtcgtggtgttcgataaaacaggtacaatcacgcacggaacccccgtcgttaatcaggtaaaggtcctgactgagtcgaacaggattagccatcacaaaattcttgcaattgtgggcaccgccgagagtaacagcgaacacccgctcggaaccgcgatcaccaagtactgcaaacaggaacttgacactgagacactcgggacatgtatcgatttccaagtcgtaccgggatgtgggatctcctgtaaagtaacaaacatagagggtctgctgcataaaaataattggaatattgaggacaacaatatcaaaaatgcctctctcgtgcagatcgacgcctccaatgaacagagttccacctcttcctctatgatcatcgatgcccagatcagtaacgctctcaacgcgcagcaatataaggttcttataggcaacagggagtggatgattcggaatgggctggtaattaacaacgacgtcaatgattttatgacggagcatgaacgaaagggcaggaccgccgtacttgtggctgtggacgatgaactctgcggtctgatagccattgccgataccgttaagcctgaagcagagctcgcaatccatatactgaaatcgatgggcctggaggtggttctgatgacaggcgacaactctaaaacagccaggagcatcgcttcccaggtcggaatcactaaggtcttcgccgaggtgcttccttctcacaaagtcgccaaggtcaaacagctccaagaggagggcaagcgggtggcaatggtaggagacggtatcaatgatagcccggccctggctatggccaatgtgggcatcgctatagggacaggcaccgacgtggctattgaagctgccgacgtggtgctcattcggaatgatcttctcgatgtggtcgcttctatcgacctgtcgcgggaaaccgtgaaacggataagaattaattttgtctttgccctcatttataacttggtcgggatcccaatcgccgctggggtctttatgcctattgggctggtgctccaaccttggatgggatcagcagcaatggccgccagttccgtttcagtcgtcctctccagcctcttcttgaaactatatagaaaaccaacctacgaatcctatgagctccccgccagatctcaaattggccagaagagtccgtccgaaatcagcgtgcatgtggggatagacgacacatccaggaactcaccgaagctgggcctcttggacaggatcgttaactactcacgagccagcatcaactctctgctttctgataaacgcagcctgaattctgtcgtaactagcgaaccagataaacactcattgttggttggcgactttagagaggacgacgatactgcattgtag

SEQ ID NO: 100720 - DNA, 2049 bp, Artificial Sequence
  derived and/or modified sequence
cgtaaccaggagtgcaacgaggagatcaagatggatccttcgatgggagtgaactccgttacaattagtgtagaaggcatgacctgtaatagctgcgtctggacaattgagcagcagatcggcaaagtcaacggcgttcaccacatcaaagtctcactggaagagaagaatgctaccataatttacgaccctaagctgcagacccctaaaacactacaggaagccattgacgatatgggattcgatgcggttattcacaatcctgatcctcttcctgtgttgacggacacacttttccttacagttactgcctccctcacactgccgtgggaccacatccagtccaccctgctaaagacgaaaggagtcacagacatcaagatttacccccagaagcgcaccgttgctgtgaccatcataccgtcaatagtcaacgcaaaccagatcaaggagctggttcctgagctctctctggatacaggcactctggaaaaaaaatctggagcatgcgaggaccactctatggcacaggctggggaagtggtcctgaagatgaaagttgaaggcatgacctgccatagctgcacttccaccatcgagggcaagatcgggaagctccagggcgtccagagaattaaagtttctctcgacaatcaggaagccacaattgtctatcagcctcaccttataagtgtggaggagatgaaaaaacagattgaggccatgggttttcccgcatttgtcaagaaacagcccaaatatctcaagctgggcgccattgacgtagaaaggcttaagaatactccagtgaagagttcagaaggctcccaacaacgatctccctcttacacgaatgatagtaccgccactttcatcatagacggcatgcattgtaaatcttgcgtgagcaacatcgagtcgacgctttccgccctgcagtacgtgagtagtattgtggtgtccctggaaaaccggagtgcgatcgttaaatacaatgcatcatctgtgacacctgaatctctaaggaaggccatagaggctgtcagtccgggactatatcgtgtctccattacctccgaagtggaatccaccagtaactcaccatcgagctcaagcttacaaaaaattcccctgaacgtcgtgagtcagccactgacgcaagagacagtaataaacattgacggcatgacatgtaactcctgcgtgcagtctatagaaggggtgatctccaaaaaacccggcgtcaagtccatacgggtcagcctggctaactccaacggaaccgtcgagtatgaccctctgctaacaagccccgaaactttacgaggggcaattgaggacatgggatttgacgccaccctgagcgataccaacgagccactcgttgtaattgcccaaccctcctctgagatgccattacttacgtcgaccaatgaattctacacaaaagggatgacccccgtccaggacaaggaggaaggtaaaaactcttccaaatgttatatccaggtcaccggcatgacttgtgcttcctgcgtggccaacatcgaacgaaacctgaggcgagaggagggaatttattccatcctggtggccctcatggctggcaaagctgaggtgagatataaccccgcggtgatccagcctccgatgattgcggagtttattagagaacttgggttcggggcgacggtgatcgaaaatgctgatgagggggacggtgtactggagttggttgtcagggggatgacatgcgcctcatgtgtccataagattgagagctcattaaccaaacaccgaggtatcctttattgctcagtcgcactggctactaacaaagctcatatcaaatacgaccctgagatcattggacctcgcgatattatacataccattgaagtgtctgccaagaacttgtgcttctgtgtactcacctaccttatttctacgccagtcaaccacttttggtttgcaagtgaccggggaaatgagaaaaagtcaaatagcttcgagcatttcaagcaggacctaagtcagaacctgatgtag

SEQ ID NO: 100721 - DNA, 825 bp, Artificial Sequence
  derived and/or modified sequence
atggatccgagtatgggcgtgaatagtgtgacgatcagcgtggagggtatgacgtgcaacagctgcgtttggacaattgaacaacagattggtaaggttaacggcgtacatcatattaaggtctctctggaagagaaaaacgcgactatcatatatgatccaaagttacaaacccccaagacactgcaagaggccattgatgatatggggtttgatgccgtgatccataacccagatcctctcccagtactaacagacacactgttccttaccgtgaccgccagtctgacactaccgtgggaccatattcagtctacgcttcttaagactaaaggggtgacagatattaaaatttacccccagaagcggaccgtggccgtcaccataatccccagtattgtgaatgccaaccaaattaaggagctggtgcctgagttaagtctcgataccggaacccttgagaaaaaatcaggggcctgcgaggatcattcaatggctcaggctggagaggttgtgctaaaaatgaaagtggaaggcatgacctgtcattcatgcacctctacaattgaagggaagattggtaagctccaaggagtgcagaggattaaagtgagcctggacaatcaggaggcaactattgtctaccagccccacctgatctcagtggaggaaatgaagaagcaaatcgaggctatggggtttccggccttcgtaaagaagcaaccaaagtacttaaaactgggagcaatcgatgtcgaaaggctgaagaataccccggttaagtccagtgagggatcacagcaaagatccccttcctaccaatag

SEQ ID NO: 100722 - DNA, 4269 bp, Artificial Sequence
  derived and/or modified sequence
atggaccccagcatgggcgtgaacagcgtgaccatctctgtggagggcatgacctgcaacagctgtgtgtggaccatcgagcagcagatcggcaaggtgaatggagtgcaccacatcaaggtgtccctggaggagaagaatgccaccatcatctatgaccccaagctgcagacccccaagaccctgcaggaggccattgatgacatgggctttgatgctgtgatccacaacccagaccccctgcctgtgctgacagacaccctcttcctgactgtgacagccagcctgaccctgccctgggaccacatccagagcaccctgctgaagaccaagggcgtgacagacatcaagatctacccccagaagaggacagtggccgtgaccatcatccccagcatcgtgaatgccaaccagatcaaggagctggtgcctgagctgagcctggacaccggcaccctggagaagaagagcggggcctgtgaggaccacagcatggcccaggccggggaggtggtgctgaagatgaaggtggagggcatgacctgccacagctgcaccagcaccatcgagggcaagattggcaagctgcagggcgtgcagaggatcaaggtgtccctggacaaccaggaggccaccatcgtgtaccagccccacctgatctctgtggaggagatgaagaagcagatcgaggccatgggcttccctgcctttgtgaagaagcagcccaagtacctgaagctgggcgccattgatgtggagcggctgaagaacacccctgtgaagagcagcgagggcagccagcagaggagccccagctacaccaatgacagcacagccaccttcatcattgatggcatgcactgcaagagctgtgtgagcaacatcgagagcaccctgagcgccctgcagtatgtgagcagcatcgtggtgtccctggagaacagaagtgccatcgtgaagtacaatgccagctctgtgaccccagagagcctgaggaaggccattgaagctgtgtccccaggcctgtacagagtgtccatcaccagcgaggtggagagcaccagcaacagccccagcagcagcagcctgcagaagatccccctgaatgtggtgtcccagcccctgacccaggagaccgtcatcaacattgatggcatgacctgcaacagctgtgtgcagagcattgaaggagtcatcagcaagaagccaggagtgaagagcatccgggtgtccctggccaacagcaatggcaccgtggagtatgaccccctgctgaccagccctgagaccctgcggggggccatcgaggacatgggctttgatgccaccctgagtgacaccaatgagcccctggtggtgattgcccagcccagcagcgagatgcccctgctgaccagcaccaatgagttctacaccaagggcatgacccctgtgcaggacaaggaggagggcaagaacagcagcaagtgctacatccaggtgacaggcatgacctgtgccagctgtgtggccaacatcgagaggaacctgcggcgggaggagggcatctacagcatcctggtggccctgatggccggcaaggccgaggtgcgctacaacccagctgtgatccagccccccatgattgctgagttcatccgggagctgggctttggagccaccgtgattgaaaatgctgatgaaggagatggagtgctggagctggtggtgcggggcatgacctgtgccagctgtgtgcacaagattgagagcagcctgaccaagcaccggggcatcctgtactgcagcgtggccctggccaccaacaaggcccacatcaagtatgaccctgagatcatcggcccccgggacatcatccacaccatcgagagcctgggctttgaggccagcctggtgaagaaggacagaagtgccagccacctggaccacaagcgggagatccggcagtggaggaggagcttcctggtgtccctcttcttctgcatccctgtgatgggcctgatgatctacatgatggtgatggaccaccactttgccaccctgcaccacaaccagaacatgagcaaggaggagatgatcaacctgcacagctccatgttcctggagcggcagatcctgcccggcctgtctgtgatgaacctgctgtccttcctgctgtgtgtgcctgtgcagggcaagaccagcgaggccctggccaagctgatcagcctgcaggccacagaggccaccatcgtgaccctggacagcgacaacatcctgctgtctgaggagcaggtggatgtggagctggtgcagagaggagacatcatcaaggtggtgcctgggggcaagtttcctgtggatggccgggtgattgagggccacagcatggtggatgagagcctcatcactggagaggccatgcctgtggccaagaagccaggcagcacagtgattgctggcagcatcaaccagaatggcagcctgctgatctgtgccacccacgtgggcgctgacaccaccctgagccagatcgtgaagctggtggaggaggcccagaccagcaaggcccccatccagcagtttgctgacaagctgagcggctactttgtgcccttcatcgtgtttgtgtccatcgccaccctgctggtgtggatcgtgattggcttcctgaactttgagatcgtggagacctacttccctggctacaacagaagcatcagcaggacagagaccatcatccgctttgccttccaggccagcatcaccgtgctgtgcatcgcctgcccctgcagcctgggcctggccacccccacagctgtgatggtgggcaccggggtgggcgcccagaatggcatcctgatcaagggcggggagcccctggagatggcccacaaggtgaaggtggtggtgtttgacaagacaggcaccatcacccacggcacccctgtggtgaaccaggtgaaggtgctgacagagagcaaccgcatcagccaccacaagatcctggccatcgtgggcacagctgagagcaacagcgagcaccccctgggcacagccatcaccaagtactgcaagcaggagctggacacagagaccctgggcacctgcatcgacttccaggtggtgcccggctgcggcatcagctgcaaggtgaccaacatcgagggcctgctgcacaagaacaactggaacatcgaggacaacaacatcaagaatgccagcctggtgcagattgatgccagcaatgagcagagcagcaccagcagctccatgatcattgatgcccagatcagcaatgccctgaatgcccagcagtacaaggtgctgattggcaaccgggagtggatgatcagaaatggcctggtgatcaacaatgatgtgaatgacttcatgacagagcacgagaggaaaggaagaacagctgtgctggtggccgtggatgatgagctgtgtggcctcatcgccatcgctgacacagtgaagccagaggccgagctggccatccacatcctgaagtccatgggcctggaggtggtgctgatgaccggggacaacagcaagacagcccggagcatcgccagccaggtgggcatcaccaaggtgtttgctgaggtgctgcccagccacaaggtggccaaggtgaagcagctgcaggaggagggcaagagggtggccatggtgggagatggcatcaatgacagccctgccctggccatggccaacgtgggcatcgccatcggcaccggcacagatgtggccatcgaggccgcagatgtggtgctgatcagaaatgacctgctggatgtggtggccagcattgacctgagccgggagaccgtgaagaggatccgcatcaactttgtgtttgccctgatctacaacctggtgggcatccccatcgccgccggggtcttcatgcccatcggcctggtgctgcagccctggatgggcagcgctgccatggccgccagctctgtgtctgtggtgctgagcagcctcttcctgaagctgtacaggaagcccacctatgagagctatgagctgcctgcccggagccagatcggccagaagagccccagcgagatctctgtgcacgtgggcattgatgacaccagcaggaacagccccaagctgggcctgctggaccgcatcgtgaactacagccgggccagcatcaacagcctgctgagtgacaagaggagcctgaacagcgtggtgaccagcgagccagacaagcacagcctgctggtgggggacttccgggaggatgatgacacagccctgtag

SEQ ID NO: 100723 - DNA, 264 bp, Artificial Sequence
  derived and/or modified sequence
gaatgtaatgaggagatcaagatggaccccagcatgggcgtgaacagcgtgaccatctctgtggagggcatgacctgcaacagctgtgtgtggaccatcgagcagcagatcggcaaggtgaatggagtgcaccacatcaaggtgtccctggaggagaagaatgccaccatcatcttctacgcccactggtttggatttgctgccctggatggcatctgcagcaatggctgcttcatctgcttctgcagcaccttcttctcctag

SEQ ID NO: 100724 - DNA, 1512 bp, Artificial Sequence
  derived and/or modified sequence
atggaccccagcatgggcgtgaacagcgtgaccatctctgtggagggcatgacctgcaacagctgtgtgtggaccatcgagcagcagatcggcaaggtgaatggagtgcaccacatcaaggtgaaggtggtggtgtttgacaagacaggcaccatcacccacggcacccctgtggtgaaccaggtgaaggtgctgacagagagcaaccgcatcagccaccacaagatcctggccatcgtgggcacagctgagagcaacagcgagcaccccctgggcacagccatcaccaagtactgcaagcaggagctggacacagagaccctgggcacctgcatcgacttccaggtggtgcccggctgcggcatcagctgcaaggtgaccaacatcgagggcctgctgcacaagaacaactggaacatcgaggacaacaacatcaagaatgccagcctggtgcagattgatgccagcaatgagcagagcagcaccagcagctccatgatcattgatgcccagatcagcaatgccctgaatgcccagcagtacaaggtgctgattggcaaccgggagtggatgatcagaaatggcctggtgatcaacaatgatgtgaatgacttcatgacagaacatgagaggaagggccgcacagctgtgctggtggccgtggatgatgagctgtgtggcctgattgccatcgctgacacagtgaagccagaggccgagctggccatccacatcctgaagtccatgggcctggaggtggtgctgatgactggagacaacagcaagacagcccggagcatcgccagccaggtgggcatcaccaaggtgtttgctgaggtgctgcccagccacaaggtggccaaggtgaagcagctgcaggaggagggcaagagggtggccatggtgggagatggcatcaatgacagccctgccctggccatggccaacgtgggcatcgccatcggcactggaacagatgtggccattgaagctgctgatgtggtgctgatcagaaatgacctgctggatgtggtggccagcattgacctgagccgggagaccgtgaagaggatccgcatcaactttgtgtttgccctgatctacaacctggtgggcatccccatcgctgctggggtcttcatgcccatcggcctggtgctgcagccctggatgggcagcgctgccatggccgccagctctgtgtctgtggtgctgagcagcctcttcctgaagctgtacaggaagcccacctatgagagctatgagctgcctgcccggagccagatcggccagaagagccccagcgagatctctgtgcacgtgggcattgatgacaccagcaggaacagccccaagctgggcctgctggacagaattgtgaactacagccgggccagcatcaacagcctgctgagtgacaagaggagcctgaacagcgtggtgaccagcgagccagacaagcacagcctgctggtgggggacttcagagaagatgatgacacagccctgtag

SEQ ID NO: 100725 - DNA, 2049 bp, Artificial Sequence
  derived and/or modified sequence
agaaaccaggagtgcaatgaggagatcaagatggaccccagcatgggcgtgaacagcgtgaccatctctgtggagggcatgacctgcaacagctgtgtgtggaccatcgagcagcagatcggcaaggtgaatggagtgcaccacatcaaggtgtccctggaggagaagaatgccaccatcatctatgaccccaagctgcagacccccaagaccctgcaggaggccattgatgacatgggctttgatgctgtgatccacaacccagaccccctgcctgtgctgacagacaccctcttcctgactgtgacagccagcctgaccctgccctgggaccacatccagagcaccctgctgaagaccaagggcgtgacagacatcaagatctacccccagaagaggacagtggccgtgaccatcatccccagcatcgtgaatgccaaccagatcaaggagctggtgcctgagctgagcctggacaccggcaccctggagaagaagagcggggcctgtgaggaccacagcatggcccaggccggggaggtggtgctgaagatgaaggtggagggcatgacctgccacagctgcaccagcaccatcgagggcaagattggcaagctgcagggcgtgcagaggatcaaggtgtccctggacaaccaggaggccaccatcgtgtaccagccccacctgatctctgtggaggagatgaagaagcagatcgaggccatgggcttccctgcctttgtgaagaagcagcccaagtacctgaagctgggcgccattgatgtggagcggctgaagaacacccctgtgaagagcagcgagggcagccagcagaggagccccagctacaccaatgacagcacagccaccttcatcattgatggcatgcactgcaagagctgtgtgagcaacatcgagagcaccctgagcgccctgcagtatgtgagcagcatcgtggtgtccctggagaacagaagtgccatcgtgaagtacaatgccagctctgtgaccccagagagcctgaggaaggccattgaagctgtgtccccaggcctgtacagagtgtccatcaccagcgaggtggagagcaccagcaacagccccagcagcagcagcctgcagaagatccccctgaatgtggtgtcccagcccctgacccaggagaccgtcatcaacattgatggcatgacctgcaacagctgtgtgcagagcattgaaggagtcatcagcaagaagccaggagtgaagagcatccgggtgtccctggccaacagcaatggcaccgtggagtatgaccccctgctgaccagccctgagaccctgcggggggccatcgaggacatgggctttgatgccaccctgagtgacaccaatgagcccctggtggtgattgcccagcccagcagcgagatgcccctgctgaccagcaccaatgagttctacaccaagggcatgacccctgtgcaggacaaggaggagggcaagaacagcagcaagtgctacatccaggtgacaggcatgacctgtgccagctgtgtggccaacatcgagaggaacctgcggcgggaggagggcatctacagcatcctggtggccctgatggccggcaaggccgaggtgcgctacaacccagctgtgatccagccccccatgattgctgagttcatccgggagctgggctttggagccaccgtgattgaaaatgctgatgaaggagatggagtgctggagctggtggtgcggggcatgacctgtgccagctgtgtgcacaagattgagagcagcctgaccaagcaccggggcatcctgtactgcagcgtggccctggccaccaacaaggcccacatcaagtatgaccctgagatcatcggcccccgggacatcatccacaccatcgaggtgtctgccaagaacctgtgcttctgtgtgctgacctacctgatcagcacccctgtgaaccacttctggtttgccagtgacagaggaaatgagaagaagagcaacagctttgagcacttcaagcaggacctgagccagaacctgatgtag

SEQ ID NO: 100726 - DNA, 825 bp, Artificial Sequence
  derived and/or modified sequence
atggaccccagcatgggcgtgaacagcgtgaccatctctgtggagggcatgacctgcaacagctgtgtgtggaccatcgagcagcagatcggcaaggtgaatggagtgcaccacatcaaggtgtccctggaggagaagaatgccaccatcatctatgaccccaagctgcagacccccaagaccctgcaggaggccattgatgacatgggctttgatgctgtgatccacaacccagaccccctgcctgtgctgacagacaccctcttcctgactgtgacagccagcctgaccctgccctgggaccacatccagagcaccctgctgaagaccaagggcgtgacagacatcaagatctacccccagaagaggacagtggccgtgaccatcatccccagcatcgtgaatgccaaccagatcaaggagctggtgcctgagctgagcctggacaccggcaccctggagaagaagagcggggcctgtgaggaccacagcatggcccaggccggggaggtggtgctgaagatgaaggtggagggcatgacctgccacagctgcaccagcaccatcgagggcaagattggcaagctgcagggcgtgcagaggatcaaggtgtccctggacaaccaggaggccaccatcgtgtaccagccccacctgatctctgtggaggagatgaagaagcagatcgaggccatgggcttccctgcctttgtgaagaagcagcccaagtacctgaagctgggcgccattgatgtggagcggctgaagaacacccctgtgaagagcagcgagggcagccagcagaggagccccagctaccagtag

SEQ ID NO: 100727 - DNA, 4269 bp, Artificial Sequence
  derived and/or modified sequence
atggaccccagcatgggcgtgaacagcgtgaccatcagcgtggagggaatgacctgtaattcatgtgtgtggacaatcgagcagcaaataggcaaagtcaatggtgtccatcatatcaaagtgtctctggaagagaagaacgccaccattatttacgaccctaaactgcagacccctaagacattgcaggaagctattgacgatatgggattcgacgctgtgatacacaaccccgatccactgcccgtgctcactgatacattgttcctcaccgtcaccgcatctctgaccctgccttgggatcacatccagagcacgctgttgaagaccaagggtgttaccgacatcaagatatatccacagaagcgaactgtggcggtcacaattatccctagcatcgtgaatgcaaatcagataaaagaactcgtgccagaattgagcctcgataccgggaccctagagaaaaagtcaggggcatgcgaagaccacagcatggcccaggccggcgaagtggttctgaaaatgaaggtggagggtatgacctgccactcatgcacctccactattgagggcaaaattgggaagctgcaaggagtgcagagaataaaggtctcattggataatcaggaggccacaatcgtctatcagcctcatttgataagcgttgaggagatgaagaagcagatcgaagccatgggatttcccgcttttgtgaaaaagcagcccaaatatctgaaactgggcgctattgatgtcgagcgtcttaagaataccccagtcaagtcaagtgagggtagtcagcagcgctccccctcttacacgaatgactcaacagctacgttcatcatcgacggtatgcactgcaaatcctgcgtgagcaacattgagtccaccctgagtgcattgcagtatgttagctcaattgtggtgtccctcgaaaaccggtccgccatcgtgaaatacaatgcttcaagcgtcactccagagagtctgcgtaaagccattgaggctgtcagccctggcctgtaccgggtcagtatcacgtcggaagtggagtccacaagcaatagcccttcttcttcctctcttcagaaaatcccactgaacgtggtgtcccaaccccttacacaggagacagtgattaatatcgatggcatgacctgtaacagttgcgttcagtcaattgaaggcgtgattagcaagaagccaggagtcaagtcgattagggtatcactggcaaactctaatgggaccgtcgaatacgatccactcctcacttcccctgaaacacttcggggggcaattgaggatatgggtttcgatgcgactctttccgatacaaacgagccactggttgtgatcgcccaaccttcatctgaaatgcccctcctcaccagcacaaacgagttttatactaagggaatgaccccggtccaggacaaagaggaagggaagaattctagcaagtgttatatccaggtgacaggcatgacctgtgcctcatgcgtggcgaatattgaacgcaatttgcggagggaagaaggtatttattctatcctggtggccctgatggcgggcaaggcagaagtgagatacaaccctgcagtaatacagccgcctatgattgccgagttcatccgggaactgggtttcggcgccactgttatcgagaacgccgacgagggggacggtgtgctggagcttgttgtgcggggaatgacttgcgcctcctgcgtgcataagatcgagtcgagcctgaccaaacaccggggaattttatattgttcggtcgctcttgctacaaataaagcacacattaagtatgatcccgagatcatcgggcccagagacataatccacaccatagagtctctcggatttgaagccagcctggtgaagaaggataggtcagccagccatctggaccacaaacgcgagatccgacagtggcgccgcagtttcctggtgagccttttcttttgtatcccagtgatggggctgatgatctatatgatggtcatggaccaccatttcgccacgctccatcataatcagaacatgtcgaaagaggagatgatcaacctccacagttctatgtttctggaaaggcagatccttcctggcctgtccgtgatgaacctgctttctttcttgttatgtgtgcctgtccaaggaaaaactagtgaagctcttgcaaaactcatttcattacaggccactgaagctaccatcgtgaccctggactctgacaacattctcctgagcgaggaacaggtggatgtggaactggtgcagcggggcgacattatcaaggtggtgccaggcggaaaattccctgtggatggccgcgtgatcgaaggccattctatggtggatgagtctctcatcaccggcgaagcaatgcctgttgccaagaagcctggctcaacagtcattgcaggatccattaaccagaacggctcactcctgatttgcgcaacccacgttggcgcggacaccacactgtctcagattgtcaaactcgtcgaagaggcgcagaccagtaaagcccccattcagcagttcgcagataaactgtccggctacttcgtccccttcatcgtttttgtgagtatagcgaccctcctcgtctggattgtaattgggttcctcaactttgagatagttgaaacctatttccccgggtataatcgatcgatttcccgtacggagactatcatccggtttgcattccaggcgtctattacagtgctctgtattgcatgtccctgttctctgggattggcaactccaactgctgtgatggtggggaccggcgtgggagctcaaaatgggattttgatcaaagggggcgaaccactggagatggcccacaaagtgaaggtagtcgtgttcgacaaaactgggacgattacacacggcactcctgttgtgaaccaggtgaaggtgctcacggagagcaacagaattagccatcacaaaatcctggccatcgtgggcacagctgagtcaaatagcgagcatcccctgggcactgcaattactaagtattgcaagcaggagcttgacaccgagacactcggcacctgcattgactttcaggtggtccccgggtgtggaatatcttgtaaagtgactaacatcgaagggctgttgcacaaaaacaactggaatatcgaggataataacattaagaacgcaagcctggtgcaaatcgacgcctctaatgagcagagctccacttcaagctcaatgatcatcgacgcccagattagtaacgccttgaatgctcagcaatacaaagtgctgatagggaatcgcgaatggatgatcaggaatggattggtcatcaataacgacgtcaatgacttcatgactgaacatgaacggaaggggagaacagctgttctggtggcggtagacgatgagctgtgtggccttatcgctattgcagatacagttaaaccagaagcagaacttgccatccatatccttaaatccatgggtctggaggtcgtgcttatgactggggacaactcaaaaacggcaagatccattgcatctcaggtgggaatcacaaaagtcttcgctgaagtgctcccgagccacaaggttgctaaggtcaagcagctgcaagaagagggtaaacgggtggccatggttggggatggcatcaatgatagtccggccctggccatggccaacgtcggaatcgccattggtacagggacggatgtggccatcgaagcagctgacgttgtcctcatcaggaacgaccttctcgacgtagtggctagcattgacttaagtagggaaactgtgaagcgtatccgaatcaactttgtattcgctttgatatataacctcgtgggtatccccattgccgcgggggtgttcatgccaatcggcctggtgttgcaaccctggatgggcagtgcagccatggccgcttcatctgtaagtgtcgttctttcctcgctgtttctgaagctgtacagaaaaccaacgtacgaatcttacgagctcccagcgagatcgcagattgggcagaaatctccttcagagattagcgtgcacgtaggtatcgatgataccagcagaaatagccccaagcttggcttgcttgacagaatcgtgaactattccagggccagtataaattcactgcttagtgataaaagaagtctaaactccgtagtgacatcggagcctgacaaacattcactcctagtgggcgattttcgtgaagatgatgacacggcactgtag

SEQ ID NO: 100728 - DNA, 264 bp, Artificial Sequence
  derived and/or modified sequence
gagtgcaacgaggagatcaagatggaccccagcatgggcgtgaacagcgttactatttctgtggagggaatgacatgtaattcatgcgtgtggaccatcgagcagcagattggaaaagttaacggagtgcatcatatcaaggtgagcttggaggagaaaaacgctacaattatcttctacgcacattggttcggcttcgctgcacttgatgggatatgttccaatgggtgctttatctgcttctgtagcactttcttctcttag

SEQ ID NO: 100729 - DNA, 1512 bp, Artificial Sequence
  derived and/or modified sequence
atggaccccagcatgggcgtgaacagcgtgaccatcagcgtggagggcatgacctgcaacagctgcgtgtggacaattgaacagcagatcggaaaggtcaatggagtgcatcatattaaggtaaaagtggtggttttcgacaaaacggggaccatcacccatggcacaccagtggtgaaccaagttaaggtgcttaccgaatccaaccgtattagccaccacaaaatattggctatcgtgggtaccgctgaaagcaactctgagcaccccctcggtactgccattaccaaatattgcaagcaggaattagacacagaaacattgggcacctgcatcgattttcaagtagtgccaggctgcggcatttcatgcaaggtcacgaacattgaaggactcctccacaaaaataattggaacatcgaggataataatataaagaacgcatccctcgtgcagattgacgcatcaaacgagcaatcctccaccagcagctcaatgattatcgatgcccagatttcaaatgctctgaacgcccagcagtacaaggtactaataggtaaccgagaatggatgatacgcaatgggttggtgattaataatgatgtcaatgattttatgaccgagcatgagcgaaaagggcgtaccgctgtgctggtcgccgtggatgacgagctgtgtgggctcattgctatcgctgacacagtgaagcccgaggctgagctcgccatccacatcttgaagtcgatgggcttggaggtcgttctgatgactggagataactctaagacagcacggtccatcgctagccaggtaggaatcaccaaagtctttgctgaagtgcttccaagccataaagtggccaaagtcaagcagttacaggaggagggcaaaagggtggcaatggtcggggacggtatcaacgactcacccgcactcgcaatggccaatgttggcatcgcgatcggaacaggcactgacgtggccatcgaagccgctgacgttgtactgatcaggaatgatctgttagacgttgtggctagtatagatctgagtcgcgaaaccgttaaacgaatccggatcaacttcgtgttcgcccttatctacaaccttgtaggaatacccatcgctgcaggagtctttatgccaatcggtctcgtgctgcagccctggatgggatcagccgctatggctgcctcttccgtgtcagtggtgctatcctctctcttcctgaaattatatagaaagcctacttacgaatcatatgagctgcccgctagatctcagatcgggcagaagtcacccagcgaaatctcagtgcatgtaggcatagatgatacatcccgcaactctcctaagttgggcttactcgatcgcatcgtgaactattcccgggccagtattaattcacttctgagcgataaaagatctcttaactctgtggttacgagcgagcctgacaaacattctctattggtgggagattttcgggaggatgacgataccgcgctctag

SEQ ID NO: 100730 - DNA, 2049 bp, Artificial Sequence
  derived and/or modified sequence
cggaaccaggagtgcaacgaggagatcaagatggaccccagcatgggtgtgaattccgttaccatcagcgtcgagggtatgacatgtaactcttgcgtttggacgatagaacagcagataggcaaagtcaatggcgtccaccacatcaaggtcagtctggaggagaagaatgcaactatcatttacgatccaaagttgcagacacctaagaccctacaggaagcaattgatgacatgggatttgatgccgtaatacataacccagatcccctgcctgtgctcaccgatactctttttttgaccgtgacagcatcactgacgctcccctgggaccacattcagtcaacactgctgaagaccaaaggggtaacagatatcaaaatctacccccagaagaggacagtggctgtcactatcatcccctccatcgtaaatgccaatcagataaaggaactggtgccagagctgtccctggacactggaactttagagaagaagtcaggggcttgtgaggatcacagcatggctcaggccggtgaggtggttctcaagatgaaggtagagggaatgacatgccacagttgcacatccacaattgaagggaaaattggaaaacttcagggcgtccaacgcataaaggtttctctcgacaatcaagaagccactatcgtctatcaaccgcacttaataagcgtcgaggagatgaagaaacagatagaggccatggggttccccgcgtttgttaaaaaacaacccaaatacctaaaattgggggcaatcgacgtggagaggttaaagaatactcccgtgaaaagctccgaaggaagccaacagcgctccccaagctacaccaacgattccactgccacattcataatcgatggcatgcactgtaagagttgtgtgtctaacatcgaaagcacccttagtgctttacagtatgtaagcagtatcgtcgtgtcccttgaaaacaggtctgcaatcgttaaatacaacgccagttcagtgacaccggaatcccttagaaaagcaatcgaagcagtatctcctggtttgtacagagtttccattacgagtgaggtggaaagcacctctaacagtccaagttctagcagtctgcaaaaaatccctcttaacgttgtgtctcaacctcttacacaagagaccgtcattaatatcgacgggatgacctgtaactcttgtgtgcaatccatcgaaggcgttatctccaaaaagccaggagttaaaagcatccgcgtgtcgcttgcaaattccaacggtaccgtcgaatacgatcctctcctcacatctcctgagacactccggggggccatcgaagacatggggtttgatgcaacattgtctgatacaaatgaaccgctggtcgtgatcgcacagccttccagcgaaatgcccctgttaacgagcactaatgagttctatacgaaaggaatgacaccagtgcaagacaaggaagaaggcaagaactcctctaagtgctatatccaggttaccggaatgacttgtgcaagctgcgtcgccaacatcgagcgtaatctcaggcgagaggaaggtatttactccatcctggtagcactcatggcaggtaaagccgaggtgcggtacaaccctgctgtcatccagccacccatgatcgctgaatttatcagggagctcggctttggggccactgtgatcgaaaacgcggatgaaggagatggggtgctggaattagtcgtacggggcatgacctgtgcatcgtgcgtccacaagattgagtctagtctgacgaaacacagaggcatcctgtactgttcagtcgcccttgctaccaacaaagcgcacatcaaatacgatccagagattatcggaccccgcgatattatccacaccattgaagtcagtgcaaaaaacttgtgcttctgtgtgttgacatacctcatttcaaccccagtcaatcacttctggtttgcatccgatcggggcaatgagaaaaaatctaatagcttcgaacatttcaagcaggatctttcccaaaacctgatgtag

SEQ ID NO: 100731 - DNA, 825 bp, Artificial Sequence
  derived and/or modified sequence
atggaccccagcatgggcgtgaacagcgtgaccatcagcgtggaggggatgacctgtaacagctgcgtttggactatcgaacagcaaattggcaaggtgaacggcgtacatcacattaaagtgagcctggaagagaagaacgccactattatttacgatcctaaactccagaccccaaaaactcttcaagaagccatcgatgacatgggattcgacgctgttatccacaatcccgatcctctgcctgtcctgacagacaccctattccttaccgtcaccgctagtttgaccctgccatgggatcatatacagtccaccctgcttaaaacgaaaggcgtgacagacattaagatctatcctcagaaaagaactgtcgcggttacaattatcccctcgatcgttaacgccaaccagataaaagagctggtgcccgaactatcgctcgatacgggcacacttgaaaagaaaagcggcgcatgtgaagaccactccatggcccaggctggcgaggtggtcctcaaaatgaaggtggagggaatgacctgccatagttgcacctcaaccatcgaaggaaagatcgggaaactgcagggggtgcagcggatcaaggtcagtctggataatcaggaggcgacaatagtatatcagcctcatctgatttcggtggaggagatgaagaaacagattgaggctatgggctttcctgcatttgtgaaaaagcagcccaagtatctcaagctgggtgcaatcgatgtggagaggctgaaaaacaccccagtcaagtcatctgagggcagtcagcagcggtctcccagttaccagtag

SEQ ID NO: 100732 - DNA, 4269 bp, Artificial Sequence
  derived and/or modified sequence
atggatcctagcatgggagtgaactccgtaacaatttcagttgagggcatgacatgtaattcctgtgtgtggaccatcgagcagcaaatcggaaaggttaatggcgttcaccacattaaggttagtcttgaagagaaaaacgccactattatctacgatcccaaactacagactcctaagaccctccaagaggccatagatgacatgggattcgacgccgttattcacaatcccgacccccttcctgtccttaccgatacgttgttccttaccgtgactgcctccttaactctgccttgggatcatattcagtctacactgttaaagacaaaaggagtcaccgacattaagatctaccctcagaagcggactgtggctgtgacgataatcccatccattgtcaacgccaaccagattaaagagctcgtgcctgagctgtctctcgacacgggaaccttggagaagaagagtggagcatgcgaagaccactctatggcccaagcaggagaagtggtgctcaaaatgaaggtggagggaatgacctgccactcatgcacctccacaattgaaggcaagatcggcaagctccagggagtgcagcgcattaaggtgtctctggacaatcaggaagccacaatcgtttaccagccccatctcatctcagtggaagagatgaaaaagcaaatcgaagccatggggtttcccgctttcgtgaagaaacagcctaagtatctgaaattaggcgctattgatgttgagagacttaaaaacacgcccgtaaagtcttcagagggatcacaacaaaggagccctagttacacaaacgattctaccgccacatttatcatcgacggaatgcattgtaaatcgtgcgtttccaacatagaatcaaccttgtcggccttgcagtatgtgtcttcaatagtggtgtcactagaaaatcgcagcgccattgttaaatataacgccagttctgtcacaccagaatccctcaggaaggccattgaggcagtgagtcctgggctgtacagagtgtctatcacatctgaagtggagagcaccagtaactccccttcgtcatcatcactgcagaaaatccctctaaacgtcgtatcgcaacctttgacccaggagaccgtgatcaacattgatggcatgacatgtaactcttgtgtccagtctatcgagggggtgattagcaaaaagcccggtgtaaaatcaatcagggttagcttggccaatagcaacggaacagtcgaatacgatccgttattaacgagccccgaaacactccgtggagctatagaggacatgggcttcgacgctactctcagtgacacaaatgagcctttggttgttatcgcacagccaagtagcgaaatgcctctgcttacatccaccaacgaattctacacaaagggaatgacccctgtccaggataaggaggagggtaagaacagttctaaatgttatatacaggtgaccggaatgacctgcgcatcctgcgtggcgaacatcgagagaaatctgagacgagaagagggcatatattccatcctggtagctttgatggctggcaaggccgaagtcagatacaatccagcagtaatccagccacccatgatagccgaattcattcgcgaactggggtttggggcaacggtcatcgaaaatgccgacgagggagatggcgtccttgagctggtcgtcaggggcatgacctgcgcttcgtgcgtgcacaagattgaatccagcctgactaaacatcgcggtattttatattgttccgtggccctcgccaccaataaggcgcatattaagtacgaccctgagattatagggcctagggatatcatccacactatcgagtctctggggtttgaggcttctctggtgaaaaaagaccgctcggcctcccatctggaccacaaacgtgagataagacaatggcggaggtctttcttagtcagcttgttcttctgtattccggttatggggctcatgatttacatgatggtcatggaccaccattttgcaaccctgcatcataatcaaaatatgtctaaagaggagatgatcaacctccactcatcaatgtttttagagaggcaaattttgcccggtctctccgtcatgaacttgctatccttccttctgtgcgtgcccgtgcaagggaagaccagtgaagccctggcaaaacttatctcgctccaagccacagaggccaccattgtgaccctggatagtgataatattctcctgtctgaggaacaggttgatgtggagctcgtgcaaaggggtgatataatcaaggtcgtgccaggaggaaagttcccggtggacggcagggtcattgagggacacagcatggtagacgagtctctgatcacaggggaagcgatgccagtagcgaagaagccgggttccacagtcatcgccggtagtatcaatcagaacgggagcctgttgatttgtgctacgcacgtgggcgctgatacgacgctgagtcagattgtcaagcttgtagaagaagcacagacaagtaaggcacccatacagcaattcgcagacaagctgagcggctatttcgtcccgttcatcgtgttcgtctcaattgccacacttctagtgtggattgtgattggctttttaaattttgaaatcgtggagacatatttcccaggctataatcgcagtatttcaaggaccgagaccattattcggttcgcctttcaggcgagcatcacagtgttatgtatcgcttgtccatgctcactcggcctcgcaacccccacagccgttatggtgggtactggagtgggcgcacagaacggaatcctgatcaagggaggagagcccctggagatggcacataaggtcaaagttgtggtctttgataaaacgggcaccatcactcatggtactcccgtcgtgaaccaggtgaaggttctgaccgagtccaacaggatctctcatcacaagattctagccattgttggtactgcagagtcaaattcagaacatccactgggcactgcaataaccaaatattgcaagcaggagcttgacaccgaaactctgggcacatgcattgattttcaggttgtcccaggatgtggcattagctgtaaagtgaccaatatcgagggtctgttgcacaaaaataattggaacatcgaggacaataacatcaagaatgccagtttggttcagattgacgcttcaaacgagcagagtagcactagtagttccatgatcattgacgcacaaatttctaatgcattaaacgcccagcaatataaggtgctcatcggcaatcgggagtggatgatccgaaacggccttgttattaataacgacgtaaacgattttatgactgagcatgagagaaaggggcgaacagcggttctagtggcggtggatgatgagctctgtggtctgatagctatcgccgatacagtaaagcccgaggcagagcttgccatccacatcctgaagtccatgggtctggaagttgtgttgatgaccggggataattctaaaacagctcgctcgatcgcctcccaggtgggcataactaaagtttttgccgaagtgttaccatcacacaaggttgcgaaagtgaagcagctgcaagaagagggcaagcgtgtcgctatggtcggcgacgggatcaatgattcgcccgcattagcaatggcaaacgtgggcattgccattgggacgggaacggatgttgcgatcgaggcggcagacgtggtgttaattcggaacgacctgctcgatgtggtggccagcattgatctttctcgagagactgtgaaaaggattagaattaatttcgttttcgctttaatctacaacctggtcggcatccctatagctgccggtgtgttcatgcccatcggactggttctgcagccatggatgggaagtgctgccatggccgcatctagcgtgagcgtggtgctttctagcctgtttttaaaactataccgtaagcccacctacgaaagctatgagttaccagccaggtctcagattggtcagaaatcgcctagcgaaatatccgtgcatgtcgggatcgatgatacatccaggaattcgcccaagctagggctgctggaccgcattgtgaactattctcgagctagcattaactctttgttgagcgataaacggagtttgaattcagttgtgacctcagagccggataagcactccttgctcgtgggcgattttcgcgaggacgatgacacagctctctag

SEQ ID NO: 100733 - DNA, 264 bp, Artificial Sequence
  derived and/or modified sequence
gagtgcaatgaggagatcaagatggatccttcaatgggcgtcaatagtgtgacgattagcgtggagggcatgacatgcaacagttgcgtttggactatcgagcagcagataggaaaagtcaatggcgtccaccatatcaaggtctccctcgaagagaagaacgccacaatcatattctatgcccattggttcggctttgccgcattggacggcatatgctctaacggctgcttcatctgcttctgctctactttctttagttag

SEQ ID NO: 100734 - DNA, 1512 bp, Artificial Sequence
  derived and/or modified sequence
atggatccgtcaatgggcgtgaactcagtgactatcagtgtggaaggtatgacatgtaactcctgcgtgtggaccatcgaacaacaaatcgggaaggttaatggagtgcaccacatcaaagtcaaagttgtggttttcgataagactggcaccataacccacggaacaccggtggttaatcaggttaaggtcctgacagagtctaacaggatctcccaccataagatcctggccatcgtgggcactgcagagtccaactcagagcatcctctcggaacagcaatcaccaaatattgcaagcaagaacttgacactgaaacgctgggcacctgcatcgatttccaggtggtgcctgggtgtggcatcagttgcaaggttaccaatatcgaaggcctgttacataagaacaactggaatatcgaggacaacaatattaagaacgcatctctggttcagatcgacgcttccaatgagcagagttctacctctagttcaatgatcatcgatgcgcagatttccaacgcgctcaatgcccagcagtacaaggtattgataggcaatcgggaatggatgataaggaacgggctggtcataaataatgacgtgaatgattttatgaccgagcatgagcggaaaggacgcactgccgtgctggtggccgtggatgacgagctgtgtggcctgatagctatagccgacactgttaaacccgaggctgaactagcgatccatattctcaagtcgatgggacttgaagtggtgttgatgacaggcgacaatagcaagacggcacgcagtattgcatctcaggtgggtatcacaaaagtcttcgcagaagtgctgccaagccacaaagtcgctaaggtgaaacagcttcaggaggaggggaaacgcgtcgcaatggtcggtgatggaattaatgatagtcccgctttggccatggcaaatgtagggatagctatcggtaccgggactgatgtcgcaatcgaggcagcagacgtcgtgttaatacgcaacgacttgttggatgtggtggcctcaatcgacctgagcagggagactgtaaaacgcattaggatcaacttcgtcttcgcgctaatatacaacctggtcggaataccaatagctgccggtgtgtttatgcccattggcctcgtgctgcagccatggatggggtcagcagccatggccgcatcatcagtatctgtggtgctgtcgtccctgtttctcaaactctacaggaaaccaacctatgaatcatatgaactccctgctcgaagtcaaataggccagaaatcaccctctgagatatcggtacatgtggggatcgacgatacttctagaaatagtcccaagctcggactgttagacaggatcgtcaactacagcagagcaagtatcaactccctactgtccgataagagatcgctgaactcggtcgtgacatctgagcctgataaacactctctcctagttggcgattttagagaggacgacgatacggcattgtag

SEQ ID NO: 100735 - DNA, 2049 bp, Artificial Sequence
  derived and/or modified sequence
agaaatcaggagtgtaatgaggaaataaaaatggatcccagcatgggtgtgaactctgtgaccatcagcgtggagggtatgacgtgcaattcctgcgtttggaccatcgagcagcagatagggaaggtaaatggagttcaccatattaaggtatcactggaagaaaagaacgcgactatcatctacgatccaaagcttcaaaccccgaaaacattacaggaagcaatcgatgacatgggatttgacgctgtgatacacaaccccgatcctctcccagtgctgacggataccctcttcctgactgtcactgcctccctgacccttccttgggatcacatacaaagtacccttctgaaaacaaaaggcgtgactgacatcaagatatacccccagaagcggaccgttgctgtgaccattattccctccatcgtgaatgcaaatcagatcaaagaattggtgcctgaactttcactcgatacagggactctcgagaagaagtccggcgcatgtgaagatcacagcatggcccaggccggagaagtcgtgctgaaaatgaaggttgaaggcatgacttgtcatagctgcaccagcaccatcgaagggaaaattgggaagctgcagggtgtacagaggattaaggtgtcgttagacaatcaggaggccactattgtctatcaacctcaccttatttcagtggaagagatgaaaaagcagattgaggctatggggtttccagcctttgtcaagaagcagcctaagtatctcaagctgggagccatagacgtggagcgtttgaaaaatacaccagtgaagagctctgaaggcagtcagcagcgaagtcccagctatacaaacgacagtacagctacctttatcatcgacggcatgcattgcaaaagctgcgtgtcaaacatcgaaagcaccctcagcgctctacagtatgtgtctagtatagtggtgtccctggagaatagaagcgcaatcgtgaagtataatgcatcatctgtcactcccgaaagcctgagaaaagcaatcgaggctgtcagccctggactatacagggtctccattacatcagaggtggaatcaaccagtaacagccccagttcaagcagcctgcagaagattccgcttaacgtagttagtcagccactcactcaggagactgtaatcaatattgacggtatgacttgcaactcatgcgtgcagagtatcgaaggggttatctctaaaaaacccggtgtgaagagtatcagggttagcctggcgaacagcaatggaactgtggagtacgatccactactgactagccctgaaacactgcgtggtgccattgaggatatgggctttgatgctacgctgagcgacacgaatgagccgctcgtggttattgcccagccttcatctgagatgcctctgttgacatccactaacgagttctacacaaaaggaatgacaccggtgcaagataaggaagaagggaagaattcctctaagtgctacatccaggtgactggcatgacctgtgcttcctgcgttgccaacattgagaggaacttgcgtcgcgaggaaggtatctacagcatcctggtcgccctcatggcgggtaaggccgaggtgcggtacaatccagcggttatccagccccctatgatcgccgagtttatccgtgagctcggatttggtgccactgtaattgaaaatgctgacgaaggcgatggggttctggagctggtggtccgcggaatgacatgtgccagctgcgtgcataagatagagagtagtctcaccaaacatcgaggtatactctactgctcagtcgctcttgccaccaataaagctcacattaagtacgacccagagatcataggcccaagggatatcatccatactattgaggtctcagcaaaaaacctctgtttttgtgtcttaacctatcttatttctactcctgtaaatcacttttggttcgccagcgaccgaggcaacgaaaagaagagcaattccttcgagcattttaagcaagatctctcccagaatctcatgtag

SEQ ID NO: 100736 - DNA, 825 bp, Artificial Sequence
  derived and/or modified sequence
atggacccatctatgggcgtgaattccgtgacaatttccgtggaggggatgacctgcaattcatgtgtgtggacaattgaacagcagatcggcaaagtgaatggggtacaccacattaaggtcagcctggaggagaaaaacgcaacaattatatacgatcccaaacttcagacccccaagacattacaggaagctatcgacgacatgggcttcgacgccgtgatacataatcctgatcccctcccggtgcttactgacacactgttcctcactgtgactgccagcctcacgttgccttgggatcatattcagtcaacactgcttaagaccaaaggagtaaccgacattaagatctaccctcaaaaacggacggtagccgtgaccattattccatcaatcgttaacgcaaaccagatcaaagagttggtacccgagctgtccctggacacggggacgctggaaaaaaaaagcggtgcttgtgaagatcattccatggctcaggccggagaagtggtcctgaaaatgaaggtcgagggcatgacctgccattcttgcacaagcacgatcgagggcaagatcgggaagcttcagggagtacaacgcattaaagtttctttggataatcaggaagctacaattgtgtaccagccgcacctcatcagtgtggaagaaatgaaaaaacagatcgaagccatgggattccccgcttttgtgaaaaagcaacccaaatatctgaaactcggagcaatagatgtggaaaggcttaagaacacccctgttaagtcctcagaaggaagccagcaaaggtctccgagctatcagtag

SEQ ID NO: 100737 - DNA, 8254 bp, Artificial Sequence
  derived and/or modified sequence
gttgttgctgccgccgccgcagccgcagctactgtgacttctccgattgtgtgagctttgttggagcctgcgtacgtggatttatcgctgccacggtctgcgtagctccagaggtttaaccataggatagagaaaccaggaatgtaatgaggaaatcaaaatggatccaagtatgggtgtgaattctgttaccatttctgttgagggtatgacttgcaattcctgtgtttggaccattgagcagcagattggaaaagtgaatggtgtgcatcacattaaggtatcactggaagaaaaaaatgcaactattatttatgaccctaaactacagactccaaagaccctacaggaagctattgatgacatgggctttgatgctgttatccataatcctgaccctctccctgttttaactgacaccttgtttctgactgttacggcgtcactgactttgccatgggaccatatccaaagcacattgctgaagaccaagggtgtgacagacattaaaatttaccctcagaaaagaactgtagcagtgacaataatcccttctatagtgaatgccaatcagataaaagagctggttccagaactcagtttagatactgggacactggagaaaaagtcaggagcttgtgaagatcatagtatggctcaagctggtgaagtcgtgctgaagatgaaagtggaagggatgacctgccattcatgtactagcactattgaaggaaaaattgggaaactgcaaggtgttcagcgaattaaagtctccctggacaatcaagaagctactattgtttatcaacctcatcttatctcagtagaggaaatgaaaaagcagattgaagctatgggctttccagcatttgtcaaaaagcagcccaagtacctcaaattgggagctattgatgtagaacgtctaaagaacacaccagttaaatcctcagaagggtcacagcaaaggagtccatcatataccaatgattcaacagccactttcatcattgatggcatgcattgtaaatcatgtgtgtcaaatattgaaagtactttatctgcactccaatatgtaagcagcatagtagtttctttagagaataggtctgccattgtgaagtataatgcaagctcagtcactccagaatccctgagaaaagcaatagaggctgtatcaccggggctatatagagttagtatcacaagtgaagttgagagtacctcaaactctccctccagctcatctcttcagaagattcctttgaatgtagttagccagcctctgacacaagaaactgtgataaacattgatggcatgacttgtaattcctgtgtgcagtctattgagggtgtcatatcaaaaaagccaggtgtaaaatccatacgagtctcccttgcaaatagcaatgggactgttgagtatgatcctctactaacctctccagaaacgttgagaggagcaatagaagacatgggatttgatgctaccttgtcagacacgaatgagccgttggtagtaatagctcagccttcatcggaaatgccgcttttgacttcaactaatgaattttatactaaagggatgacaccagttcaagacaaggaggaaggaaagaattcatctaagtgttacatacaggtcactggcatgacttgcgcttcctgtgtagcaaacattgaacggaatttaaggcgggaagaaggaatatattctatacttgtggccctgatggctggcaaggcagaagtaaggtataatcctgctgttatacaacccccaatgatagcagagttcatccgagaacttggatttggagccactgtgatagaaaatgctgatgaaggagatggtgttttggaacttgttgtgaggggaatgacgtgtgcctcctgcgtacataaaatagagtctagtctcacaaaacacagagggatcctatactgctccgtggccctggcaaccaacaaagcacatattaaatatgacccagaaattattggtcctagagatattatccatacaattgaaagcttaggttttgaagcttctttggtcaagaaggatcggtcagcaagtcacttagatcataaacgagaaataagacaatggagacggtcttttcttgtgagtctgtttttctgtattcctgtaatggggctgatgatatatatgatggttatggaccaccactttgcaactcttcaccataatcaaaacatgagtaaagaagaaatgatcaaccttcattcttctatgttcctggagcgccagattcttccaggattgtctgttatgaatttgctgtcctttttattgtgtgtacctgtacagggcaaaacatcagaggctcttgcaaagttaatttcactacaagctacagaagcaactattgtaactcttgattctgataatatcctcctcagtgaagaacaagtggatgtggaacttgtacaacgtggagatatcattaaagtagttccaggaggcaaatttccagtggatggtcgtgttattgaaggacattctatggtagatgagtccctcatcacaggggaggcaatgcctgtggctaagaaacctggcagcacagtgattgctggttccattaaccagaacgggtcactgcttatctgcgcaacacatgttggagcagacacaaccctttctcaaattgtcaaacttgtggaagaggcacaaacatcaaaggctcctatccagcagtttgcagacaaactcagtggctattttgttccttttattgtttttgtttccattgccaccctcttggtatggattgtaattggatttctgaattttgaaattgtggaaacctactttcctggctacaatagaagtatctcccgaacagaaacgataatacgatttgctttccaagcctctatcacagttctgtgtattgcatgtccctgttcactgggactggccactccaactgctgtgatggtgggtacaggagtaggtgctcaaaatggcatactaataaaaggtggagagccattggagatggctcataaggtaaaggtagtggtatttgataagactggaaccattactcacggaaccccagtggtgaatcaagtaaaggttctaactgaaagtaacagaatatcacaccataaaatcttggccattgtgggaactgctgaaagtaacagtgaacaccctctaggaacagccataaccaaatattgcaaacaggagctggacactgaaaccttgggtacctgcatagatttccaggttgtgccaggctgtggtattagctgtaaagtcaccaatattgaaggcttgctacataagaataactggaatatagaggacaataatattaaaaatgcatccctggttcaaattgatgccagtaatgaacagtcatcaacttcgtcttccatgattattgatgcccagatctcaaatgctcttaatgctcagcagtataaagtcctcattggtaaccgggagtggatgattagaaatggtcttgtcattaataacgatgtaaatgatttcatgactgaacatgagagaaaaggtcggactgctgtattagtagcagttgatgatgagctgtgtggcttgatagccattgcagacacagtgaagcctgaagcagaactggctatccatattctgaaatctatgggcttagaagtagttctgatgactggagacaacagtaaaacagctagatctattgcttctcaggttggcattactaaggtgtttgctgaagttctaccttctcacaaggttgctaaagtgaagcaacttcaagaggaggggaaacgggtagcaatggtgggagatggaatcaatgactccccagctctggcaatggctaatgtgggaattgctattggcacaggcacagatgtagccattgaagcagctgatgtggttttgataaggaatgatcttctggatgtagtggcaagtattgacttatcaagagagacagtcaagaggattcggataaattttgtctttgctctaatttataatctggttggaattcccatagctgctggagtttttatgcccattggtttggttttgcagccctggatgggatctgcagcaatggctgcttcatctgtttctgtagtactttcttctctcttccttaaactttacaggaaaccaacttacgagagttatgaactgcctgcccggagccagataggacagaagagtccttcagaaatcagcgttcatgttggaatagatgatacctcaaggaattctcctaaactgggtttgctggaccggattgttaattatagcagagcctctataaactcactactgtctgataaacgctccctaaacagtgttgttaccagtgaacctgacaagcactcactcctggtgggagacttcagggaagatgatgacactgcattataaaaggccatggagagtgctgccagtttaacttgtcatgcactgacacagcattcatgatgttaccttcacttttcaaaatattgtagaaggatttttctcatgctcttatattagggattctatttgagttgcgtttatctgttggcaaaaatatctttttcaaggcatcagctctgaacctagctttatttaaactgaatttccagtatatttttgttttcactaacaacagataaggtagagcagtgaggtttacaacaagccctacaattagagattgctgaactgctgctaaagtgattttttttttatttgaccaaaaaaaaaaaggcccaagaagaagaaaatgaaaaatttgaagatttgagagcatgaagatattcatgcttttgaactcaaaatattgaagatactctcaagcctgtatccctgccccactggggagcaatgactttcaaagcactgtgtataaaacatctagttttagaagggaaacagttgaaactgtttaaaaatagatgtgccttatttattgcaggctttctttcccccattctccctgcatccttgtccttgcaggtgcttttttagatgctccaatatgtcttcttttgttattttctttcgagctaaccaagtttaggtggtttttcattgattaaaaataactgacaactgttctaatattttgctcctttttaaattttgtagctcaaaagaccttaaaggtctgtagggttccctgcctcccatctttccactgttgtaaaaagtatatcaaattattccttcaagtttcctagctctgtgctcagtttcagttcactcctgccaagttggactctaagttattcttcatgtagtctgctgatctcagtctggaaacttaacattatgagccttttctgctcaaaaaattttcaaagattaaaactattatacatatacaggtcatataaaattacctggattcactaaatttgtttgttgttgttgttgttgttgttgttgttgttgagacagagtcttgttttgcagcccaggctggagtgcagtggcaccatcttggctcactgcaacctctgcctaccggattcaaggaattctccctgcctcagcctcctgagtagctaggattacaggtgcctgccaccacacccggctaattttcatatttttcagtagagacggggtttcgccatgttggctagcctggtcttaaactcctaacctcaggtgatccacccgccttggcctcccaaagtgctgggattacaggtgtgagcctccatgcccagcctaaatttgtattttttgaattgagtataatcactttgctagtatatataatttaatagattttatttatcttttagtgtttcagataacctctcaaaaagactttaaaataatgctattacacaaagctgcatttaccaaaaaatacagtaaaatcataatacagaaactaaaatttccctaggttatgacgctttttagctaaatatatactcttctctagtttaaaacatttgaacttgcctagttagtgtggttggcaaatttaggagcttgttcccattgccaaatggatttagaaattcccttgtgagtgcctggtagctaatacactggtcagagatctggtacttgtaagactatttaaatttctttgttagttgcaagatggatttcatatgcagaatatgtaaatgaagaggactcataagtaaattcctaacattttgttcccattaccagaagcaaagctgctgctaacccaacatctggcacataggatttgtactcggtaaatgttagttcttttctccccttgaggtcagtaataaatacaaaaaaatcatttttctagagcagagtcttaaaatcaggtgggggtaggggatggagttcttcctttcctaccccttttctcttttatcctttcatatatacacatgcaaagtttacaaccttattccatgctgtctttcagatttagaaaagatctaatttctgtctcagctgtcttaaagagagaactgaagcttttgatgaaggtgctattaatctagaaaggcaaacccatttcactgaaatatcaatgggtttgcatatctaggccctttttttagaccaatgcctatgccatcctccatgctttcagtttgagttttattatttattattttaattccagtggcccatcttataatacaacttgtttcttctagaagacagagctgatagggtaaatgttgaaaaaagaagcatgcctccttctccctcccacccacctcaagcagttgaacacagccagttattcttccattattatgtgtaccttggagtcatcctcttggtcttgtattcatattgtgggacagtgggaatagcagcttgtagtattgaaataatcaaagagataatttcagctcttacaacaagaacagaaaacatgctaattagaaaaagtcctgctttaagtaatatgtagccacatttgaatcctctaccacaagtcttttttgcaatcttgaactttcattagcttcaaagagaagctgtatttacaggagaaagaggtgattatggagggaatcaaaaatactgctttcagttagtagctagctttaagtcaggagttagtaatgagaaattttataaatgtgtatttctgtgtattcacatacatatatatatacacacatatatatgtacatacacatacatacatattaccatactgaagggaaatggatttatatttgaatttgatatttgaatatttgaagttctctatttatatttcatttatcactcttctgtattcactcagcaaccatgcccttagtctgaagataacaaggatactttaatatccagtgccggttcagactcacctatgtggcaccttaaacttaaatatccaaagatgccttttgaatttcaaagattaaaacacagctagagtagtagtattgtagtctcaagatgtatggtgtgtcatttgtgaaaatagaaacgttatttttcctagtttagtatcaacattttagaatgtcaaatttgatgccttgtgaacaagtaattttatattgtgctttaattttttaaaaagtattctttattcatatgtatagaatgcttaaaatagcactgtagacaagatgtttccaaaactttaagtgcgcatatcttttctgtatacagcttaaaatcaaaaatgtatgttaagagaattttttctattacttatggatcatgctttaaaatgatttttcttgatatttattttactccattttgtttttttctctgggtgaggcatctggttactggttattttaaaaagaataaagacattcctggaatcactccttttgggtttttgtttgttttgtttcttttctacatttttaagtattattttacaaaatagaaaaaatatagattcatgccaaattattacctatttttacactaactttctgcagtccctccatctggtatgagtaaccagatagagcacaaagcatgagttcttgttcttcagttaaaagagcttctttcacagtgttgataacaaatgccttttgtagccaaaaccaggcgtctcaaccttacgtttttagttaaagaaatgtttagctaaacgttgttgaacattgattgtttggtaccgaaaacagcagtggacgatgttgtgcaatatccatctactgtagttaagatattcagtagtttgtttttcataagcatgtaattgatcatatttctgccaaggatgtgccttcaactttataattatagtgttgtaaaata

SEQ ID NO: 100738 - DNA, 400 bp, Artificial Sequence
  derived and/or modified sequence
gttgttgctgccgccgccgcagccgcagctactgtgacttctccgattgtgtgagctttgttggagcctgcgtacgtggatttatcgctgccacggtctgcgtagctccagaggtttaaccataggatagagaaaccaggaatgtaatgaggaaatcaaaatggatccaagtatgggtgtgaattctgttaccatttctgttgagggtatgacttgcaattcctgtgtttggaccattgagcagcagattggaaaagtgaatggtgtgcatcacattaaggtatcactggaagaaaaaaatgcaactattattttttatgcccattggtttggttttgcagccctggatgggatctgcagcaatggctgcttcatctgtttctgtagtactttcttctct

SEQ ID NO: 100739 - DNA, 5497 bp, Artificial Sequence
  derived and/or modified sequence
gttgttgctgccgccgccgcagccgcagctactgtgacttctccgattgtgtgagctttgttggagcctgcgtacgtggatttatcgctgccacggtctgcgtagctccagaggtttaaccataggatagagaaaccaggaatgtaatgaggaaatcaaaatggatccaagtatgggtgtgaattctgttaccatttctgttgagggtatgacttgcaattcctgtgtttggaccattgagcagcagattggaaaagtgaatggtgtgcatcacattaaggtaaaggtagtggtatttgataagactggaaccattactcacggaaccccagtggtgaatcaagtaaaggttctaactgaaagtaacagaatatcacaccataaaatcttggccattgtgggaactgctgaaagtaacagtgaacaccctctaggaacagccataaccaaatattgcaaacaggagctggacactgaaaccttgggtacctgcatagatttccaggttgtgccaggctgtggtattagctgtaaagtcaccaatattgaaggcttgctacataagaataactggaatatagaggacaataatattaaaaatgcatccctggttcaaattgatgccagtaatgaacagtcatcaacttcgtcttccatgattattgatgcccagatctcaaatgctcttaatgctcagcagtataaagtcctcattggtaaccgggagtggatgattagaaatggtcttgtcattaataacgatgtaaatgatttcatgactgaacatgagagaaaaggtcggactgctgtattagtagcagttgatgatgagctgtgtggcttgatagccattgcagacacagtgaagcctgaagcagaactggctatccatattctgaaatctatgggcttagaagtagttctgatgactggagacaacagtaaaacagctagatctattgcttctcaggttggcattactaaggtgtttgctgaagttctaccttctcacaaggttgctaaagtgaagcaacttcaagaggaggggaaacgggtagcaatggtgggagatggaatcaatgactccccagctctggcaatggctaatgtgggaattgctattggcacaggcacagatgtagccattgaagcagctgatgtggttttgataaggaatgatcttctggatgtagtggcaagtattgacttatcaagagagacagtcaagaggattcggataaattttgtctttgctctaatttataatctggttggaattcccatagctgctggagtttttatgcccattggtttggttttgcagccctggatgggatctgcagcaatggctgcttcatctgtttctgtagtactttcttctctcttccttaaactttacaggaaaccaacttacgagagttatgaactgcctgcccggagccagataggacagaagagtccttcagaaatcagcgttcatgttggaatagatgatacctcaaggaattctcctaaactgggtttgctggaccggattgttaattatagcagagcctctataaactcactactgtctgataaacgctccctaaacagtgttgttaccagtgaacctgacaagcactcactcctggtgggagacttcagggaagatgatgacactgcattataaaaggccatggagagtgctgccagtttaacttgtcatgcactgacacagcattcatgatgttaccttcacttttcaaaatattgtagaaggatttttctcatgctcttatattagggattctatttgagttgcgtttatctgttggcaaaaatatctttttcaaggcatcagctctgaacctagctttatttaaactgaatttccagtatatttttgttttcactaacaacagataaggtagagcagtgaggtttacaacaagccctacaattagagattgctgaactgctgctaaagtgattttttttttatttgaccaaaaaaaaaaaggcccaagaagaagaaaatgaaaaatttgaagatttgagagcatgaagatattcatgcttttgaactcaaaatattgaagatactctcaagcctgtatccctgccccactggggagcaatgactttcaaagcactgtgtataaaacatctagttttagaagggaaacagttgaaactgtttaaaaatagatgtgccttatttattgcaggctttctttcccccattctccctgcatccttgtccttgcaggtgcttttttagatgctccaatatgtcttcttttgttattttctttcgagctaaccaagtttaggtggtttttcattgattaaaaataactgacaactgttctaatattttgctcctttttaaattttgtagctcaaaagaccttaaaggtctgtagggttccctgcctcccatctttccactgttgtaaaaagtatatcaaattattccttcaagtttcctagctctgtgctcagtttcagttcactcctgccaagttggactctaagttattcttcatgtagtctgctgatctcagtctggaaacttaacattatgagccttttctgctcaaaaaattttcaaagattaaaactattatacatatacaggtcatataaaattacctggattcactaaatttgtttgttgttgttgttgttgttgttgttgttgttgagacagagtcttgttttgcagcccaggctggagtgcagtggcaccatcttggctcactgcaacctctgcctaccggattcaaggaattctccctgcctcagcctcctgagtagctaggattacaggtgcctgccaccacacccggctaattttcatatttttcagtagagacggggtttcgccatgttggctagcctggtcttaaactcctaacctcaggtgatccacccgccttggcctcccaaagtgctgggattacaggtgtgagcctccatgcccagcctaaatttgtattttttgaattgagtataatcactttgctagtatatataatttaatagattttatttatcttttagtgtttcagataacctctcaaaaagactttaaaataatgctattacacaaagctgcatttaccaaaaaatacagtaaaatcataatacagaaactaaaatttccctaggttatgacgctttttagctaaatatatactcttctctagtttaaaacatttgaacttgcctagttagtgtggttggcaaatttaggagcttgttcccattgccaaatggatttagaaattcccttgtgagtgcctggtagctaatacactggtcagagatctggtacttgtaagactatttaaatttctttgttagttgcaagatggatttcatatgcagaatatgtaaatgaagaggactcataagtaaattcctaacattttgttcccattaccagaagcaaagctgctgctaacccaacatctggcacataggatttgtactcggtaaatgttagttcttttctccccttgaggtcagtaataaatacaaaaaaatcatttttctagagcagagtcttaaaatcaggtgggggtaggggatggagttcttcctttcctaccccttttctcttttatcctttcatatatacacatgcaaagtttacaaccttattccatgctgtctttcagatttagaaaagatctaatttctgtctcagctgtcttaaagagagaactgaagcttttgatgaaggtgctattaatctagaaaggcaaacccatttcactgaaatatcaatgggtttgcatatctaggccctttttttagaccaatgcctatgccatcctccatgctttcagtttgagttttattatttattattttaattccagtggcccatcttataatacaacttgtttcttctagaagacagagctgatagggtaaatgttgaaaaaagaagcatgcctccttctccctcccacccacctcaagcagttgaacacagccagttattcttccattattatgtgtaccttggagtcatcctcttggtcttgtattcatattgtgggacagtgggaatagcagcttgtagtattgaaataatcaaagagataatttcagctcttacaacaagaacagaaaacatgctaattagaaaaagtcctgctttaagtaatatgtagccacatttgaatcctctaccacaagtcttttttgcaatcttgaactttcattagcttcaaagagaagctgtatttacaggagaaagaggtgattatggagggaatcaaaaatactgctttcagttagtagctagctttaagtcaggagttagtaatgagaaattttataaatgtgtatttctgtgtattcacatacatatatatatacacacatatatatgtacatacacatacatacatattaccatactgaagggaaatggatttatatttgaatttgatatttgaatatttgaagttctctatttatatttcatttatcactcttctgtattcactcagcaaccatgcccttagtctgaagataacaaggatactttaatatccagtgccggttcagactcacctatgtggcaccttaaacttaaatatccaaagatgccttttgaatttcaaagattaaaacacagctagagtagtagtattgtagtctcaagatgtatggtgtgtcatttgtgaaaatagaaacgttatttttcctagtttagtatcaacattttagaatgtcaaatttgatgccttgtgaacaagtaattttatattgtgctttaattttttaaaaagtattctttattcatatgtatagaatgcttaaaatagcactgtagacaagatgtttccaaaactttaagtgcgcatatcttttctgtatacagcttaaaatcaaaaatgtatgttaagagaattttttctattacttatggatcatgctttaaaatgatttttcttgatatttattttactccattttgtttttttctctgggtgaggcatctggttactggttattttaaaaagaataaagacattcctggaatcactccttttgggtttttgtttgttttgtttcttttctacatttttaagtattattttacaaaatagaaaaaatatagattcatgccaaattattacctatttttacactaactttctgcagtccctccatctggtatgagtaaccagatagagcacaaagcatgagttcttgttcttcagttaaaagagcttctttcacagtgttgataacaaatgccttttgtagccaaaaccaggcgtctcaaccttacgtttttagttaaagaaatgtttagctaaacgttgttgaacattgattgtttggtaccgaaaacagcagtggacgatgttgtgcaatatccatctactgtagttaagatattcagtagtttgtttttcataagcatgtaattgatcatatttctgccaaggatgtgccttcaactttataattatagtgttgtaaaata

SEQ ID NO: 100740 - DNA, 5226 bp, Artificial Sequence
  derived and/or modified sequence
agaaatcaggaatgtaatgaggaaatcaaaatggatccaagtatgggtgtgaattctgttaccatttctgttgagggtatgacttgcaattcctgtgtttggaccattgagcagcagattggaaaagtgaatggtgtgcatcacattaaggtatcactggaagaaaaaaatgcaactattatttatgaccctaaactacagactccaaagaccctacaggaagctattgatgacatgggctttgatgctgttatccataatcctgaccctctccctgttttaactgacaccttgtttctgactgttacggcgtcactgactttgccatgggaccatatccaaagcacattgctgaagaccaagggtgtgacagacattaaaatttaccctcagaaaagaactgtagcagtgacaataatcccttctatagtgaatgccaatcagataaaagagctggttccagaactcagtttagatactgggacactggagaaaaagtcaggagcttgtgaagatcatagtatggctcaagctggtgaagtcgtgctgaagatgaaagtggaagggatgacctgccattcatgtactagcactattgaaggaaaaattgggaaactgcaaggtgttcagcgaattaaagtctccctggacaatcaagaagctactattgtttatcaacctcatcttatctcagtagaggaaatgaaaaagcagattgaagctatgggctttccagcatttgtcaaaaagcagcccaagtacctcaaattgggagctattgatgtagaacgtctaaagaacacaccagttaaatcctcagaagggtcacagcaaaggagtccatcatataccaatgattcaacagccactttcatcattgatggcatgcattgtaaatcatgtgtgtcaaatattgaaagtactttatctgcactccaatatgtaagcagcatagtagtttctttagagaataggtctgccattgtgaagtataatgcaagctcagtcactccagaatccctgagaaaagcaatagaggctgtatcaccggggctatatagagttagtatcacaagtgaagttgagagtacctcaaactctccctccagctcatctcttcagaagattcctttgaatgtagttagccagcctctgacacaagaaactgtgataaacattgatggcatgacttgtaattcctgtgtgcagtctattgagggtgtcatatcaaaaaagccaggtgtaaaatccatacgagtctcccttgcaaatagcaatgggactgttgagtatgatcctctactaacctctccagaaacgttgagaggagcaatagaagacatgggatttgatgctaccttgtcagacacgaatgagccgttggtagtaatagctcagccttcatcggaaatgccgcttttgacttcaactaatgaattttatactaaagggatgacaccagttcaagacaaggaggaaggaaagaattcatctaagtgttacatacaggtcactggcatgacttgcgcttcctgtgtagcaaacattgaacggaatttaaggcgggaagaaggaatatattctatacttgtggccctgatggctggcaaggcagaagtaaggtataatcctgctgttatacaacccccaatgatagcagagttcatccgagaacttggatttggagccactgtgatagaaaatgctgatgaaggagatggtgttttggaacttgttgtgaggggaatgacgtgtgcctcctgcgtacataaaatagagtctagtctcacaaaacacagagggatcctatactgctccgtggccctggcaaccaacaaagcacatattaaatatgacccagaaattattggtcctagagatattatccatacaattgaagtaagtgccaagaatttatgtttctgtgttcttacctatttaatcagcactcccgtgaatcatttctggtttgcatcagatagaggcaatgaaaaaaaatctaactcctttgaacacttcaaacaagatctgtctcaaaatttaatgtaaacgtgtctgcatttttttttttggtctttttcaggaaaagttaggcaaaggtacatttacactattaatcaggagcaaacaagttagaaccacaaaacacttaaaatatttagaaaatggaaataaagtataatttgttataaataagattcatattagttactaagaaagtgaaggatcctgcttgatggctttttgtttgttaggtcaaaacaaaagacctatttttaagttaaagtaagaaatttaaaagactaaacccagctggacatagtggctcatgcctataatctcagcattttgagaggcctagagggcacaatcacttgaggccaggagttcaagaccatcctgggcaatgtagcgagaccctgtctctgcaacaaaaattaaaataactagccaggtgtggtgccacgcacccatagtattaatcacacgagaagcagaggtaggaggattgcttaagtccaggagttgaaggttactgtgagagagaccttgtctctaaaacaaacaaacaaacaaacacaatcctttctttgtgacagattcatcctgtgttcttcaataagtcttaagtggtaatacatgtgaatgtattttaaaagtttcagtatgctatagaattggtgttcaagtgatttaaagcattttattagttcagttaagatcctatttgtatagatgacattatcattaccatttttgtgaaactagttttactgagtacctgctatgtgccagttaccaagattgcaaagcttcaacccttaattcccacagcaatgtggtcatattcattttggaggtgaggaaacccaggttaagagaagttaagttacttatccaaagtcacatagctaataactgtcataactgggatttgagcctaattactctgactccaaaagctcatgcttgttctattcactgtgcactgccaacaaatgtaagatggcagcatttcccctagcagttggaaatgtaatgtgtattactatctatggtcagataagtcttgcttaggggtagtttcctttttatactttgttttattggggaaaatgatttttgttcatgttctttttctgataaaacaagactaaatactgcatatgcaaggccttgaataatatgtttagtatggtgctagcttttttttttttttttttttttttttggagacagagtctcactctgtcgcctgggctggagtgcagtggtgcgatctcagctcactgcaacctccgcctcctgggttcaagcgattctcctgtctcagcttcccgagcagctgggattacaggcacctgccactatttccagctaattttttgtatttttagtagagacggggtttcaccgtgttggccatactgctctcgaactcctgactttgtgatttgcccaccttggcctcccaaagtgctgggattacaggcatgagccaccgtgcccggcctggtgctagcttttatggcctattaatgagaacctctactgaggacagttgtacttgagttaaactcttatatataggatacatattaactagcattaaggaaatatttatttgtttgatgaaagattggaaacaaatgcaatcaagagcaggaagcacatcttcatctttgtattccccagagtgacttgccctcagtaattgaactgttcttaatgacaataccatggcttagaatttctctatacaatatttatatgttcagtgaaataatttttttctcatgaatttccttagagcttaggttttgaagcttctttggtcaagaaggatcggtcagcaagtcacttagatcataaacgagaaataagacagtaagtactttggagtgtcagtaaaaaacagattttgactccttattacaaatttttttttgcatgtcagtttttataatatcatccttatactggatgaaatggtcacaatgtatatctctctgtagtatgtagaatctttacccattagctatttatgaccatgatttttctttttttattttttccatataagatggagacggtcttttcttgtgagtctgtttttctgtattcctgtaatggggctgatgatatatatgatggttatggaccaccactttgcaactcttcaccataatcaaaacatgagtaaagaagaaatgatcaaccttcattcttctatgttcctggagcgccagattcttccaggattgtctgttatgaatttgctgtcctttttattgtgtgtacctgtacaggcaagtgaattgttagcaaatatatttgttaataataaaaaataagcaaaatttggcaggcaaggtttattttcagctacaaaactgatgttagctagaagtctgatcattttatgccatatgctttacaaaaataatcttcaactgggtagttatttaagttgataatagatgccatttaacccctaagaaagagttcaagttttttgggtttggtatttatatctgctactgtatataactttattttatttttaaatttttatttatctatttttttttttttagagatggggttttgctctgtcacccaggctggaatgcagtggtgtaagcacagctcactgtggtcttgaactcctgggctcaagcattccttctgcctcagcattctgagtagctgggacttccaggcactagccactgcacccagctcaatgactttatttttgttatttcttcctggcacttcagttcattactttctgtatgttttaaactcttttttcgagataaacttttactttggaatagaatacttctatcaaataaatcttttcctttatctgatccttataaaaggcaataatgattttaaaaaacatcttagtttctctgttttaatgaaataagctttccagttatatttaccaacaaaaacggccaacagatttcgtagcttgtgatataccagttagtttgagttttggaaagatgggtgagttttatacaaaaaaatccttgagaaaatgtaattcctttcttagttcttgtttttgctagcctcagaaagaaaaatctgcttggtgtgatggctcatgcctataatcccagctacttgggaggctgaggcaggaggattgcttgaggccaggagtttgagaccagcctgggcaacatatcaagactgtctctt

SEQ ID NO: 100741 - DNA, 4269 bp, Artificial Sequence
  derived and/or modified sequence
atggaccccagcatgggcgtgaacagcgtgaccatcagcgtggagggcatgacctgcaacagctgcgtgtggaccatcgagcagcagatcggcaaggtgaacggcgtgcaccacatcaaggtgagcctggaggagaagaacgccaccatcatctacgaccccaagctgcagacccccaagaccctgcaggaggccatcgacgacatgggcttcgacgccgtgatccacaaccccgaccccctgcccgtgctgaccgacaccctgttcctgaccgtgaccgccagcctgaccctgccctgggaccacatccagagcaccctgctgaagaccaagggcgtgaccgacatcaagatctacccccagaagagaaccgtggccgtgaccatcatccccagcatcgtgaacgccaaccagatcaaggagctggtgcccgagctgagcctggacaccggcaccctggagaagaagagcggcgcctgcgaggaccacagcatggcccaggccggcgaggtggtgctgaagatgaaggtggagggcatgacctgccacagctgcaccagcaccatcgagggcaagatcggcaagctgcagggcgtgcagagaatcaaggtgagcctggacaaccaggaggccaccatcgtgtaccagccccacctgatcagcgtggaggagatgaagaagcagatcgaggccatgggcttccccgccttcgtgaagaagcagcccaagtacctgaagctgggcgccatcgacgtggagagactgaagaacacccccgtgaagagcagcgagggcagccagcagagaagccccagctacaccaacgacagcaccgccaccttcatcatcgacggcatgcactgcaagagctgcgtgagcaacatcgagagcaccctgagcgccctgcagtacgtgagcagcatcgtggtgagcctggagaacagaagcgccatcgtgaagtacaacgccagcagcgtgacccccgagagcctgagaaaggccatcgaggccgtgagccccggcctgtacagagtgagcatcaccagcgaggtggagagcaccagcaacagccccagcagcagcagcctgcagaagatccccctgaacgtggtgagccagcccctgacccaggagaccgtgatcaacatcgacggcatgacctgcaacagctgcgtgcagagcatcgagggcgtgatcagcaagaagcccggcgtgaagagcatcagagtgagcctggccaacagcaacggcaccgtggagtacgaccccctgctgaccagccccgagaccctgagaggcgccatcgaggacatgggcttcgacgccaccctgagcgacaccaacgagcccctggtggtgatcgcccagcccagcagcgagatgcccctgctgaccagcaccaacgagttctacaccaagggcatgacccccgtgcaggacaaggaggagggcaagaacagcagcaagtgctacatccaggtgaccggcatgacctgcgccagctgcgtggccaacatcgagagaaacctgagaagagaggagggcatctacagcatcctggtggccctgatggccggcaaggccgaggtgagatacaaccccgccgtgatccagccccccatgatcgccgagttcatcagagagctgggcttcggcgccaccgtgatcgagaacgccgacgagggcgacggcgtgctggagctggtggtgagaggcatgacctgcgccagctgcgtgcacaagatcgagagcagcctgaccaagcacagaggcatcctgtactgcagcgtggccctggccaccaacaaggcccacatcaagtacgaccccgagatcatcggccccagagacatcatccacaccatcgagagcctgggcttcgaggccagcctggtgaagaaggacagaagcgccagccacctggaccacaagagagagatcagacagtggagaagaagcttcctggtgagcctgttcttctgcatccccgtgatgggcctgatgatctacatgatggtgatggaccaccacttcgccaccctgcaccacaaccagaacatgagcaaggaggagatgatcaacctgcacagcagcatgttcctggagagacagatcctgcccggcctgagcgtgatgaacctgctgagcttcctgctgtgcgtgcccgtgcagggcaagaccagcgaggccctggccaagctgatcagcctgcaggccaccgaggccaccatcgtgaccctggacagcgacaacatcctgctgagcgaggagcaggtggacgtggagctggtgcagagaggcgacatcatcaaggtggtgcccggcggcaagttccccgtggacggcagagtgatcgagggccacagcatggtggacgagagcctgatcaccggcgaggccatgcccgtggccaagaagcccggcagcaccgtgatcgccggcagcatcaaccagaacggcagcctgctgatctgcgccacccacgtgggcgccgacaccaccctgagccagatcgtgaagctggtggaggaggcccagaccagcaaggcccccatccagcagttcgccgacaagctgagcggctacttcgtgcccttcatcgtgttcgtgagcatcgccaccctgctggtgtggatcgtgatcggcttcctgaacttcgagatcgtggagacctacttccccggctacaacagaagcatcagcagaaccgagaccatcatcagattcgccttccaggccagcatcaccgtgctgtgcatcgcctgcccctgcagcctgggcctggccacccccaccgccgtgatggtgggcaccggcgtgggcgcccagaacggcatcctgatcaagggcggcgagcccctggagatggcccacaaggtgaaggtggtggtgttcgacaagaccggcaccatcacccacggcacccccgtggtgaaccaggtgaaggtgctgaccgagagcaacagaatcagccaccacaagatcctggccatcgtgggcaccgccgagagcaacagcgagcaccccctgggcaccgccatcaccaagtactgcaagcaggagctggacaccgagaccctgggcacctgcatcgacttccaggtggtgcccggctgcggcatcagctgcaaggtgaccaacatcgagggcctgctgcacaagaacaactggaacatcgaggacaacaacatcaagaacgccagcctggtgcagatcgacgccagcaacgagcagagcagcaccagcagcagcatgatcatcgacgcccagatcagcaacgccctgaacgcccagcagtacaaggtgctgatcggcaacagagagtggatgatcagaaacggcctggtgatcaacaacgacgtgaacgacttcatgaccgagcacgagagaaagggcagaaccgccgtgctggtggccgtggacgacgagctgtgcggcctgatcgccatcgccgacaccgtgaagcccgaggccgagctggccatccacatcctgaagagcatgggcctggaggtggtgctgatgaccggcgacaacagcaagaccgccagaagcatcgccagccaggtgggcatcaccaaggtgttcgccgaggtgctgcccagccacaaggtggccaaggtgaagcagctgcaggaggagggcaagagagtggccatggtgggcgacggcatcaacgacagccccgccctggccatggccaacgtgggcatcgccatcggcaccggcaccgacgtggccatcgaggccgccgacgtggtgctgatcagaaacgacctgctggacgtggtggccagcatcgacctgagcagagagaccgtgaagagaatcagaatcaacttcgtgttcgccctgatctacaacctggtgggcatccccatcgccgccggcgtgttcatgcccatcggcctggtgctgcagccctggatgggcagcgccgccatggccgccagcagcgtgagcgtggtgctgagcagcctgttcctgaagctgtacagaaagcccacctacgagagctacgagctgcccgccagaagccagatcggccagaagagccccagcgagatcagcgtgcacgtgggcatcgacgacaccagcagaaacagccccaagctgggcctgctggacagaatcgtgaactacagcagagccagcatcaacagcctgctgagcgacaagagaagcctgaacagcgtggtgaccagcgagcccgacaagcacagcctgctggtgggcgacttcagagaggacgacgacaccgccctgtag

SEQ ID NO: 100742 - DNA, 264 bp, Artificial Sequence
  derived and/or modified sequence
gagtgcaacgaggagatcaagatggaccccagcatgggcgtgaacagcgtgaccatcagcgtggagggcatgacctgcaacagctgcgtgtggaccatcgagcagcagatcggcaaggtgaacggcgtgcaccacatcaaggtgagcctggaggagaagaacgccaccatcatcttctacgcccactggttcggcttcgccgccctggacggcatctgcagcaacggctgcttcatctgcttctgcagcaccttcttcagctag

SEQ ID NO: 100743 - DNA, 1512 bp, Artificial Sequence
  derived and/or modified sequence
atggaccccagcatgggcgtgaacagcgtgaccatcagcgtggagggcatgacctgcaacagctgcgtgtggaccatcgagcagcagatcggcaaggtgaacggcgtgcaccacatcaaggtgaaggtggtggtgttcgacaagaccggcaccatcacccacggcacccccgtggtgaaccaggtgaaggtgctgaccgagagcaacagaatcagccaccacaagatcctggccatcgtgggcaccgccgagagcaacagcgagcaccccctgggcaccgccatcaccaagtactgcaagcaggagctggacaccgagaccctgggcacctgcatcgacttccaggtggtgcccggctgcggcatcagctgcaaggtgaccaacatcgagggcctgctgcacaagaacaactggaacatcgaggacaacaacatcaagaacgccagcctggtgcagatcgacgccagcaacgagcagagcagcaccagcagcagcatgatcatcgacgcccagatcagcaacgccctgaacgcccagcagtacaaggtgctgatcggcaacagagagtggatgatcagaaacggcctggtgatcaacaacgacgtgaacgacttcatgaccgagcacgagagaaagggcagaaccgccgtgctggtggccgtggacgacgagctgtgcggcctgatcgccatcgccgacaccgtgaagcccgaggccgagctggccatccacatcctgaagagcatgggcctggaggtggtgctgatgaccggcgacaacagcaagaccgccagaagcatcgccagccaggtgggcatcaccaaggtgttcgccgaggtgctgcccagccacaaggtggccaaggtgaagcagctgcaggaggagggcaagagagtggccatggtgggcgacggcatcaacgacagccccgccctggccatggccaacgtgggcatcgccatcggcaccggcaccgacgtggccatcgaggccgccgacgtggtgctgatcagaaacgacctgctggacgtggtggccagcatcgacctgagcagagagaccgtgaagagaatcagaatcaacttcgtgttcgccctgatctacaacctggtgggcatccccatcgccgccggcgtgttcatgcccatcggcctggtgctgcagccctggatgggcagcgccgccatggccgccagcagcgtgagcgtggtgctgagcagcctgttcctgaagctgtacagaaagcccacctacgagagctacgagctgcccgccagaagccagatcggccagaagagccccagcgagatcagcgtgcacgtgggcatcgacgacaccagcagaaacagccccaagctgggcctgctggacagaatcgtgaactacagcagagccagcatcaacagcctgctgagcgacaagagaagcctgaacagcgtggtgaccagcgagcccgacaagcacagcctgctggtgggcgacttcagagaggacgacgacaccgccctgtag

SEQ ID NO: 100744 - DNA, 2049 bp, Artificial Sequence
  derived and/or modified sequence
agaaaccaggagtgcaacgaggagatcaagatggaccccagcatgggcgtgaacagcgtgaccatcagcgtggagggcatgacctgcaacagctgcgtgtggaccatcgagcagcagatcggcaaggtgaacggcgtgcaccacatcaaggtgagcctggaggagaagaacgccaccatcatctacgaccccaagctgcagacccccaagaccctgcaggaggccatcgacgacatgggcttcgacgccgtgatccacaaccccgaccccctgcccgtgctgaccgacaccctgttcctgaccgtgaccgccagcctgaccctgccctgggaccacatccagagcaccctgctgaagaccaagggcgtgaccgacatcaagatctacccccagaagagaaccgtggccgtgaccatcatccccagcatcgtgaacgccaaccagatcaaggagctggtgcccgagctgagcctggacaccggcaccctggagaagaagagcggcgcctgcgaggaccacagcatggcccaggccggcgaggtggtgctgaagatgaaggtggagggcatgacctgccacagctgcaccagcaccatcgagggcaagatcggcaagctgcagggcgtgcagagaatcaaggtgagcctggacaaccaggaggccaccatcgtgtaccagccccacctgatcagcgtggaggagatgaagaagcagatcgaggccatgggcttccccgccttcgtgaagaagcagcccaagtacctgaagctgggcgccatcgacgtggagagactgaagaacacccccgtgaagagcagcgagggcagccagcagagaagccccagctacaccaacgacagcaccgccaccttcatcatcgacggcatgcactgcaagagctgcgtgagcaacatcgagagcaccctgagcgccctgcagtacgtgagcagcatcgtggtgagcctggagaacagaagcgccatcgtgaagtacaacgccagcagcgtgacccccgagagcctgagaaaggccatcgaggccgtgagccccggcctgtacagagtgagcatcaccagcgaggtggagagcaccagcaacagccccagcagcagcagcctgcagaagatccccctgaacgtggtgagccagcccctgacccaggagaccgtgatcaacatcgacggcatgacctgcaacagctgcgtgcagagcatcgagggcgtgatcagcaagaagcccggcgtgaagagcatcagagtgagcctggccaacagcaacggcaccgtggagtacgaccccctgctgaccagccccgagaccctgagaggcgccatcgaggacatgggcttcgacgccaccctgagcgacaccaacgagcccctggtggtgatcgcccagcccagcagcgagatgcccctgctgaccagcaccaacgagttctacaccaagggcatgacccccgtgcaggacaaggaggagggcaagaacagcagcaagtgctacatccaggtgaccggcatgacctgcgccagctgcgtggccaacatcgagagaaacctgagaagagaggagggcatctacagcatcctggtggccctgatggccggcaaggccgaggtgagatacaaccccgccgtgatccagccccccatgatcgccgagttcatcagagagctgggcttcggcgccaccgtgatcgagaacgccgacgagggcgacggcgtgctggagctggtggtgagaggcatgacctgcgccagctgcgtgcacaagatcgagagcagcctgaccaagcacagaggcatcctgtactgcagcgtggccctggccaccaacaaggcccacatcaagtacgaccccgagatcatcggccccagagacatcatccacaccatcgaggtgagcgccaagaacctgtgcttctgcgtgctgacctacctgatcagcacccccgtgaaccacttctggttcgccagcgacagaggcaacgagaagaagagcaacagcttcgagcacttcaagcaggacctgagccagaacctgatgtag

SEQ ID NO: 100745 - DNA, 825 bp, Artificial Sequence
  derived and/or modified sequence
atggaccccagcatgggcgtgaacagcgtgaccatcagcgtggagggcatgacctgcaacagctgcgtgtggaccatcgagcagcagatcggcaaggtgaacggcgtgcaccacatcaaggtgagcctggaggagaagaacgccaccatcatctacgaccccaagctgcagacccccaagaccctgcaggaggccatcgacgacatgggcttcgacgccgtgatccacaaccccgaccccctgcccgtgctgaccgacaccctgttcctgaccgtgaccgccagcctgaccctgccctgggaccacatccagagcaccctgctgaagaccaagggcgtgaccgacatcaagatctacccccagaagagaaccgtggccgtgaccatcatccccagcatcgtgaacgccaaccagatcaaggagctggtgcccgagctgagcctggacaccggcaccctggagaagaagagcggcgcctgcgaggaccacagcatggcccaggccggcgaggtggtgctgaagatgaaggtggagggcatgacctgccacagctgcaccagcaccatcgagggcaagatcggcaagctgcagggcgtgcagagaatcaaggtgagcctggacaaccaggaggccaccatcgtgtaccagccccacctgatcagcgtggaggagatgaagaagcagatcgaggccatgggcttccccgccttcgtgaagaagcagcccaagtacctgaagctgggcgccatcgacgtggagagactgaagaacacccccgtgaagagcagcgagggcagccagcagagaagccccagctaccagtag

SEQ ID NO: 100746 - DNA, 504 bp, Artificial Sequence
  derived and/or modified sequence
atgactggcatgaccgctgacagccgttcacaggtgcagagggctcgttacgaggcagccaactggaagtataagtatggttacgagatccctgtggacatgctgtgcaaaaggatagccgatatctcacaggtgtacacccagaacgcagagatgcgccctctgggatgttgcatgatccttattgggattgatgaggaacagggcccccaagtgtacaagtgtgaccctgctggttactattgtgggtttaaggcaactgccgctggcgtgaagcagacagagtccacatcctttcttgaaaagaaggtgaagaaaaaattcgattggacgtttgagcagacagtggagacagccataacctgtcttagcacagtgctgagcattgactttaagccatccgagatcgaagtgggtgttgtcactgtggagaaccctaagtttcggatcctcaccgaagctgagatcgacgcccacctggttgccctggccgagagagattag

SEQ ID NO: 100747 - DNA, 504 bp, Artificial Sequence
  derived and/or modified sequence
atgacaggcatgacagctgacagccgcagccaggtgcagagggcccgctatgaagctgccaactggaagtacaagtatggctatgagatccctgtggacatgctgtgcaagagaattgctgacatcagccaggtgtacacccagaatgctgagatgaggcccctgggctgctgcatgatcctgattggaattgatgaggagcagggcccccaggtgtacaagtgtgaccctgctggctactactgcggcttcaaggccacagctgctggggtgaagcagacagagagcaccagcttcctggagaagaaggtgaagaagaagtttgactggacctttgagcagacagtggagacagccatcacctgcctgagcacagtgctgagcattgacttcaagcccagcgagattgaggtgggcgtggtgacagtggagaaccccaagttccgcatcctgacagaggccgagattgatgcccacctggtggccctggccgagcgggactag

SEQ ID NO: 100748 - DNA, 504 bp, Artificial Sequence
  derived and/or modified sequence
atgaccggcatgaccgccgacagccggagccaggtgcagcgggccagatacgaagcggccaattggaagtacaagtacggttatgaaattccagttgacatgctgtgcaaacggattgctgatatcagtcaagtctacacacagaacgcagagatgagaccccttggttgttgcatgattctgattggaattgatgaggagcaaggcccccaggtgtacaaatgcgatcctgcaggctattattgcgggtttaaggccactgccgccggcgtgaagcaaacggagtccacctccttcctcgaaaaaaaggtgaagaagaagtttgattggacttttgagcagaccgttgaaacagctatcacttgtctgtctactgtgctgtcgattgattttaagccttccgagatagaagtcggcgttgttacagttgagaaccccaaattccgtattctcactgaggctgaaatcgacgctcatctagtggccctggcagaaagagactag

SEQ ID NO: 100749 - DNA, 504 bp, Artificial Sequence
  derived and/or modified sequence
atgacaggcatgaccgcggatagtaggtcacaggtacagcgggcaaggtacgaggccgctaattggaagtacaaatacgggtatgagatccctgtggatatgctttgcaagcggatagccgatatctcccaagtgtacacacaaaacgcggaaatgcgtcccctgggctgttgtatgatactcattgggattgacgaagagcagggacctcaggtctataagtgtgaccctgcaggctactactgtggatttaaagctacagcagcaggggtgaagcaaacagaatcaacttctttccttgagaagaaagttaagaaaaaatttgactggacttttgagcagaccgtggagacagccattacctgcctgagcaccgtcctgtcgatcgacttcaaaccctccgagatagaagtgggagtggtcactgttgaaaacccaaagttcaggatcctaactgaagccgaaatcgatgcccacttagtcgcactggccgaacgagactag

SEQ ID NO: 100750 - DNA, 504 bp, Artificial Sequence
  derived and/or modified sequence
atgaccggcatgaccgccgacagcagaagccaggtgcagagagccagatacgaggccgccaactggaagtacaagtacggctacgagatccccgtggacatgctgtgcaagagaatcgccgacatcagccaggtgtacacccagaacgccgagatgagacccctgggctgctgcatgatcctgatcggcatcgacgaggagcagggcccccaggtgtacaagtgcgaccccgccggctactactgcggcttcaaggccaccgccgccggcgtgaagcagaccgagagcaccagcttcctggagaagaaggtgaagaagaagttcgactggaccttcgagcagaccgtggagaccgccatcacctgcctgagcaccgtgctgagcatcgacttcaagcccagcgagatcgaggtgggcgtggtgaccgtggagaaccccaagttcagaatcctgaccgaggccgagatcgacgcccacctggtggccctggccgagagagactag

SEQ ID NO: 100751 - protein, 227 aa, Artificial Sequence
  derived and/or modified sequence
MAGLRREYAFKAINQGGLTSVAVRGKDCAVIVTQKKVPDKLLDSSTVTHLFKITENIGCVMTGMTADSRSQVQRARYEAANWKYKYGYEIPVDMLCKRIADISQVYTQNAEMRPLGCCMILIGIDEEQGPQVYKCDPAGYYCGFKATAAGVKQTESTSFLEKKVKKKFDWTFEQTVETAITCLSTVLSIDFKPSEIEVGVVTVENPKFRILTEAEIDAHLVALAERD

SEQ ID NO: 100752 - protein, 167 aa, Artificial Sequence
  derived and/or modified sequence
MTGMTADSRSQVQRARYEAANWKYKYGYEIPVDMLCKRIADISQVYTQNAEMRPLGCCMILIGIDEEQGPQVYKCDPAGYYCGFKATAAGVKQTESTSFLEKKVKKKFDWTFEQTVETAITCLSTVLSIDFKPSEIEVGVVTVENPKFRILTEAEIDAHLVALAERD

SEQ ID NO: 100753 - DNA, 684 bp, Artificial Sequence
  derived and/or modified sequence
atggctggcttaaggagagaatacgcttttaaagcgatcaaccagggcggcctgacatctgtagcagtgaggggcaaggattgcgcagtaatcgtgacacagaagaaggtgcctgacaagcttctcgactctagtactgtgactcacctgtttaagatcaccgaaaatatcgggtgcgtgatgaccggaatgacagctgatagccgcagccaagtgcagagagctcgctacgaagccgcgaattggaagtacaagtacggctatgaaatcccagtggacatgctctgtaagcgcatagctgatatctctcaagtgtacacccaaaacgctgagatgaggccactgggttgctgtatgattctcattgggatcgacgaagagcaaggcccacaagtctacaagtgcgatccagcaggttactactgcggattcaaagctactgctgccggggttaaacagaccgaatctactagtttcctggagaagaaggtaaaaaaaaagttcgactggacctttgagcagaccgttgagactgcaattacatgtctgagcacagtcctttccatcgactttaagcccagcgagattgaggtgggggtcgtgacagtcgaaaacccaaaattcagaattctgactgaggctgagattgacgcccacctcgtggcactggccgaacgggactag

SEQ ID NO: 100754 - DNA, 684 bp, Artificial Sequence
  derived and/or modified sequence
atggccggcctgcggcgggagtatgccttcaaggccatcaaccagggcggcctgacctctgtggccgtgcggggcaaggactgtgctgtgattgtgacccagaagaaggtgcctgacaagctgctggacagcagcacagtgacccacctgttcaagatcacagaaaatattggctgtgtgatgacaggcatgacagctgacagccgcagccaggtgcagagggcccgctatgaagctgccaactggaagtacaagtatggctatgagatccctgtggacatgctgtgcaagagaattgctgacatcagccaggtgtacacccagaatgctgagatgaggcccctgggctgctgcatgatcctgattggaattgatgaggagcagggcccccaggtgtacaagtgtgaccctgctggctactactgcggcttcaaggccacagctgctggggtgaagcagacagagagcaccagcttcctggagaagaaggtgaagaagaagtttgactggacctttgagcagacagtggagacagccatcacctgcctgagcacagtgctgagcattgacttcaagcccagcgagattgaggtgggcgtggtgacagtggagaaccccaagttccgcatcctgacagaggccgagattgatgcccacctggtggccctggccgagcgggactag

SEQ ID NO: 100755 - DNA, 684 bp, Artificial Sequence
  derived and/or modified sequence
atggccggcctgcggcgggagtacgccttcaaggccatcaaccagggcggtctcaccagtgtggccgtgagaggcaaggactgtgcggtgatcgtgacacaaaagaaggtccctgataaactactggatagtagcactgtcacacatctgtttaagatcacggagaatattggctgcgtgatgaccggcatgacagccgacagccgtagccaagtgcagcgcgctaggtatgaggcagcaaactggaagtataagtatggctatgagattccagttgatatgttatgcaagagaattgctgacatctcccaggtttacacacaaaacgccgagatgcggcctttggggtgttgcatgatcctgatcggcatagacgaagaacagggcccccaggtatacaaatgcgaccccgctggctattactgcggcttcaaggctactgcggcaggcgtaaaacagactgagagcacttcatttctggagaaaaaagtcaagaagaaattcgattggactttcgagcagacggtggagacagcaatcacgtgcctctccacagtgctgagcatcgacttcaagcctagtgagattgaggtgggtgtcgttaccgtcgagaaccccaaattccgtatcctcaccgaggccgagatcgatgcacatcttgttgccctggctgaacgggactag

SEQ ID NO: 100756 - DNA, 684 bp, Artificial Sequence
  derived and/or modified sequence
atggccggactgagaagggagtacgcctttaaagccattaaccagggaggcttgacctccgtggctgtgagaggcaaggactgcgcggtgattgtaacccaaaaaaaagtgcctgacaagcttttagactcttctactgtgactcatctgttcaagatcaccgaaaacatcggttgtgtcatgactggcatgaccgctgatagcagatcccaggttcagcgtgccaggtatgaagccgcaaattggaagtacaaatacggatacgaaattccagtggacatgctctgcaagcgtatagccgacattagccaggtgtacacacagaacgccgagatgcgccctctcggctgctgcatgatcctcattgggatcgatgaggagcagggacctcaggtgtataaatgtgatccagctgggtactactgtggttttaaggcaaccgctgccggagtaaagcagaccgagagcaccagttttctggaaaaaaaggttaagaaaaaatttgattggacattcgaacagaccgtcgagactgctattacctgtcttagtacagttctgagtatcgacttcaaaccatcagaaatcgaggtaggagtcgtaacagtggagaaccccaagttcagaattctcacagaggccgagattgacgcccatctggtggccctcgccgagcgggattag

SEQ ID NO: 100757 - DNA, 912 bp, Artificial Sequence
  derived and/or modified sequence
agtgtcctaggctgggagaatgggatggagcctccacctcatgaagtagcttcctttggaggtggctatggcaggtcttcggagagaatatgcttttaaggctattaaccagggtggccttacatcagtagctgtcagagggaaagactgtgcagtaattgtcacacagaagaaagtacctgacaaattattggattccagcacagtgactcacttattcaagataactgaaaacattggttgtgtgatgaccggaatgacagctgacagcagatcccaggtacagagggcacgctatgaggcagctaactggaaatacaagtatggctatgagattcctgtggacatgctgtgtaaaagaattgccgatatttctcaggtctacacacagaatgctgaaatgaggcctcttggttgttgtatgattttaattggtatagatgaagagcaaggccctcaggtatataagtgtgatcctgcaggttactactgtgggtttaaagccactgcagcgggagttaaacaaactgagtcaaccagcttccttgaaaaaaaagtgaagaagaaatttgattggacatttgaacagacagtggaaactgcaattacatgcctgtctactgttctatcaattgatttcaaaccttcagaaatagaagttggagtagtgacagttgaaaatcctaaattcaggattcttacagaagcagagattgatgctcaccttgttgctctagcagagagagactaaacattgtcgttagtttaccagatccgtgatgccacttacctgtgtgtttggtaacaacaaaccaacatcatggaggtccctggattgaaaaaggagcctctcccactcctcctaccaccgaagtggttaggactctatataaataaaaacaaggcttttgg

SEQ ID NO: 100758 - DNA, 684 bp, Artificial Sequence
  derived and/or modified sequence
atggccggcctgagaagagagtacgccttcaaggccatcaaccagggcggcctgaccagcgtggccgtgagaggcaaggactgcgccgtgatcgtgacccagaagaaggtgcccgacaagctgctggacagcagcaccgtgacccacctgttcaagatcaccgagaacatcggctgcgtgatgaccggcatgaccgccgacagcagaagccaggtgcagagagccagatacgaggccgccaactggaagtacaagtacggctacgagatccccgtggacatgctgtgcaagagaatcgccgacatcagccaggtgtacacccagaacgccgagatgagacccctgggctgctgcatgatcctgatcggcatcgacgaggagcagggcccccaggtgtacaagtgcgaccccgccggctactactgcggcttcaaggccaccgccgccggcgtgaagcagaccgagagcaccagcttcctggagaagaaggtgaagaagaagttcgactggaccttcgagcagaccgtggagaccgccatcacctgcctgagcaccgtgctgagcatcgacttcaagcccagcgagatcgaggtgggcgtggtgaccgtggagaaccccaagttcagaatcctgaccgaggccgagatcgacgcccacctggtggccctggccgagagagactag

SEQ ID NO: 100759 - DNA, 1470 bp, Artificial Sequence
  derived and/or modified sequence
atgaccaactatagttttcattgtaatgtgtgccatcactcagggaacacctacttccttcgcaagcaagctaatctcaaagaaatgtgcctctcagccttagcaaacctaacatggcagtcccgcacgcaggatgagcatcccaagaccatgttttctaaagataaagacataattcctttcattgataaatactgggagtgcatgaccacacgccaacgcccgggaaagatgacatggcctaataatatcgtaaaaactatgtccaaggagagagacgtttttctggttaaggagcaccctgatccgggatccaaggatcctgaagaggattaccccaagtttgggctgctcgatcaggacttatctaatatcggccctgcatacgataaccagaaacaaagctccgcagttagcacttcaggaaatctgaacggtggcatcgccgctggttcatccgggaaaggcaggggggcgaagagaaaacaacaggatggcggcaccactggaaccaccaagaaggctcgctctgacccgctgttctccgcacagcgcctgccgccccatgggtatcccctcgagcacccgtttaataaggatggatatcgttatattcttgcagagcctgatcctcatgcccccgacccagaaaaactggaactggattgttgggctggcaagcccatccccggggacctgtaccgtgcttgcctctatgagcgagtcctgcttgcattacatgatagggcgcctcagctcaagatttccgacgatagacttactgtggtcggtgaaaagggttatagcatggtgcgggcttctcatggcgtaaggaagggagcttggtatttcgagatcactgtggatgagatgccccccgatacagccgcacgattggggtggtcccagcctctggggaatctccaggccccattgggatacgataaattcagttatagctggaggagcaagaaagggacaaagttccatcaatcgatcggcaagcattattctagcggctacggccagggggatgttttggggttttacataaacctccccgaggacaccgaaaccgcaaagagcctccctgatacctacaaagataaggcactgatcaaattcaaaagctatttgtactttgaggagaaagactttgtggacaaagctgaaaagtccctcaaacaaaccccgcattccgagattatcttctataaaaatggcgtgaatcaaggagtagcttataaggatattttcgaaggggtctatttcccagccatctccttatacaaaagttgcactgtatcgattaattttgggccctgctttaaatatccgcccaaggaccttacgtaccgccccatgagtgacatgggatggggagccgtcgtcgagcacaccttggcagatgtcctctaccatgtggagaccgaggtggacggccgtcgtagtcctccctgggaaccctag

SEQ ID NO: 100760 - DNA, 1470 bp, Artificial Sequence
  derived and/or modified sequence
atgaccaactacagcttccactgcaatgtgtgccaccacagcggcaacacctacttcctgaggaagcaggccaacctgaaggagatgtgcctgagcgccctggccaacctgacctggcagagcaggacccaggatgagcaccccaagaccatgttcagcaaggacaaggacatcatccccttcatcgacaagtactgggagtgcatgaccacccggcagaggcctgggaagatgacctggcccaacaacatcgtgaagaccatgagcaaggagagagatgtgttcctggtgaaggagcacccagaccccggcagcaaggaccctgaggaggactaccccaagtttggcctgctggaccaggacctgagcaacatcggccctgcctatgacaaccagaagcagagcagcgctgtgtccaccagcggcaacctgaatggaggcattgctgctggcagcagcggcaagggccgcggggccaagaggaagcagcaggacggcggcaccaccggcaccaccaagaaggcccggagtgaccccctcttcagcgcccagaggctgccccctcatggctaccccctggagcaccccttcaacaaggatggctaccgctacatcctggccgagccagacccccacgccccagaccctgagaagctggagctggactgctgggccggcaagcccatccctggggacctgtaccgggcctgcctgtatgagcgggtgctgctggccctgcatgaccgggccccccagctgaagatcagtgatgaccggctgactgtggtgggggagaagggctacagcatggtgcgggccagccatggagtgaggaaaggagcctggtactttgagatcaccgtggatgagatgcccccagacacagctgcccggctgggctggagccagcccctgggcaacctgcaggcccccctgggctatgacaagttctcctacagctggaggagcaagaagggcaccaagttccaccagagcatcggcaagcactacagcagcggctacggccagggagatgtgctgggcttctacatcaacctgcctgaggacacagaaacagccaagagcctgcctgacacctacaaggacaaggccctgatcaagttcaagagctacctgtactttgaggagaaggactttgtggacaaggccgagaagagcctgaagcagaccccccacagcgagatcatcttctacaagaatggagtgaaccagggcgtggcctacaaggacatctttgaaggagtgtacttccctgccatcagcctgtacaagagctgcaccgtgtccatcaactttggcccctgcttcaagtacccacccaaggacctgacctaccggcccatgtctgacatgggctggggcgctgtggtggagcacaccctggctgatgtgctgtaccacgtggagacagaggtggatggccgccgcagccccccctgggagccctag

SEQ ID NO: 100761 - DNA, 1470 bp, Artificial Sequence
  derived and/or modified sequence
atgaccaactacagcttccactgcaacgtgtgccaccacagcggcaacacgtatttcttgcgcaagcaggcgaacctgaaagaaatgtgcttatccgctttagcaaacctgacatggcaaagcagaacacaagacgaacaccctaaaacgatgttttccaaagacaaagatataatcccattcattgacaaatattgggagtgcatgaccactcgtcaacgacccggtaagatgacctggccaaacaacatagtcaagaccatgtccaaagagagggacgtcttcctagttaaagagcaccctgacccagggagtaaggatcccgaggaggactaccctaagtttggtctgttggaccaagatctgagtaatattggcccagcatacgacaaccaaaagcagtcttcagcggtttcaacctctggtaacctgaacgggggcatcgcagccgggagtagcggaaaagggcgcggggctaagcgtaaacagcaggacgggggtacaactggcacaacaaaaaaggcaagatccgaccccctgtttagcgcacagaggttgcctcctcatgggtaccccctggagcacccctttaacaaagacggctatagatatattctggcagaaccagatccccatgcgcccgacccagagaagctggaactagattgctgggcgggtaaacccatccccggggatttgtaccgggcctgcctatacgaacgtgtgctcctggcccttcacgacagagcgccccagctgaaaatctcggatgaccgcttaaccgtggtcggcgagaaggggtacagcatggttcgcgcctcacatggagtgcgcaaaggtgcgtggtactttgaaatcaccgtcgatgaaatgcctcccgacacggccgcacggctgggctggtcccagcctctcggtaacttacaagctcctctcggttacgacaagttttcttactcctggcgcagcaagaaaggcaccaaatttcaccaatccattggaaagcattactcatcaggctacggacagggcgatgtcttgggcttctatataaacttaccagaggacaccgagactgctaagagccttcccgatacctacaaggacaaagccctgatcaagttcaagtcgtatctgtatttcgaagaaaaggactttgtggataaagccgaaaaatctctgaaacagacaccccatagtgagatcatcttttacaagaacggtgttaaccaaggtgtggcatataaagatatctttgagggagtctactttccagctattagtctgtacaagagttgtactgttagtattaatttcggcccatgcttcaagtatcctccaaaggatctgacataccggccgatgtccgatatgggatggggcgcggtggtagagcacaccctggccgatgtactttatcacgtggagactgaggtggacggacgtaggagccccccatgggagccttag

SEQ ID NO: 100762 - DNA, 1470 bp, Artificial Sequence
  derived and/or modified sequence
atgacaaattacagctttcactgcaacgtctgccaccactctggtaatacatactttctccgcaagcaggctaacctgaaagagatgtgcctgtcagctctggccaatctgacatggcagagtaggacccaggatgagcacccaaagactatgttcagcaaggacaaggatatcatccctttcatagataaatactgggagtgtatgacgactcgtcaacgccctgggaagatgacttggcccaacaacatcgtcaaaacgatgtctaaagaaagggacgtctttctggtcaaggagcatcctgaccccggttccaaagaccctgaggaagactatcctaagttcggactgctagaccaggatctgtcaaacattgggccagcgtatgacaaccagaaacagagtagcgctgtgagcacttcagggaacttaaatgggggaatcgccgcaggcagctccgggaagggacgcggagcgaagcgaaagcaacaggatgggggaaccacgggcacaacgaagaaggctagatccgatccactgttctctgcacagagactccccccacacggttatcctttagagcacccttttaacaaggacggttaccgatatatacttgccgagcccgaccctcacgcacctgaccccgagaaactggaattggactgctgggctgggaaaccgattcccggtgacctgtaccgcgcttgcttgtacgaaagagtgctactcgcattacatgaccgagcaccacagctgaagattagcgatgataggttaactgtggtgggcgagaaaggatattccatggtgagagcgtcacatggggtaaggaagggcgcttggtactttgagatcaccgtggacgaaatgccacccgataccgccgctcgactgggttggagtcagccactgggcaacttacaggctcctttgggctacgataaattcagttacagttggagaagcaaaaaaggaactaagtttcaccagtcaatcgggaaacactactcatctgggtacggccagggcgatgtcctcggattctacatcaatctcccagaggacactgaaacagctaagtctttacccgatacttataaagacaaggcactcattaaatttaaaagctacctctactttgaggaaaaggacttcgttgataaggccgagaaaagcctcaagcagaccccacatagcgaaattatcttttacaagaacggcgtgaaccagggcgtggcatataaggatatcttcgagggcgtctacttccccgctattagcctgtacaagtcttgcacagtatctatcaatttcggcccatgcttcaagtatccacccaaggatctaacctataggccaatgtcggacatgggctggggcgcagttgtggagcataccctcgccgatgtgctgtatcacgtcgagacagaggtggatggaaggcggtctcccccatgggaaccatag

SEQ ID NO: 100763 - DNA, 1470 bp, Artificial Sequence
  derived and/or modified sequence
atgaccaactacagcttccactgcaacgtgtgccaccacagcggcaacacctacttcctgagaaagcaggccaacctgaaggagatgtgcctgagcgccctggccaacctgacctggcagagcagaacccaggacgagcaccccaagaccatgttcagcaaggacaaggacatcatccccttcatcgacaagtactgggagtgcatgaccaccagacagagacccggcaagatgacctggcccaacaacatcgtgaagaccatgagcaaggagagagacgtgttcctggtgaaggagcaccccgaccccggcagcaaggaccccgaggaggactaccccaagttcggcctgctggaccaggacctgagcaacatcggccccgcctacgacaaccagaagcagagcagcgccgtgagcaccagcggcaacctgaacggcggcatcgccgccggcagcagcggcaagggcagaggcgccaagagaaagcagcaggacggcggcaccaccggcaccaccaagaaggccagaagcgaccccctgttcagcgcccagagactgcccccccacggctaccccctggagcaccccttcaacaaggacggctacagatacatcctggccgagcccgacccccacgcccccgaccccgagaagctggagctggactgctgggccggcaagcccatccccggcgacctgtacagagcctgcctgtacgagagagtgctgctggccctgcacgacagagccccccagctgaagatcagcgacgacagactgaccgtggtgggcgagaagggctacagcatggtgagagccagccacggcgtgagaaagggcgcctggtacttcgagatcaccgtggacgagatgccccccgacaccgccgccagactgggctggagccagcccctgggcaacctgcaggcccccctgggctacgacaagttcagctacagctggagaagcaagaagggcaccaagttccaccagagcatcggcaagcactacagcagcggctacggccagggcgacgtgctgggcttctacatcaacctgcccgaggacaccgagaccgccaagagcctgcccgacacctacaaggacaaggccctgatcaagttcaagagctacctgtacttcgaggagaaggacttcgtggacaaggccgagaagagcctgaagcagaccccccacagcgagatcatcttctacaagaacggcgtgaaccagggcgtggcctacaaggacatcttcgagggcgtgtacttccccgccatcagcctgtacaagagctgcaccgtgagcatcaacttcggcccctgcttcaagtacccccccaaggacctgacctacagacccatgagcgacatgggctggggcgccgtggtggagcacaccctggccgacgtgctgtaccacgtggagaccgaggtggacggcagaagaagccccccctgggagccctag

SEQ ID NO: 100764 - protein, 509 aa, Artificial Sequence
  derived and/or modified sequence
MGDPFMLQQSTNPAPGILGPPPPSFHLGGPAVGPRGNLGAGNGNLQGPRHMQKGRVETSRVVHIMDFQRGKNLRYQLLQLVEPFGVISNHLILNKINEAFIEMATTEDAQAAVDYYTTTPALVFGKPVRVHLSQKYKRIKKPEGKPDQKFDQKQELGRVIHLSNLPHSGYSDSAVLKLAEPYGKIKNYILMRMKSQAFIEMETREDAMAMVDHCLKKALWFQGRCVKVDLSEKYKKLVLRIPNRGIDLLKKDKSRKRSYSPDGKESPSDKKSKTDGSQKTESSTEGKEQEEKSGEDGEKDTKDDQTEQEPNMLLESEDELLVDEEEAAALLESGSSVGDETDLANLGDVASDGKKEPSDKAVKKDGSASAAAKKKLKKVDKIEELDQENEAALENGIKNEENTEPGAESSENADDPNKDTSENADGQSDENKDDYTIPDEYRIGPYQPNVPVGIDYVIPKTGFYCKLCSLFYTNEEVAKNTHCSSLPHYQKLKKFLNKLAEERRQKKET

SEQ ID NO: 100765 - DNA, 852 bp, Artificial Sequence
  derived and/or modified sequence
atgtcaaaatcctttcagcagagttcactaagcagagacagccagggccacggccgcgacttgagcgctgccgggattggccttctggctgctgctacacagtccctctcaatgttgctggaaagcgaagatgaactactggttgatgaagaagaagctgcagcgctccttgagtcgggttccagcgtgggcgacgaaactgacctggcaaacctgggcgacgtcgccagcgatggaaaaaaggaaccatccgataaggccgtgaagaaggacggcagtgcaagtgccgccgcaaagaaaaagctgaagaagaggcgattcccaggctccatggagggatttgtgaccctcgacgaggtaggtgatgaggaagattctgaattacagaagcttaggaagagtggcatggccttcaaatccggagacaagaatgacgacggtcttgtggagattaaggtggacaaaattgaggaactggaccaggagaacgaggcagcactagagaatggcattaaaaacgaggagaacactgaacctggagcagaaagttctgagaacgccgacgatccaaataaagatacctctgagaatgctgacggccaaagtgatgagaacaaggacgactatactatcccggatgaatatcgtattggcccctatcagcccaacgtacccgtgggtatcgactacgttattcccaagactggattctactgtaaactgtgcagcctcttctataccaatgaggaagtcgccaagaacactcactgttccagcctgccacattaccagaaattgaagaaatttctcaacaagctggcagaggaaaggaggcagaaaaaagagacctag

SEQ ID NO: 100766 - DNA, 1530 bp, Artificial Sequence
  derived and/or modified sequence
atgggagacccctttatgctccaacagagcacaaacccagcgcctggtatcctggggccaccacccccttcttttcacttgggcgggcccgcggtaggacctcggggtaacctcggggccggaaatggtaatcttcaagggcctcgccatatgcagaagggccgagttgagacttcgcgggttgtgcacatcatggattttcagcgggggaaaaaccttcgctaccagctcttacaactggtcgaaccctttggagtgatatcgaaccatctgatcctcaataagattaatgaagcatttattgaaatggctactacggaagacgctcaagccgccgtggattattataccactacccccgcattagtgttcggcaagcctgtgcgggtccacctctctcagaaatataaacgcatcaagaaacctgaaggaaagcccgatcagaaatttgaccagaagcaggagttaggcagagtgatccacctttccaatcttccccactcagggtattcagactcggcggtcttgaagctagctgagccgtatggaaagatcaaaaattatattttgatgagaatgaaatctcaggcattcatagagatggaaacacgagaagatgcgatggctatggtggatcactgccttaagaaggccctttggtttcaggggaggtgcgtgaaggtggatctgtcagagaaatataagaagctcgttctgcgcataccaaacagagggattgacctgctgaaaaaagataagtcaaggaaaagaagttacagcccagacggtaaggagtctcccagtgataagaagtccaaaactgacggcagtcaaaaaacagagtcctcgactgaaggcaaagaacaggaggaaaagagcggggaagacggcgaaaaagatactaaggatgaccagacagagcaggaaccgaatatgcttctcgaatccgaagatgaacttttggtggacgaagaggaagcagcagcactgctggagtccggaagcagtgtgggagacgagaccgatctggcaaatctgggtgacgtcgcctcagacggcaagaaagaaccaagtgataaggccgtgaaaaaagacggcagtgcaagcgcagctgccaagaaaaagctgaagaaagtcgacaagatagaggagctcgaccaggagaatgaagccgccctcgaaaatgggattaagaacgaggaaaacaccgagccgggagcagagtcatccgagaacgcagacgacccaaacaaggacacatctgaaaatgcagatggacagtccgacgaaaataaggatgactatacaattccagacgagtacagaattggcccgtaccagccaaacgtgccagtcgggatcgactacgtcattccgaagactggattttattgcaaactctgctctctattttacaccaatgaggaggttgccaagaatacacactgctcatccctccctcattatcagaaactcaaaaagtttctgaataagctcgccgaggaacgacgtcagaagaaagaaacgtag

SEQ ID NO: 100767 - DNA, 1530 bp, Artificial Sequence
  derived and/or modified sequence
atgggggacccttttatgctgcagcaatctacgaatcccgctcccgggatcctgggacctccgcctccatcttttcacttaggaggtcccgcagtgggccctaggggaaacctcggtgcaggtaacggaaatctgcagggaccgcggcacatgcagaagggccgcgtggaaactagccgggtagtccatatcatggactttcagaggggaaagaatctcagatatcagcttctgcaactcgtggagcccttcggggtgatttcaaaccacctgatcctcaacaagattaacgaggcgtttattgaaatggcaacgactgaggacgcccaggccgccgtcgactactacaccaccaccccagccctggtgttcggtaagcctgtgcgagtgcatctgtcccagaaatacaagcggattaagaaaccggagggcaaacctgaccagaagttcgatcaaaagcaggagttgggacgggtaatacacctgtcaaatctgccccacagcggctactccgatagtgcagttctaaaactcgctgaaccatacggtaaaatcaagaattacatattaatgagaatgaagagccaggcctttatcgagatggagactcgggaggacgccatggctatggtcgaccactgtctgaaaaaagcactgtggttccaggggagatgcgtgaaagttgatctgtccgagaagtataaaaaacttgttctgaggatccctaatcggggcattgacctgctgaagaaggataaatcccgtaaacgaagctactcacccgacggaaaggaaagcccttccgacaagaagtcaaagaccgatggaagccagaaaaccgaatcatccacagagggaaaggagcaagaagagaagtctggggaagacggcgaaaaagataccaaagatgaccagaccgagcaggagccaaacatgttgttggaaagcgaggacgagctgcttgtagatgaggaagaggcagccgccctgctagagagtggatcttccgtgggagacgaaaccgatcttgctaacctgggcgatgtggcatcagatggtaaaaaggagccgtccgataaggcggtcaaaaaggacggaagcgccagcgctgctgcaaagaagaagctcaagaaggtggacaaaatcgaagagctggatcaggaaaacgaggccgccctggagaacggaattaagaatgaggaaaatacggaaccaggggccgaaagctctgagaacgccgacgatccgaacaaggatacttccgaaaatgccgacggtcagagtgatgaaaacaaggacgactataccatcccggacgagtatcggatcggaccctaccaaccaaatgtgcctgtcggtattgattatgtgattccaaaaacaggattttactgtaagctatgttcactcttttacactaacgaggaggtggccaaaaacacacactgctcttcgctgccccactatcaaaagctcaagaagttcttaaacaagttggccgaggagaggaggcaaaaaaaagaaacgtag

SEQ ID NO: 100768 - DNA, 852 bp, Artificial Sequence
  derived and/or modified sequence
atgagcaagagcttccagcagagcagcctgagccgggacagccagggccacggccgggacctgtctgctgctggcatcggcctgctggccgccgccacccagagcctgtccatgctgctggagagtgaagatgagctgctggtggatgaggaggaggccgccgccctgctggagagcggcagctctgtgggagatgaaacagacctggccaacctgggagatgtggccagtgatggcaagaaggagcccagcgacaaggctgtgaagaaggatggcagcgccagcgctgctgccaagaagaagctgaagaagaggcgcttccctggctccatggagggctttgtgaccctggatgaggtgggagatgaggaggacagcgagctgcagaagctgaggaagagcggcatggccttcaagagcggggacaagaatgatgatggcctggtggagatcaaggtggacaagattgaggagctggaccaggagaatgaagctgccctggagaatggcatcaagaatgaagaaaatacagagcctggagctgagagcagtgaaaatgctgatgaccccaacaaggacaccagtgaaaatgctgatggccagagtgatgagaacaaggatgactacaccatcccagatgagtacagaattggcccctaccagcccaacgtgcctgtgggcatcgactatgtgatccccaagacaggcttctactgcaagctgtgcagcctcttctacaccaatgaggaggtggccaagaacacccactgcagcagcctgccccactaccagaagctgaagaagttcctgaacaagctggccgaggagcggcggcagaagaaggagacctag

SEQ ID NO: 100769 - DNA, 1530 bp, Artificial Sequence
  derived and/or modified sequence
atgggagaccccttcatgctgcagcagagcaccaacccagcccctggcatcctgggccccccaccacccagcttccacctgggcggccctgctgtgggcccccggggcaacctgggcgctggaaatggaaacctgcagggccccaggcacatgcagaagggccgggtggagaccagccgggtggtgcacatcatggacttccagaggggcaagaacctgcgctaccagctgctgcagctggtggagccctttggagtcatcagcaaccacctgatcctgaacaagatcaatgaggccttcatcgagatggccaccacagaagatgcccaggccgctgtggactactacaccaccaccccagccctggtgtttgggaagcctgtgcgggtgcacctgagccagaagtacaagaggatcaagaagccagagggcaagccagaccagaagtttgaccagaagcaggagctgggccgggtcatccacctgagcaacctgccccacagcggctacagcgacagcgctgtgctgaagctggccgagccctacggcaagatcaagaactacatcctgatgaggatgaagagccaggccttcatcgagatggagaccagagaagatgccatggccatggtggaccactgcctgaagaaggccctgtggttccagggccgctgtgtgaaggtggacctgtctgagaagtacaagaagctggtgctgcgcatccccaacagaggcatcgacctgctgaagaaggacaagagcaggaagaggagctacagcccagatggcaaggagagccccagcgacaagaagagcaagacagatggcagccagaagacagagagcagcacagagggcaaggagcaggaggagaagtctggagaagatggagagaaggacaccaaggatgaccagacagagcaggagcccaacatgctgctggagagtgaagatgagctgctggtggatgaggaggaggccgccgccctgctggagagcggcagctctgtgggagatgaaacagacctggccaacctgggagatgtggccagtgatggcaagaaggagcccagcgacaaggctgtgaagaaggatggcagcgccagcgctgctgccaagaagaagctgaagaaggtggacaagattgaggagctggaccaggagaatgaagctgccctggagaatggcatcaagaatgaagaaaatacagagcctggagctgagagcagtgaaaatgctgatgaccccaacaaggacaccagtgaaaatgctgatggccagagtgatgagaacaaggatgactacaccatcccagatgagtacagaattggcccctaccagcccaacgtgcctgtgggcatcgactatgtgatccccaagacaggcttctactgcaagctgtgcagcctcttctacaccaatgaggaggtggccaagaacacccactgcagcagcctgccccactaccagaagctgaagaagttcctgaacaagctggccgaggagcggcggcagaagaaggagacctag

SEQ ID NO: 100770 - DNA, 2129 bp, Artificial Sequence
  derived and/or modified sequence
gcgtcccgctcgctgggagagaggtacctctccttttccctctccctttccctaagagttgtctgctggttctcagcttgaagaagattctgcagtccttattgatcctttttcttggcgttaccatttttgaagcaaagttaacctagctttctagtttgagctttctttttggccgtctttaaaaaaatttttttttttaatctataaaatagacaagagctagttctacaatgtccaagtcattccagcagtcatctctcagtagggactcacagggtcatgggcgtgacctgtctgcggcaggaataggccttcttgctgctgctacccagtctttaagtatgcttcttgaatctgaagatgagctacttgtagatgaagaagaagcagcagcactgctagaaagtggcagttcagtgggagacgagaccgatcttgctaatttaggtgatgtggcttctgatgggaaaaaggaaccatcagataaagctgtgaaaaaagatggaagtgcttcagcagcagcaaagaaaaagcttaaaaagcgtcgttttccagggagtatggaaggttttgtcactctagatgaggttggtgatgaggaagattcggaacttcagaaacttcgtaaatcgggcatggcatttaaatctggtgacaaaaatgatgatggtttggttgaaattaaggtggacaagatcgaggaacttgatcaagaaaacgaagcagcgttggaaaatggaattaaaaatgaggaaaacacagaaccaggtgctgaatcttctgagaacgctgatgatcccaacaaagatacaagtgaaaacgcagatggtcaaagtgatgagaacaaggacgactatacaatcccagatgagtatagaattggaccatatcagcccaatgttcctgttggtatagactatgtgatacctaaaacagggttttactgtaagctgtgttcactcttttatacaaatgaagaagttgcaaagaatactcattgcagcagccttcctcattatcagaaattaaagaaatttctgaataaattggcagaagaacgcagacagaagaaggaaacttaagatgtgcaaggagatttaatgatttcaaagaaaataatggttctttgtttttaatgttaaccttttttaaatacaatactgatagttagaagaaaactattgtactcttttgttttagtggagaaataatagatgtctgttcatgtgttaagtgttatagcaaaaaaaatacacatatggttaagttaatgaatagtttttgttttatcagaatggcaacagacagaagtactttgtagagattgacttcctaagctacttaagacaacttgcaccactaagaaaaaaatgtagaaccatttggaaaaatgaaatttagtagttccaagtttcaaagaaatgtcaacattttattccattcaataaagaacaaaaccaatagtgtttttattactttcatctgaaacattccatgttttaatctgagccttgcagactttcatttggagtttgaacccgttttggttgcatttcatttttggagaacttaattaacgtgagattggcaattgaaatgcaggtgcagttttctgttaatgtcatgctgttgtttaggtaataagaaatattaagtaattggctttagattttgtaatttttttccctgagttcctgctagatttcgtattctagtagtcaatgtattttcagtgaaatgcaaaaatattcccgttatctttgaccagtattaatttttgagatcttactgcttgtcacttgaatcccgtgattgtcatacatctctggtataagcaacatttgatttttgaagtgtgtagaccatctcttcatattttcaagatgtaattttacatttctgcatttttaaaacagtttggccataatcctagatgcacgcttctaattcatgtacctgcacatgtgacctttgtgaacagaaatttgcatgtataatttgtgtttacttgtaactttctggttatatactgcttatatctgtggattcaagttactgaagtgaataccaataaaaagaaaaccctaggccatgttaattggttatacatgtttggaatgttaacc

SEQ ID NO: 100771 - DNA, 852 bp, Artificial Sequence
  derived and/or modified sequence
atgagcaagagcttccagcagagcagcctgagccgggacagccaggggcatgggcgggacctgagtgctgccggtattgggctcctcgccgcagccacacagtcactctcaatgttgttagagtctgaagatgaactcttagtagacgaggaggaggcggctgctctgctggagtccggatcctctgtcggtgatgagactgacctggcgaacctcggggacgttgccagcgatggcaaaaaggagccgtccgacaaagcagtaaaaaaagacggatcagcctctgccgcggccaaaaaaaaactgaagaaacgaaggtttccgggtagcatggagggcttcgtgaccctggacgaggtgggagacgaggaggacagcgaattgcaaaaactgaggaagtccgggatggcgttcaagtccggggataaaaacgacgacgggctggtggaaattaaggttgataaaatagaggagctggatcaagagaatgaggccgctctggagaacggcatcaagaatgaggagaacacggaaccaggcgctgaatcctccgagaatgctgatgacccaaacaaagacacttcagaaaatgcagatgggcagtctgatgaaaacaaagacgattacactattccagatgagtatagaataggtccttaccagccaaacgtgcccgtcggcatcgactatgtgataccaaagaccggattttactgcaaactgtgttctctgttctataccaatgaagaagttgccaaaaacactcactgctcatccctgcctcactaccagaaactgaagaagttccttaataagctcgcagaggaacgtcgccagaagaaggagacttag

SEQ ID NO: 100772 - DNA, 1530 bp, Artificial Sequence
  derived and/or modified sequence
atgggcgaccccttcatgctgcagcagagcaccaaccccgcccccggcattctcggtccccctccgccctcttttcacctaggcggaccagccgtgggccctcgcggcaacctgggcgcaggtaatggaaacctccaaggccccagacacatgcagaaagggcgcgtggagacctcacgtgtggtgcacatcatggactttcaacgtggtaagaatcttcgttatcaacttttacagctggtggagccattcggggtgattagtaaccatctcatcctcaacaagattaatgaggcttttattgaaatggccacaactgaggacgctcaggcagcggtggattattatacgacaactcccgccctggttttcggaaaaccagtaagagtgcatctgagccagaagtacaaacgaatcaagaagcccgaggggaaacccgaccagaagttcgatcaaaagcaagagctgggacgtgtgatacacctgtcaaatctacctcacagcggctacagcgatagcgctgtgctgaagctggccgagccctatggcaagattaagaactatattctgatgcgaatgaaatcacaggcgttcatagaaatggagactagggaggacgcaatggctatggtcgaccattgcttgaagaaggccctgtggttccaaggcagatgtgtcaaggtggatctgtcagaaaaatataaaaagctggtcctccggatcccgaatcgagggatcgacttattgaaaaaggataagtccaggaaacggtcctattcgcctgacggtaaagaatcaccgtctgacaagaagagcaaaacagatggctctcagaaaactgagtcttcaactgagggaaaggaacaggaggagaagagtggagaggacggggagaaggacacaaaggacgaccagaccgaacaggagcccaacatgctcctcgagtccgaagacgagttgctggtcgatgaggaggaggcggctgctttgctggaatccggcagttccgtaggtgacgaaacagatttggcaaatttaggtgatgtggcaagtgacggaaaaaaagagcccagcgataaagctgtgaagaaagacggaagtgcctctgccgctgccaaaaagaagcttaaaaaggtggacaagattgaggaattggaccaggagaacgaagccgcactagaaaatgggattaaaaacgaggagaacacagagccaggcgctgaaagctccgagaacgccgatgaccctaacaaggacacctctgagaacgcagacggccagtcagacgaaaacaaggacgactatactatccctgatgagtaccgaatcggcccctatcaaccaaatgtcccagttggaattgactatgtgattccaaaaacagggttctactgtaaactttgctcacttttttatacaaacgaagaagttgccaagaacacccattgcagctctctgccacactaccagaaactaaaaaagttcctgaataagctggcggaagagcggaggcaaaaaaaggaaacgtag

SEQ ID NO: 100773 - DNA, 1530 bp, Artificial Sequence
  derived and/or modified sequence
atgggcgaccccttcatgctgcagcagagcaccaaccccgcccccgggattctcggcccacccccaccaagctttcacttgggcggcccagccgtaggtcccaggggcaatctcggagctgggaatggaaatctgcagggccctcgacacatgcagaaaggtagggtggaaacaagccgcgtagtgcacatcatggatttccagcgcggtaagaacctccgctaccaactgctgcagcttgttgagcccttcggcgtaatcagcaaccatctcattttgaacaagattaatgaagcctttattgaaatggccactaccgaggatgctcaggcagcggtggactactacaccaccacgcccgccttagttttcggcaaacctgtgagggtgcacctgtcccagaagtataagaggatcaagaagcctgaaggaaaaccggatcaaaagtttgaccaaaagcaagagttgggccgtgtcattcacctgagcaatctgcctcacagcggctactcggattctgccgttctgaaactggccgagccgtatggtaaaatcaaaaattacattttaatgaggatgaagtcccaggcttttatcgaaatggagacacgggaagatgccatggcaatggtggaccattgtctgaaaaaagcgctgtggtttcaaggaaggtgcgtcaaagtggacttatcagagaaatacaagaaactggtgttgcgcataccaaatcgcggcattgatctgctcaaaaaagacaaaagccgcaaacggagctattctcctgacgggaaagaaagtcctagtgacaaaaagagcaagaccgatggctctcagaagaccgagtcctccactgaaggtaaggaacaggaagaaaaatcaggcgaggacggcgagaaggacaccaaagacgatcagacagagcaagagcccaatatgttgctcgagtctgaagacgagctgctggtggacgaggaggaggccgcagctctacttgagagtggctcatcagttggcgatgaaaccgatctggctaatctgggggatgtggcgagcgacggcaagaaagagccaagtgacaaggccgttaagaaggacgggagcgctagtgcagcagctaagaaaaaacttaaaaaggtggataaaattgaagaactggaccaggagaatgaggccgctttggaaaacggaataaaaaacgaagaaaacacggaacctggcgccgaatcaagtgagaacgccgacgatcccaataaagatacttctgaaaacgctgacggccagtccgacgagaataaggacgattacacgatcccagatgaatacagaattggaccctatcagcccaacgtgcctgtgggtatagattacgttatccccaaaacgggcttctattgtaaattgtgtagccttttctatactaatgaagaggttgccaaaaatacccattgttctagcctaccacattaccagaaactcaaaaaatttctgaacaaactcgcggaggagagacggcagaagaaagaaacgtag

SEQ ID NO: 100774 - DNA, 852 bp, Artificial Sequence
  derived and/or modified sequence
atgtctaaaagctttcagcagtcttctctgagcagagactcacaaggccatggccgagatctgtctgccgcaggcataggcctcctagctgctgcgacacagtctctgagcatgttgcttgaaagcgaagacgagctactggtcgacgaagaagaggcggctgcgttattggaaagcggaagttcagtaggcgacgagactgacctcgcgaatctaggagatgtggcctcagatggcaagaaagaaccatcagataaagcagttaagaaggatggcagtgcctcagccgcagccaagaagaaattaaagaagcggagatttccaggctccatggaagggtttgttaccctcgatgaagttggcgatgaggaggactctgaactgcagaaactgcggaagtcagggatggcatttaagtccggcgacaagaacgacgacggacttgtggagattaaagttgacaaaatcgaagaactggaccaggagaatgaggctgctcttgaaaatggaataaagaatgaggaaaacacagaacccggagccgagtcctcagaaaacgctgacgaccctaataaagatacatctgaaaacgccgatggtcaaagcgatgaaaataaggacgactataccattccagatgagtaccgcatcggcccttaccagcctaatgtcccggtaggaattgattatgtgattcctaagacaggcttctactgcaagctgtgtagtctgttctatacaaatgaggaagtggcaaaaaatacacattgctcttctcttccgcattaccagaaactaaaaaagtttctgaataaacttgccgaggaacgcaggcagaagaaagaaacgtag

SEQ ID NO: 100775 - DNA, 1530 bp, Artificial Sequence
  derived and/or modified sequence
atgggcgatccattcatgctgcagcagtctaccaatccggcacccggtatccttggcccacccccaccctctttccatctggggggtccagcagtaggccctagaggcaatctgggagccggaaatggcaacttgcagggtcccaggcacatgcagaaaggaagggtggagacctcaagggttgtacacattatggacttccagcgcggaaagaatctgcgctaccagctgttacagctcgtagagccttttggtgtgatctctaaccacctcatacttaacaagataaatgaggccttcatcgagatggcaaccacagaggatgcacaggcagctgtcgactactataccaccacccccgctctggtgtttgggaaacctgtccgcgtacatctctcccaaaagtataaaaggatcaagaagccagaaggcaagccagatcagaaatttgaccagaaacaagagctgggaagggtgatacatttgagtaatctgccccatagtggctatagtgattcagctgtgctaaaactcgcagagccttatggcaaaattaagaactacatcctgatgcgcatgaagagccaggctttcatcgagatggagacccgagaagacgctatggcaatggtcgatcactgtctcaagaaggctctgtggttccaaggacgttgcgtgaaggtggatctgagcgagaagtacaaaaagttggtgctgagaatcccaaaccggggaatcgatctgctgaagaaggacaagagtaggaagcgcagctactcccccgatggcaaggagtcaccttccgacaaaaaatctaaaaccgatggcagccagaaaacagaatcatctacagagggcaaggagcaagaggaaaagtccggcgaggatggggagaaagacacaaaagacgaccagacagagcaggagcccaatatgctgctggaaagcgaagacgaacttctggtggacgaggaggaagccgcagccctcctggagtctggcagctcagtcggggacgagactgatctggctaatctgggagacgtcgcttcagatggcaaaaaggagcccagtgacaaggcagttaaaaaggatggctctgcttctgccgctgctaaaaagaagctgaagaaagtggataaaattgaagaactggaccaagaaaatgaggctgcacttgaaaacggaataaagaatgaagagaacacagagcctggtgcagagtcctcagagaacgccgacgaccccaataaagacacatcagagaacgcggacgggcaaagcgacgagaacaaagatgattacactatacctgatgagtacaggattgggccttaccaacccaatgttcccgtcggaatcgattatgtgatcccaaagaccggcttctactgcaaactgtgtagcctgttctacacgaatgaagaagtcgcgaagaatacccattgtagttcactgccacactaccaaaagctcaagaagtttctcaataaattagctgaagagcggcgtcagaaaaaggagacttag

SEQ ID NO: 100776 - DNA, 1530 bp, Artificial Sequence
  derived and/or modified sequence
atgggcgaccctttcatgctgcaacaatctaccaaccccgctccaggaattcttgggcctccccctcctagctttcacctcgggggacccgctgtaggacctagaggaaacctgggggctggcaatgggaatttacagggcccaaggcacatgcaaaagggcagggtcgagacgtccagagtcgtgcacattatggacttccagaggggcaaaaatctcaggtaccagctgttgcagctcgtggagcccttcggtgttatctccaaccacctcatcctcaacaaaatcaacgaagcatttatcgagatggcaactactgaagatgctcaggccgcagttgactattacacaacaactcccgctctggtgtttggcaaaccggtcagagtgcacctatctcaaaaatacaagaggattaagaaaccggagggaaaacccgaccagaaatttgaccaaaagcaggagttggggagagtgattcatctgtcaaatctccctcattcagggtattcggatagcgcagtgctcaagttggccgagccttacgggaaaatcaagaattatattctcatgagaatgaagtcacaggccttcatagagatggaaactagagaagatgctatggcgatggtggatcattgcctcaagaaagctctctggttccagggcagatgtgtgaaggttgatttgagcgaaaagtacaagaagcttgttctcagaattccaaacaggggcatcgacctactgaagaaagataagtcccgtaaaaggagttatagccctgacggaaaagaaagcccttccgacaaaaagagcaagaccgatggatcccagaaaaccgagagtagcaccgagggcaaggaacaagaggagaaatccggagaggatggagagaaggatacaaaggacgatcaaacagagcaggaacctaatatgctccttgagtccgaagacgagcttcttgttgatgaagaggaggctgctgcactgcttgagtccggcagttccgtgggggacgaaacggacctcgctaatctgggggacgtggcctccgatggtaaaaaagagccttctgacaaagccgtgaagaaggacggaagcgctagcgccgctgcgaaaaagaagctgaaaaaagtagacaaaatcgaggaattggatcaggagaatgaagcggctttggaaaatggaattaaaaacgaggagaataccgaacccggtgccgagagctccgagaatgcagacgatccgaacaaggacaccagcgagaatgctgacgggcagtctgacgaaaataaagacgattacacgatccccgatgagtatagaattgggccttatcagccaaacgtacctgtgggcattgactacgttattccaaaaacgggtttttattgcaagctatgctcgctcttctacaccaatgaggaagttgcaaaaaacacccattgctcttccttgcctcattatcaaaaacttaaaaagtttctgaataagctcgctgaagagagaagacaaaagaaggaaacctag

SEQ ID NO: 100777 - DNA, 852 bp, Artificial Sequence
  derived and/or modified sequence
atgagcaagagcttccagcagagcagcctgagcagagacagccagggccacggcagagacctgagcgccgccggcatcggcctgctggccgccgccacccagagcctgagcatgctgctggagagcgaggacgagctgctggtggacgaggaggaggccgccgccctgctggagagcggcagcagcgtgggcgacgagaccgacctggccaacctgggcgacgtggccagcgacggcaagaaggagcccagcgacaaggccgtgaagaaggacggcagcgccagcgccgccgccaagaagaagctgaagaagagaagattccccggcagcatggagggcttcgtgaccctggacgaggtgggcgacgaggaggacagcgagctgcagaagctgagaaagagcggcatggccttcaagagcggcgacaagaacgacgacggcctggtggagatcaaggtggacaagatcgaggagctggaccaggagaacgaggccgccctggagaacggcatcaagaacgaggagaacaccgagcccggcgccgagagcagcgagaacgccgacgaccccaacaaggacaccagcgagaacgccgacggccagagcgacgagaacaaggacgactacaccatccccgacgagtacagaatcggcccctaccagcccaacgtgcccgtgggcatcgactacgtgatccccaagaccggcttctactgcaagctgtgcagcctgttctacaccaacgaggaggtggccaagaacacccactgcagcagcctgccccactaccagaagctgaagaagttcctgaacaagctggccgaggagagaagacagaagaaggagacctag

SEQ ID NO: 100778 - DNA, 1530 bp, Artificial Sequence
  derived and/or modified sequence
atgggcgaccccttcatgctgcagcagagcaccaaccccgcccccggcatcctgggcccccccccccccagcttccacctgggcggccccgccgtgggccccagaggcaacctgggcgccggcaacggcaacctgcagggccccagacacatgcagaagggcagagtggagaccagcagagtggtgcacatcatggacttccagagaggcaagaacctgagataccagctgctgcagctggtggagcccttcggcgtgatcagcaaccacctgatcctgaacaagatcaacgaggccttcatcgagatggccaccaccgaggacgcccaggccgccgtggactactacaccaccacccccgccctggtgttcggcaagcccgtgagagtgcacctgagccagaagtacaagagaatcaagaagcccgagggcaagcccgaccagaagttcgaccagaagcaggagctgggcagagtgatccacctgagcaacctgccccacagcggctacagcgacagcgccgtgctgaagctggccgagccctacggcaagatcaagaactacatcctgatgagaatgaagagccaggccttcatcgagatggagaccagagaggacgccatggccatggtggaccactgcctgaagaaggccctgtggttccagggcagatgcgtgaaggtggacctgagcgagaagtacaagaagctggtgctgagaatccccaacagaggcatcgacctgctgaagaaggacaagagcagaaagagaagctacagccccgacggcaaggagagccccagcgacaagaagagcaagaccgacggcagccagaagaccgagagcagcaccgagggcaaggagcaggaggagaagagcggcgaggacggcgagaaggacaccaaggacgaccagaccgagcaggagcccaacatgctgctggagagcgaggacgagctgctggtggacgaggaggaggccgccgccctgctggagagcggcagcagcgtgggcgacgagaccgacctggccaacctgggcgacgtggccagcgacggcaagaaggagcccagcgacaaggccgtgaagaaggacggcagcgccagcgccgccgccaagaagaagctgaagaaggtggacaagatcgaggagctggaccaggagaacgaggccgccctggagaacggcatcaagaacgaggagaacaccgagcccggcgccgagagcagcgagaacgccgacgaccccaacaaggacaccagcgagaacgccgacggccagagcgacgagaacaaggacgactacaccatccccgacgagtacagaatcggcccctaccagcccaacgtgcccgtgggcatcgactacgtgatccccaagaccggcttctactgcaagctgtgcagcctgttctacaccaacgaggaggtggccaagaacacccactgcagcagcctgccccactaccagaagctgaagaagttcctgaacaagctggccgaggagagaagacagaagaaggagacctag

SEQ ID NO: 100779 - protein, 240 aa, Artificial Sequence
  derived and/or modified sequence
MSVGFIGAGQLAFALAKGFTAAGVLAAHKIMASSPDMDLATVSALRKMGVKLTPHNKETVQHSDVLFLAVKPHIISIEKLSAFRPAPRVIRCMTNTPVVVREGATVYATGTHAQVEDGRLMEQLLSSVGFCTEVEEDLIDAVTGLSGSGPAYGAAKMLLHSEQHPGQLKDNVSSPGGATIHALHVLESGGFRSLLINAVEASCIRTRWAPALPASLVSSPCMAEASLTHICSFTHSADTY

SEQ ID NO: 100780 - DNA, 723 bp, Artificial Sequence
  derived and/or modified sequence
atgtcagtggggtttattggggcgggccagttggccttcgcgctggccaagggcttcacagctgccggcgtcttggcagcacacaagattatggcgtcctcgcctgacatggacctcgcaacagtttccgctctgcgcaagatgggggtgaagcttacaccacacaataaagagaccgtccagcactctgacgtcttgtttctcgccgtgaaacctcacatcatcagtatcgagaaactcagtgccttccgtcctgctcccagagtcatccgttgcatgaccaataccccagtcgtcgtacgcgagggcgccaccgtgtacgcaacgggcacccatgcgcaagtggaggatggcagattgatggagcagcttctgagttcagttggtttctgcacggaagtcgaggaagacctgatcgatgctgtgacaggcttgtcaggatcaggccccgcgtacggcgctgccaagatgctcctccactctgagcagcacccagggcagctcaaagacaacgtttcaagcccaggcggagccacaatccatgctttacatgttctggagtctggaggcttccgcagccttcttatcaacgctgtggaggcatcttgtattcgcacacgttgggcccccgcacttccagcgtctctcgtctccagtccttgtatggcggaagcctccctgacacatatatgcagcttcactcacagcgctgacacatattag

SEQ ID NO: 100781 - DNA, 723 bp, Artificial Sequence
  derived and/or modified sequence
atgtctgtgggcttcatcggggccggccagctggcctttgccctggccaagggcttcaccgctgctggggtgctggccgcccacaagatcatggccagcagcccagacatggacctggccaccgtgtctgccctgaggaagatgggcgtgaagctgaccccccacaacaaggagaccgtgcagcacagtgatgtgctcttcctggccgtgaagccccacatcatcagcattgagaagctgagcgccttccggcctgcccccagggtcatccgctgcatgaccaacacccctgtggtggtgcgggagggcgccaccgtgtatgccaccggcacccacgcccaggtggaggatggccgcctgatggagcagctgctgagctctgtgggcttctgcacagaggtggaggaggacctgattgatgctgtgacaggcctgagcggcagcggccctgcctacggggccgccaagatgctgctgcacagcgagcagcaccctggccagctgaaggacaacgtgagcagccctggaggagccaccatccacgccctgcacgtgctggagagcggcggcttccgcagcctgctgatcaatgctgtggaggccagctgcatccgcacccgctgggccccagccctgcctgccagcctggtgagcagcccctgcatggccgaggccagcctgacccacatctgcagcttcacccacagcgctgacacctactag

SEQ ID NO: 100782 - DNA, 723 bp, Artificial Sequence
  derived and/or modified sequence
atgagcgtgggcttcatcggcgccggccagctggccttcgccctggctaagggtttcacagctgcaggggtcctggccgctcacaaaatcatggcctctagcccggatatggatctggctacagtatccgccctgaggaaaatgggggtgaaactgaccccccataataaggaaactgtgcagcacagcgacgtgctgtttctagcggtgaagccacatattattagtatagaaaagctgtctgcgttcaggcctgcccctcgagtgattcggtgtatgactaacactcctgttgtggtgagggagggggccaccgtctacgcaactggcacacacgctcaggtggaggacggacgtctgatggagcagctgctgtctagtgtgggattttgtaccgaagttgaggaagatttgattgatgctgttaccggcctttctggttccggaccagcctacggagccgcgaaaatgcttttgcactccgagcaacatccaggccagctaaaagacaacgtgagctctccgggaggggctaccatacacgcactccatgtgctcgagagtggtggttttagaagtttgctgatcaacgccgtcgaggcaagctgtattagaactcgatgggccccagccctgcccgcctccctcgtctccagtccatgtatggctgaggcgtcactgacacatatttgcagttttacccactccgccgatacctattag

SEQ ID NO: 100783 - DNA, 723 bp, Artificial Sequence
  derived and/or modified sequence
atgtccgtggggtttatcggcgcagggcagctcgcattcgcactcgctaagggcttcaccgccgctggcgtgctagccgcacataagattatggcctcttccccagacatggacctggcaacggtatccgccctacgcaagatgggcgtaaaacttactccccacaataaagagacagtacagcacagtgacgttcttttccttgccgtgaagccacacataatatcaatcgaaaaattatcagcctttcgcccagcacctcgtgtgatccggtgcatgactaacactccagtggtggtgagggaaggtgccactgtctatgccacgggtacacacgctcaggtcgaggacggacggctgatggagcaactgttaagttccgtgggcttttgcaccgaagtggaggaggatctcatcgatgctgttactggactgtcgggatccggacctgcatacggggctgccaagatgctcctgcatagcgaacagcacccaggacagctaaaggacaatgtgtccagccctggcggagccaccattcacgcactccatgtgctggagtccggagggttccgatcgttgctcattaacgcggtggaggcttcatgcattcgtactcggtgggccccagccttgccggcatcactggtaagctccccctgcatggccgaagcttctttgacccatatctgctcattcacccactcagccgacacctactag

SEQ ID NO: 100784 - DNA, 723 bp, Artificial Sequence
  derived and/or modified sequence
atgagcgtgggcttcatcggcgccggccagctggccttcgccctggccaagggcttcaccgccgccggcgtgctggccgcccacaagatcatggccagcagccccgacatggacctggccaccgtgagcgccctgagaaagatgggcgtgaagctgaccccccacaacaaggagaccgtgcagcacagcgacgtgctgttcctggccgtgaagccccacatcatcagcatcgagaagctgagcgccttcagacccgcccccagagtgatcagatgcatgaccaacacccccgtggtggtgagagagggcgccaccgtgtacgccaccggcacccacgcccaggtggaggacggcagactgatggagcagctgctgagcagcgtgggcttctgcaccgaggtggaggaggacctgatcgacgccgtgaccggcctgagcggcagcggccccgcctacggcgccgccaagatgctgctgcacagcgagcagcaccccggccagctgaaggacaacgtgagcagccccggcggcgccaccatccacgccctgcacgtgctggagagcggcggcttcagaagcctgctgatcaacgccgtggaggccagctgcatcagaaccagatgggcccccgccctgcccgccagcctggtgagcagcccctgcatggccgaggccagcctgacccacatctgcagcttcacccacagcgccgacacctactag

SEQ ID NO: 100785 - protein, 346 aa, Artificial Sequence
  derived and/or modified sequence
MVGGGRRVGRDEPVPSVGALGQGSPDSMSVGFIGAGQLAFALAKGFTAAGVLAAHKIMASSPDMDLATVSALRKMGVKLTPHNKETVQHSDVLFLAVKPHIIPFILDEIGADIEDRHIVVSCAAGVTISSIEKKLSAFRPAPRVIRCMTNTPVVVREGATVYATGTHAQVEDGRLMEQLLSSVGFCTEVEEDLIDAVTGLSGSGPAYAFTALDALADGGVKMGLPRRLAVRLGAQALLGAAKMLLHSEQHPGQLKDNVSSPGGATIHALHVLESGGFRSLLINAVEASCIRTRELQSMADQEQVSPAAIKKTILDKVKLDSPAGTALSPSGHTKLLPRSLAPAGKD

SEQ ID NO: 100786 - DNA, 1041 bp, Artificial Sequence
  derived and/or modified sequence
atggtgggcggggggagacgtgttgggagggacgaacctgtccctagcgtcggagctctgggtcaggggagcccagactccatgagcgtgggattcataggggctggccagttggcattcgccctagccaaaggattcaccgccgccggcgtcttggcggcacataagatcatggcctcctcccccgatatggatctggctaccgtatctgctctgcgaaagatgggcgttaaactaactcctcataataaggaaactgtccagcattcagatgtcttgttcctggctgtgaaaccacacatcattccttttatcctggacgagatcggtgccgacattgaagacagacacatcgtcgtgtcctgcgctgcgggggtaacaatcagctcaatagaaaaaaagctctccgcattcagacccgccccaagagtgatcagatgtatgactaatactcccgtggtggttagagagggcgccacagtctacgctacgggtacccacgcgcaggtggaggacggccggctgatggagcagctgctgagttccgtgggattctgtaccgaagtggaagaagatctgatcgatgcggtgacagggctgtctggttcaggacccgcctatgcctttactgcactggacgccctcgccgatggtggcgtaaagatgggcctgccgcggagactagctgttcggctaggcgcccaggcactgctgggcgccgccaagatgcttctccacagtgagcagcatcctggtcagctgaaggataacgtgagtagccctggcggtgccacaatccatgccctccacgttctcgagagtggcggcttcagatcacttttaatcaatgccgtggaagcctcatgtatccgaacacgggagctacagtccatggctgatcaagagcaggtgtctcccgcagccattaaaaaaactatcctggataaagtgaagctcgatagcccagctggaactgcgctctctccaagcggacacaccaaactccttcccaggtcacttgcccctgccggtaaggattag

SEQ ID NO: 100787 - DNA, 1041 bp, Artificial Sequence
  derived and/or modified sequence
atggtgggcggcggccggcgggtgggcagagatgagcctgtgcccagcgtgggcgccctgggccagggcagcccagacagcatgtctgtgggcttcatcggggccggccagctggcctttgccctggccaagggcttcaccgctgctggggtgctggccgcccacaagatcatggccagcagcccagacatggacctggccaccgtgtctgccctgaggaagatgggcgtgaagctgaccccccacaacaaggagaccgtgcagcacagtgatgtgctcttcctggccgtgaagccccacatcatccccttcatcctggatgaaattggagctgacatcgaggacagacacatcgtggtgtcctgtgccgccggcgtgaccatcagcagcattgagaagaagctgagcgccttccggcctgcccccagggtcatccgctgcatgaccaacacccctgtggtggtgcgggagggcgccaccgtgtatgccaccggcacccacgcccaggtggaggatggccgcctgatggagcagctgctgagctctgtgggcttctgcacagaggtggaggaggacctgattgatgctgtgacaggcctgagcggcagcggccctgcctatgccttcaccgccctggatgccctggctgatggaggagtgaagatgggcctgccccggcggctggccgtgcggctgggcgcccaggccctgctgggcgccgccaagatgctgctgcacagcgagcagcaccctggccagctgaaggacaacgtgagcagccctggaggagccaccatccacgccctgcacgtgctggagagcggcggcttccgcagcctgctgatcaatgctgtggaggccagctgcatccgcacccgggagctgcagagcatggctgaccaggagcaggtgtccccagctgccatcaagaagaccatcctggacaaggtgaagctggacagccctgctggaacagccctgagccccagcggccacaccaagctgctgcccaggagcctggccccagctgggaaggactag

SEQ ID NO: 100788 - DNA, 1041 bp, Artificial Sequence
  derived and/or modified sequence
atggtgggcggcggccggcgggtgggccgggacgagcccgtgccctccgtgggtgctctgggtcagggttccccagatagtatgtctgtgggctttataggagctggtcagcttgcctttgctctggcaaaaggctttaccgcggcaggcgtgttggctgctcataagatcatggcttcctcccccgacatggaccttgcgactgtgtctgcattacgtaaaatgggcgtcaagctgactccccacaataaagagacagtgcagcattctgatgtactgtttctcgcagtgaaaccgcacattataccgtttatcctggatgagattggtgctgacatcgaagataggcacatagtcgtgagctgtgccgcaggcgtcacaatctcctcaatcgaaaaaaagctcagtgcctttcggcctgccccacgcgtaattcggtgcatgactaataccccagttgtcgtgagagagggagccactgtttacgctaccgggactcatgctcaagtggaggacggacgtctaatggagcaactgctgagcagtgtgggattttgcaccgaggtcgaggaggacctgatcgatgcagttaccggtctgtccggttcgggccctgcctatgccttcactgccctggatgccctcgccgacggaggagtgaagatgggcctccccaggcgtttagccgttaggctgggagctcaggctctgctcggggccgctaaaatgctcttgcacagcgagcagcaccccggccagttgaaggataatgtttcgtcacccggaggagcaacaattcatgcacttcacgttcttgaaagtgggggcttcagatctcttttaattaatgctgtagaagcgagctgtattagaacacgtgagcttcagtctatggcagaccaggaacaggtttctccagcagccatcaaaaagacaatactggataaagtcaagctggatagtcccgcggggaccgccctcagtccctcaggacatacaaagctgctgcctcgaagcctggcgcccgccggcaaggactag

SEQ ID NO: 100789 - DNA, 1041 bp, Artificial Sequence
  derived and/or modified sequence
atggtgggcggagggagacgcgtagggagggatgaaccggtcccctcggtgggggctctgggccaggggagtccagattctatgagcgttggatttataggagccggacagctggccttcgccctggctaaagggttcacagcagctggtgttttggccgcacataagatcatggcatcctctccagacatggacctggccacggtgtctgctctgcgaaaaatgggcgtgaaactcacccctcataacaaagagactgtccaacactcggacgtgctgttcctggcagttaagccccatattatcccattcatcctagacgaaataggcgcagatattgaagaccgccatattgtcgtgtcttgtgcagccggtgtgaccatctcttcaatcgaaaagaagctcagtgctttccgcccagcccctagggtgatacggtgtatgaccaatactccagtcgtggtgcgtgagggcgcaaccgtctacgcaaccggcacccacgcacaggtcgaagacgggagactgatggaacagctgctgtcgtccgttggattttgtaccgaggtcgaagaggacctgatagacgctgttactgggttgtccggaagcggcccagcttatgcctttacagcactggatgccctagcggacgggggagtgaagatgggcttgcctcgacggctcgccgttcggctgggggcacaggcccttctgggggctgcaaagatgctactgcacagcgagcagcacccaggccagcttaaggataacgtgtcctcgccaggtggtgccactatccatgcattgcacgtgcttgaatcaggtggcttccgctcccttttgattaacgccgtcgaggcgtcatgcattcgcacgcgtgaactgcagtctatggccgaccaggagcaagtgtcacccgcagctatcaaaaagacgatcctggacaaagtcaagttggacagtcccgcaggcacggctttgtcacctagcggtcatactaagctcttgcccagatccttggcacccgctggtaaggactag

SEQ ID NO: 100790 - DNA, 2059 bp, Artificial Sequence
  derived and/or modified sequence
agtcatttcttctgcggaacctccacccctccagtgggtgcgggaccctaggcagcaggccaggcaccgccgctctgactgggggccccgaagcagttaacgggccggacagcaaagtggaaagttagaccagctgggaccaggggaggtgggcacccggctgcgggaggagcggccaggctggcactgcccccctaacttgctctcgatcctgccggtctcgtcccgcagagccggtgccatctgtgggggctttgggccaggggtctccggacagcatgagcgtgggcttcatcggcgctggccagctggcttttgccctggccaagggcttcacagcagcaggcgtcttggctgcccacaagataatggctagctccccagacatggacctggccacagtttctgctctcaggaagatgggggtgaagttgacaccccacaacaaggagacggtgcagcacagtgatgtgctcttcctggctgtgaagccacacatcatccccttcatcctggatgaaataggcgccgacattgaggacagacacattgtggtgtcctgcgcggccggcgtcaccatcagctccattgagaagaagctgtcagcgtttcggccagcccccagggtcatccgctgcatgaccaacactccagtcgtggtgcgggagggggccaccgtgtatgccacaggcacgcacgcccaggtggaggacgggaggctcatggagcagctgctgagcagcgtgggcttctgcacggaggtggaagaggacctgattgatgccgtcacggggctcagtggcagcggccccgcctacgcattcacagccctggatgccctggctgatgggggtgtgaagatgggacttccaaggcgcctggcagtccgcctcggggcccaggccctcctgggggctgccaagatgctgctgcactcagaacagcacccaggccagctcaaggacaacgtcagctctcctggtggggccaccatccatgccttgcatgtgctggagagtgggggcttccgctccctgctcatcaacgctgtggaggcctcctgcatccgcacacgggagctgcagtccatggctgaccaggagcaggtgtcaccagccgccatcaagaagaccatcctggacaaggtgaagctggactcccctgcagggaccgctctgtcaccttctggccacaccaagctgctcccccgcagcctggccccagcgggcaaggattgacacgtcctgcctgaccaccatcctgccaccaccttctcttctcttgtcactagggggactagggggtccccaaagtggcccactttctgtggctctgatcagcgcaggggccagccagggacatagccagggaggggccacatcacttcccactggaaatctctgtggtctgcaagtgcttcccagcccagaacaggggtggattccccaacctcaacctcctttcttctctgctcccaaaccatgtcaggaccaccttcctctagagctcgggagcccggagggtcttcacccactcctactccagtatcagctggcacgggctccttcctgagagcaaaggtcaaggaccccctctgtgaaggctcagcagaggtgggatcccacgccccctcccggcccctccctgccctccattcagggagaaacctctccttcccgtgtgagaagggccagagggtccaggcatcccaagtccagcgtgaagggccacagcccctcttggctgccaagcacgcagatcccatggacatttggggaaagggctccttgggctgctggtgaacttctgtggccaccacctcctgctcctgacctccctgggagggtgctatcagttctgtcctggccctttcagttttataagttggtttccagcccccagtgtcctgacttctgtctgccacatgaggagggaggccctgcctgtgtgggagggtggttactgtgggtggaatagtggaggccttcaactgattagacaaggcccgcccacatcttggagggcatctgccttactgattaaaatgtcaatgtaatct

SEQ ID NO: 100791 - DNA, 1346 bp, Artificial Sequence
  derived and/or modified sequence
agctgggttggggtcgggctccgggaatggtgggcggcggtcgccgggtggggcgcgacgagccggtgccatctgtgggggctttgggccaggggtctccggacagcatgagcgtgggcttcatcggcgctggccagctggcttttgccctggccaagggcttcacagcagcaggcgtcttggctgcccacaagataatggctagctccccagacatggacctggccacagtttctgctctcaggaagatgggggtgaagttgacaccccacaacaaggagacggtgcagcacagtgatgtgctcttcctggctgtgaagccacacatcatccccttcatcctggatgaaataggcgccgacattgaggacagacacattgtggtgtcctgcgcggccggcgtcaccatcagctccattgagaagaagctgtcagcgtttcggccagcccccagggtcatccgctgcatgaccaacactccagtcgtggtgcgggagggggccaccgtgtatgccacaggcacgcacgcccaggtggaggacgggaggctcatggagcagctgctgagcagcgtgggcttctgcacggaggtggaagaggacctgattgatgccgtcacggggctcagtggcagcggccccgcctacgcattcacagccctggatgccctggctgatgggggtgtgaagatgggacttccaaggcgcctggcagtccgcctcggggcccaggccctcctgggggctgccaagatgctgctgcactcagaacagcacccaggccagctcaaggacaacgtcagctctcctggtggggccaccatccatgccttgcatgtgctggagagtgggggcttccgctccctgctcatcaacgctgtggaggcctcctgcatccgcacacgggagctgcagtccatggctgaccaggagcaggtgtcaccagccgccatcaagaagaccatcctggacaaggtgaagctggactcccctgcagggaccgctctgtcaccttctggccacaccaagctgctcccccgcagcctggccccagcgggcaaggattgacacgtcctgcctgaccaccatcctgccaccaccttctcttctcttgtcactagggggactagggggtccccaaagtggcccactttctgtggctctgatcagcgcaggggccagccagggacatagccagggaggggccacatcacttcccactggaaatctctgtggtctgcaagtgcttcccagcccagaacaggggtggattccccaacctcaacctcctttcttctctgctcccaaaccatgtcaggaccaccttcctctagagctcgggagccc

SEQ ID NO: 100792 - DNA, 1411 bp, Artificial Sequence
  derived and/or modified sequence
gcgtggcggccgcagcgctgagggagccggtgccatctgtgggggctttgggccaggggtctccggacagcatgagcgtgggcttcatcggcgctggccagctggcttttgccctggccaagggcttcacagcagcaggcgtcttggctgcccacaagataatggctagctccccagacatggacctggccacagtttctgctctcaggaagatgggggtgaagttgacaccccacaacaaggagacggtgcagcacagtgatgtgctcttcctggctgtgaagccacacatcatctccattgagaagctgtcagcgtttcggccagcccccagggtcatccgctgcatgaccaacactccagtcgtggtgcgggagggggccaccgtgtatgccacaggcacgcacgcccaggtggaggacgggaggctcatggagcagctgctgagcagcgtgggcttctgcacggaggtggaagaggacctgattgatgccgtcacggggctcagtggcagcggccccgcctacggggctgccaagatgctgctgcactcagaacagcacccaggccagctcaaggacaacgtcagctctcctggtggggccaccatccatgccttgcatgtgctggagagtgggggcttccgctccctgctcatcaacgctgtggaggcctcctgcatccgcacacggtgggcccccgcgctgcccgcttccctggtctccagtccttgcatggcagaggcctctctcacacacatctgctcattcacgcactcagcagatacgtattgagctccagcccagtgttgcgcaggacacagggggccccgaggttccctgggttactgtgggcagtgcccctccccaccttccgtttcctgcgaggagggaacatccatagagggacccggatgctgtgccctgtgctccccacataggttcaccattgtcatagctaggagtgtcatttgagccaggggccacaccagtggggtggcggggtggccagccacattaggaaacttctgtgggggcccaccttcctcctgccctcgctgtgggattaagttagaccagtaggacacgcagcaacatccaggcacaaggaaaattccatggaaggtgaaagaagcaaagagcaagagaaagacagagtttgctgtttgcctgggatcccacagctggtcaaaggcagagccaggctgggagccgctgtccccagttcaggtctgcagggtgggtgaggacgtctttctcgccacactgcccactctccagtccagacaccctcagactctgcgagtgccaccctgtaacagtgaggggaacacgaggggcctggcctcacctccagcctgcaggggagacaggtgtaaacccacatcccgtggtggggccacgagaactca

SEQ ID NO: 100793 - DNA, 1041 bp, Artificial Sequence
  derived and/or modified sequence
atggtgggcggcggcagaagagtgggcagagacgagcccgtgcccagcgtgggcgccctgggccagggcagccccgacagcatgagcgtgggcttcatcggcgccggccagctggccttcgccctggccaagggcttcaccgccgccggcgtgctggccgcccacaagatcatggccagcagccccgacatggacctggccaccgtgagcgccctgagaaagatgggcgtgaagctgaccccccacaacaaggagaccgtgcagcacagcgacgtgctgttcctggccgtgaagccccacatcatccccttcatcctggacgagatcggcgccgacatcgaggacagacacatcgtggtgagctgcgccgccggcgtgaccatcagcagcatcgagaagaagctgagcgccttcagacccgcccccagagtgatcagatgcatgaccaacacccccgtggtggtgagagagggcgccaccgtgtacgccaccggcacccacgcccaggtggaggacggcagactgatggagcagctgctgagcagcgtgggcttctgcaccgaggtggaggaggacctgatcgacgccgtgaccggcctgagcggcagcggccccgcctacgccttcaccgccctggacgccctggccgacggcggcgtgaagatgggcctgcccagaagactggccgtgagactgggcgcccaggccctgctgggcgccgccaagatgctgctgcacagcgagcagcaccccggccagctgaaggacaacgtgagcagccccggcggcgccaccatccacgccctgcacgtgctggagagcggcggcttcagaagcctgctgatcaacgccgtggaggccagctgcatcagaaccagagagctgcagagcatggccgaccaggagcaggtgagccccgccgccatcaagaagaccatcctggacaaggtgaagctggacagccccgccggcaccgccctgagccccagcggccacaccaagctgctgcccagaagcctggcccccgccggcaaggactag

SEQ ID NO: 100794 - protein, 778 aa, Artificial Sequence
  derived and/or modified sequence
MVSKLEREKTQEAKRIRELEQRKHTVLVTELKAKLHEEKMKELQAVRENLIKQHEQEMSRTVKVRDGEIQRLKSALCALRDGSSDKVRTALTIEAREEARKLFDTERLKLLQEIADLKTAKKQVDEALSNMIQADKIKAGDLRSEHQSHQEAISKIKWESERDIRRLMDEIKAKDRIIFSLEKELETQTGYVQKLQLQKEALDEQLFLVKEAECNMSSPKREIPGRAGDGSEHCSSPDLRRNQKRIAELNATIRKLEDRNTLLGDERNELLKRVRETEKQCKPLLERNKCLAKRNDELMVSLQRMEEKLKAVTKENSEMREKITSHPPLKKLKSLNDLDQANEEQETEFLKLQVIEQQNIIDELTRDREKLIRRRKHRRSSKPIKRPVLDPFIGYDEDSMDSETSSMASFRTDRTPATPDDDLDESLAAEESELRFRQLTKEYQALQRAYALLQEQTGGIIDAEREAKAQEQLQAEVLRYKAKIEDLEATLAQKGQDSHWVEDKQLFIKRNQELLEKIEKQEAENHRLQQELQDARDQNELLEFRNLELEERERRSPPFNLQIHPFSDGVSALQIYCMKEGVKDVNIPDLIKQLDILGDNGNLRNEEQVAIIQASTVLSLAEKWIQQIEGAEAALHQKMMELESDMEQFCKIKGYLEEELDYRKQALDQAYMRIQELEATLYNALQQETVIKFGELLSEKQQEELRTAVEKLRRQMLRKSREYDCQILQERMELLQQAHQRIRDLEDKTDIQKRQIKDLEEKFLFLFLFFSLAFILWP

SEQ ID NO: 100795 - DNA, 2337 bp, Artificial Sequence
  derived and/or modified sequence
atggtgagcaagctggagagagagaagacccaggaggccaagagaatcagagagctggagcagagaaagcacaccgtgctggtgaccgagctgaaggccaagctgcacgaggagaagatgaaggagctgcaggccgtgagagagaacctgatcaagcagcacgagcaggagatgagcagaaccgtgaaggtgagagacggcgagatccagagactgaagagcgccctgtgcgccctgagagacggcagcagcgacaaggtgagaaccgccctgaccatcgaggccagagaggaggccagaaagctgttcgacaccgagagactgaagctgctgcaggagatcgccgacctgaagaccgccaagaagcaggtggacgaggccctgagcaacatgatccaggccgacaagatcaaggccggcgacctgagaagcgagcaccagagccaccaggaggccatcagcaagatcaagtgggagagcgagagagacatcagaagactgatggacgagatcaaggccaaggacagaatcatcttcagcctggagaaggagctggagacccagaccggctacgtgcagaagctgcagctgcagaaggaggccctggacgagcagctgttcctggtgaaggaggccgagtgcaacatgagcagccccaagagagagatccccggcagagccggcgacggcagcgagcactgcagcagccccgacctgagaagaaaccagaagagaatcgccgagctgaacgccaccatcagaaagctggaggacagaaacaccctgctgggcgacgagagaaacgagctgctgaagagagtgagagagaccgagaagcagtgcaagcccctgctggagagaaacaagtgcctggccaagagaaacgacgagctgatggtgagcctgcagagaatggaggagaagctgaaggccgtgaccaaggagaacagcgagatgagagagaagatcaccagccacccccccctgaagaagctgaagagcctgaacgacctggaccaggccaacgaggagcaggagaccgagttcctgaagctgcaggtgatcgagcagcagaacatcatcgacgagctgaccagagacagagagaagctgatcagaagaagaaagcacagaagaagcagcaagcccatcaagagacccgtgctggaccccttcatcggctacgacgaggacagcatggacagcgagaccagcagcatggccagcttcagaaccgacagaacccccgccacccccgacgacgacctggacgagagcctggccgccgaggagagcgagctgagattcagacagctgaccaaggagtaccaggccctgcagagagcctacgccctgctgcaggagcagaccggcggcatcatcgacgccgagagagaggccaaggcccaggagcagctgcaggccgaggtgctgagatacaaggccaagatcgaggacctggaggccaccctggcccagaagggccaggacagccactgggtggaggacaagcagctgttcatcaagagaaaccaggagctgctggagaagatcgagaagcaggaggccgagaaccacagactgcagcaggagctgcaggacgccagagaccagaacgagctgctggagttcagaaacctggagctggaggagagagagagaagaagcccccccttcaacctgcagatccaccccttcagcgacggcgtgagcgccctgcagatctactgcatgaaggagggcgtgaaggacgtgaacatccccgacctgatcaagcagctggacatcctgggcgacaacggcaacctgagaaacgaggagcaggtggccatcatccaggccagcaccgtgctgagcctggccgagaagtggatccagcagatcgagggcgccgaggccgccctgcaccagaagatgatggagctggagagcgacatggagcagttctgcaagatcaagggctacctggaggaggagctggactacagaaagcaggccctggaccaggcctacatgagaatccaggagctggaggccaccctgtacaacgccctgcagcaggagaccgtgatcaagttcggcgagctgctgagcgagaagcagcaggaggagctgagaaccgccgtggagaagctgagaagacagatgctgagaaagagcagagagtacgactgccagatcctgcaggagagaatggagctgctgcagcaggcccaccagagaatcagagacctggaggacaagaccgacatccagaagagacagatcaaggacctggaggagaagttcctgttcctgttcctgttcttcagcctggccttcatcctgtggccctag

SEQ ID NO: 100796 - DNA, 2337 bp, Artificial Sequence
  derived and/or modified sequence
atggtgtcaaaactcgaaagggaaaagacacaggaggctaagcgcattcgggaactggaacagagaaagcatacagttctggtgactgaattaaaggccaagctccatgaggaaaaaatgaaagagcttcaggccgttagggagaatctcatcaagcagcacgagcaagagatgtcaagaaccgtcaaagtgagggatggcgagatacagcgtctcaagagcgccttatgcgcactgcgcgacgggtccagcgataaggtgaggactgctctgacaattgaggccagagaagaggcccgcaagctgttcgacactgagcgcttgaaactgttacaggaaattgcggatctcaagacagccaaaaaacaggtagatgaagcactctccaatatgatccaggccgataagatcaaagccggagacttaaggagtgagcaccaaagccaccaggaagctatttctaagatcaaatgggaatcagagagggacattcggaggcttatggatgagataaaggccaaggacagaattatcttcagcttagagaaagagttggagactcagacggggtacgtgcaaaagcttcagctccagaaggaggccctggatgaacagctgtttctcgtaaaagaggctgaatgtaacatgtcttcgcccaaacgagaaatcccgggacgggccggagacgggtcagaacattgttcgagtcctgatctgcgcaggaaccaaaaaaggattgccgaactcaatgcgactattagaaaattggaggatcgaaatacattgctcggagacgaaaggaacgagctgttgaagcgggtgcgagagacagagaagcaatgcaagcctttgctcgaaaggaacaaatgcctggccaagcggaatgacgagctgatggtatcactgcaacggatggaagagaagctgaaagctgtgaccaaagaaaacagcgagatgagggagaagatcacatcacatccgccactaaaaaaactgaaaagcctgaacgatctagatcaggccaacgaagagcaggaaaccgagtttttaaaactgcaggtcattgagcaacagaatattatcgatgagctgacaagggaccgagaaaaactgataaggcgacgaaagcatcggcggtccagcaaaccaattaaacgccctgttctcgacccattcatcggctacgatgaggactctatggacagcgaaacctctagcatggccagcttcaggacggacaggacacctgccactcctgatgatgatctggatgaaagcttagccgcagaagaatccgagctgcggttcaggcagctaacaaaagagtatcaggctctccagcgcgcctatgccctgttacaggaacagaccggtggaatcatagacgccgagagggaggctaaagcacaagaacaactgcaggcggaggtactaaggtacaaagcaaagatagaggacctcgaggcaacactggctcagaagggtcaggactctcactgggtggaagacaaacaactgttcattaagcgtaatcaagaactcctggagaagatcgaaaaacaggaggccgagaatcaccgactccagcaggaacttcaggacgcgagggatcagaatgagctcctggaattccgaaatctggaattagaagagcgcgaacggagatcccctccatttaatctgcagattcatccctttagcgacggagtgtccgccctgcagatctactgcatgaaggagggagtcaaggatgtcaatattcctgacctgattaaacagttggatatcctgggtgacaacgggaatctgcggaatgaagagcaggtggccatcatacaagccagcaccgttctaagcctggctgaaaaatggatccaacaaatcgagggagccgaggccgcgctgcaccagaaaatgatggaactggagtcagatatggaacaattttgtaaaataaagggctatctggaggaggaattggattatagaaagcaggccctggaccaggcctacatgcggattcaggagctcgaggccactctatacaatgccctgcaacaggagacagtgatcaagttcggcgaacttctgtcagagaagcaacaggaggagctgaggaccgcggtcgaaaaactgcggcgtcagatgctccggaagtcaagggagtacgactgtcaaatcttgcaggagcgaatggagctgttacagcaggcacaccaacgtatccgtgatttggaagataaaactgatattcagaagagacaaattaaagatctcgaagagaagttcttgtttctttttcttttcttctccctcgcttttattttgtggccgtag

SEQ ID NO: 100797 - DNA, 2992 bp, Artificial Sequence
  derived and/or modified sequence
agccagaggaggtgtctgctgcaagttcctggctgcttccgagctcaccccatcctccgagagggaggaggcccaactggtgatgctgctgctgctgctgctgccgccgccgccgcctctattgctgatactctagtggggctggaagggtggttcctattcgcaccatcgccaaccagagacagagggaaaaaaaaaaccggcagccactgctgatgttgggttcggaggctgcatccgactcggtcacaaggaaaatggattcagtttgcatctctccctcctttaaacagcttctccgggtctcagcatggtatcaaagcttgaaagagagaagactcaagaagcgaagaggattcgtgagctggagcagcgcaagcacacggtgctggtgacagaactcaaagccaagctccatgaggagaagatgaaggagctgcaggctgtgagggagaaccttatcaagcagcacgagcaggaaatgtcaaggacggtgaaggtacgtgatggagagatccagaggctcaagtctgctctctgtgctctccgcgacggcagcagtgacaaagtaaggacagcgctcaccattgaggcccgggaggaggcccggaaactgtttgacacagagcgccttaagctcttacaggaaattgcggacctgaaaacggccaagaagcaggtggacgaggctctgagcaatatgatccaagcagataaaatcaaggctggggaccttcggagtgagcatcagtcccaccaagaagccatctcgaagatcaagtgggagtcggagcgggatattcggaggctgatggatgaaatcaaagccaaggacaggatcatcttttccctggaaaaggaactggagacccagacaggctatgtacagaaactccaacttcagaaggaggctttggacgaacaactctttctggtcaaggaggctgagtgcaacatgagcagcccaaaacgagaaattccaggaagggcaggtgatggttccgaacactgcagcagtcctgatttgcgaagaaatcaaaagagaatagctgaattgaatgccactataagaaaattagaagacaggaataccttgcttggagatgaacgaaatgaactgttaaaacgtgtgcgggaaaccgaaaagcaatgtaaacctctcctggaaaggaacaagtgcctcgccaagagaaacgatgaactgatggtgtccttgcagcgcatggaagaaaaactaaaagccgttaccaaggaaaattcagaaatgagagaaaaaataacatcccatccacccctgaagaaattaaaatctctgaatgacctcgaccaagctaatgaagaacaagaaacagagtttctaaaacttcaggtcattgagcaacagaacattattgatgagctcacaagggaccgagaaaagctcatccgtagaagaaagcatagaagaagttccaagccaattaagaggcctgttttggacccgtttattggctatgatgaggactctatggattcagagacatcatccatggcctcatttagaacagacagaacaccagctactcctgatgatgacttggatgaaagtttagcagctgaagaatctgaactaagatttcgacaattaacaaaagaatatcaggccctccaaagagcatatgccctcctacaggagcagacgggaggcatcatcgacgctgaacgagaagccaaggctcaagaacagctccaagcagaggtgctaaggtataaagccaaaattgaagacctggaagcgactctggctcagaaagggcaggattcacactgggtagaagataaacaacttttcattaagagaaaccaggagcttttagaaaagatagaaaaacaggaggcagaaaatcaccggttacaacaagaactacaggacgccagagaccagaatgagctgctggagtttcgaaacctagagctagaagagagagagagacgatcccctccatttaatctccaaattcacccattctcagatggtgtgagtgctctacagatctactgtatgaaagaaggtgttaaggatgtgaacatccctgatctcataaagcagcttgatatcttgggtgataatgggaatttaagaaatgaagaacaagtggccataattcaggccagcactgtgctgtccctggcagagaagtggatccagcagattgaaggagctgaggctgccctacaccagaaaatgatggaattggaaagtgacatggaacagttctgcaaaataaaaggctatctggaggaagaactagactacagaaaacaagctcttgaccaagcatatatgagaatccaggaactagaagctactttgtacaatgctctacagcaagaaactgttatcaagtttggtgaattattaagtgaaaaacagcaagaggagctgaggacggcagtagaaaagttacggcggcaaatgctgaggaagagcagagagtatgactgtcagattcttcaggagagaatggagctcttacagcaagcccatcagagaattcgtgacttagaagataaaacagacatccagaaaagacaaataaaagacttagaagaaaagtttctgtttctattcttgttcttctctcttgcctttattctatggccttgatgtcaaggtgcctcttaaagagtaaccgaaaacatggataagatcccaggaagacaagtgcttctaaaccttcaaagatggcaaaattgtttacaccagtgagagggagatcaaaagctaagaactaccctgtagccaggactacaactgtgtattttaaagccattattcaaggtttcttacttgacagttcctacacaaccctgttgaaaatctacaatatatgctgcatttaatgaaacatgtatatgtcaaatcagaagagaagaactataaacatatattgtgtaaagaaaaagttcagcaatggaactagtttctgcagatcaagcaaagatgtgtctt

SEQ ID NO: 100798 - DNA, 2337 bp, Artificial Sequence
  derived and/or modified sequence
atggtgtccaagctggagcgggagaagacccaggaggccaagaggatccgggagctggagcagaggaagcacacagtgctggtgacagagctgaaggccaagctgcacgaggagaagatgaaggagctgcaggccgtgcgggagaacctgatcaagcagcacgagcaggagatgagcaggacagtgaaggtgagagatggagagatccagaggctgaagagcgccctgtgtgccctgagagatggcagcagtgacaaggtgaggacagccctgaccatcgaggcccgggaggaggccaggaagctgtttgacacagagcggctgaagctgctgcaggagattgctgacctgaagacagccaagaagcaggtggatgaggccctgagcaacatgatccaggccgacaagatcaaggccggggacctgcggtctgagcaccagagccaccaggaggccatcagcaagatcaagtgggagagcgagcgggacatccggcggctgatggatgagatcaaggccaaggaccgcatcatcttcagcctggagaaggagctggagacccagacaggctacgtgcagaagctgcagctgcagaaggaggccctggatgagcagctgttcctggtgaaggaggccgagtgcaacatgagcagccccaagcgggagatccctggccgggctggagatggcagcgagcactgcagcagcccagacctgcggaggaaccagaagagaattgctgagctgaatgccaccatcaggaagctggaggacaggaacaccctgctgggagatgaaagaaatgagctgctgaagagggtgcgggagacagagaagcagtgcaagcccctgctggagaggaacaagtgcctggccaagagaaatgatgagctgatggtgtccctgcagaggatggaggagaagctgaaggctgtgaccaaggaaaattctgagatgagggagaagatcaccagccacccccccctgaagaagctgaagagcctgaatgacctggaccaggccaatgaggagcaggagacagagttcctgaagctgcaggtgattgagcagcagaacatcattgatgagctgacccgggaccgggagaagctgatcagaagaaggaagcaccggcgcagcagcaagcccatcaagaggcctgtgctggaccccttcatcggctatgatgaagattccatggacagcgagaccagctccatggccagcttcagaacagacaggaccccagccaccccagatgatgacctggatgagagcctggccgctgaggagagcgagctgcgcttccggcagctgaccaaggagtaccaggccctgcagagggcctatgccctgctgcaggagcagacaggaggcatcattgatgctgagcgggaggccaaggcccaggagcagctgcaggccgaggtgctgcgctacaaggccaagattgaggacctggaggccaccctggcccagaagggccaggacagccactgggtggaggacaagcagctgttcatcaagaggaaccaggagctgctggagaagattgagaagcaggaggccgagaaccaccggctgcagcaggagctgcaggatgcccgggaccagaatgagctgctggagttcaggaacctggagctggaggagcgggagcggcgcagcccccccttcaacctgcagatccaccccttcagtgatggagtgtctgccctgcagatctactgcatgaaggagggcgtgaaggatgtgaacatcccagacctgatcaagcagctggacatcctgggggacaatggaaacctgagaaatgaggagcaggtggccatcatccaggccagcacagtgctgagcctggccgagaagtggatccagcagatcgagggcgctgaggccgccctgcaccagaagatgatggagctggagagtgacatggagcagttctgcaagatcaagggctacctggaggaggagctggactacaggaagcaggccctggaccaggcctacatgaggatccaggagctggaggccaccctgtacaatgccctgcagcaggagaccgtcatcaagtttggagagctgctgtctgagaagcagcaggaggagctgaggacagctgtggagaagctgcggcggcagatgctgaggaagagccgggagtatgactgccagatcctgcaggagaggatggagctgctgcagcaggcccaccagaggatccgggacctggaggacaagacagacatccagaagaggcagatcaaggacctggaggagaagttcctgttcctgttcctgttcttcagcctggccttcatcctgtggccctag

SEQ ID NO: 100799 - DNA, 2337 bp, Artificial Sequence
  derived and/or modified sequence
atggtgagcaagctggagcgggagaagacccaggaggccaagcggataagggaactggaacagagaaaacatactgtgctggtgactgagctcaaagcaaaacttcacgaggagaaaatgaaggaactgcaggctgtccgggagaacctgattaaacaacacgaacaggagatgtcacggaccgtcaaggttcgggatggggagatccagaggctgaaatccgcactgtgcgccctgcgggacgggtctagcgataaggtcaggacagccctgaccatcgaagcaagagaggaggccagaaaactttttgacaccgagagactaaagctcctacaggaaatcgcggatctcaaaactgccaagaagcaggtggatgaggccttgagtaacatgattcaggccgacaagataaaggctggagaccttcgaagcgaacatcaaagccatcaggaggccatctctaagattaaatgggaaagcgagagggacatcagacggctgatggacgagatcaaagcaaaagaccgcatcatattttcactggaaaaagagttggaaactcagaccggatatgtgcagaagctccagctgcagaaggaggctctagatgaacaactcttcttagtgaaagaggcagaatgcaatatgtcaagtcccaaacgcgaaataccaggcagagcaggcgacggctccgaacactgcagttctcccgacctccgaagaaaccaaaaacggatcgcggaactcaatgcaaccatcagaaaactagaggatcggaatactctgctcggagacgagcgcaatgaattgctcaaaagagtccgtgagaccgagaaacagtgcaaaccactcctggagcgtaacaaatgccttgccaagcgcaatgacgaactgatggtcagcctgcagagaatggaggagaagctgaaggccgtgacaaaggaaaattccgagatgcgggagaaaatcaccagtcacccgcccctgaagaaattgaaatccctgaatgatctggatcaggcaaacgaggagcaggaaaccgagttcttgaaactgcaggtaattgagcagcagaatattatcgatgaactgacaagggatagagagaagctgattcggcgcagaaagcacaggaggtcttccaagcccattaaacgaccagtcttggacccctttattggatatgacgaagattcaatggattccgagacatctagtatggcaagctttcgaactgatcgaacccccgccactcccgacgacgatcttgatgagagcctggctgcggaggaatctgagctaaggtttcgtcagctaacaaaagagtaccaggccttacagagagcctacgcgttgttacaggagcagacaggaggtattatagatgctgaacgtgaggccaaggcccaagagcaacttcaggctgaagttctgaggtacaaagccaagattgaagatttggaagccaccctggcccaaaaagggcaggactcccattgggttgaggacaaacaactatttattaaaagaaaccaagagttgcttgagaaaatcgagaagcaggaagccgaaaatcatagactccagcaggaactgcaagatgcccgcgatcagaatgaattgctcgagttcaggaatctcgagttagaggaaagagagcggcggtctcctccttttaacttgcagattcaccctttttctgatggagttagcgccctacagatctattgcatgaaggaaggagtcaaagacgtaaacattcctgacctcattaagcagctggacatcttaggtgacaatggaaacctgcgtaatgaggaacaggttgccataatccaggcaagtacggtgctgtcattggccgaaaaatggatccagcaaatcgaaggagccgaagcagctctccatcagaaaatgatggagctggagagtgacatggaacagttctgtaaaattaaggggtacctggaagaggagctggattatcggaagcaggctctggaccaggcatatatgagaatacaggagctcgaagctaccttgtacaatgccctgcagcaggaaactgtgatcaagtttggtgaattgctgtccgagaaacagcaagaggagctgaggactgccgtcgagaagctgcggcgtcaaatgctgaggaaatccagggagtatgactgtcaaatactgcaagagaggatggagctgctgcagcaggcccatcagagaatccgggatcttgaggacaaaacagatatacaaaaacgccaaatcaaagatttggaggaaaagtttcttttcctgtttctgttcttctcactggcttttatcctatggccgtag

SEQ ID NO: 100800 - DNA, 2337 bp, Artificial Sequence
  derived and/or modified sequence
atggtgtccaaactggagcgagagaaaacccaggaggccaaaagaattagggagctggagcagcgaaagcatacggtgttagtcacagaattgaaggccaagcttcacgaagaaaaaatgaaggagttacaggccgtcagagagaatttaatcaaacaacatgagcaggaaatgtctagaacagttaaggtgcgggacggagaaatccagcgcttgaaatccgccctttgtgctctccgggacggctccagcgataaagtgcgcaccgccctgacaatcgaggccagagaagaggctcgaaagctcttcgataccgagaggctcaagctgctacaggagatagccgacctaaagactgccaaaaagcaagtcgatgaggccctgtctaacatgatccaggccgataagatcaaagccggagatctgcgatctgagcaccagtctcaccaggaggccatcagcaaaattaagtgggaaagcgaacgggacatccgccgactcatggacgaaatcaaagctaaagaccgtatcatcttcagcttggagaaagaactggagactcagacggggtacgtccagaagctgcaactgcagaaagaggccctggatgaacagctgtttctcgtgaaggaggctgaatgcaacatgagttcaccgaagcgggagatcccagggagggcaggcgacggctctgagcactgttcttctcccgacctccgaaggaatcaaaagcgcattgctgagctcaacgcaacaatcagaaaactcgaggataggaacacgctcctcggagacgaaagaaatgaactgctcaaaagggttcgcgagacagaaaaacagtgtaagcccctgctagaaaggaataaatgtctagccaaaagaaacgatgagctgatggtgagccttcagaggatggaggaaaaacttaaggcagtgaccaaggagaacagtgagatgcgggaaaagattacctcacacccccctctcaagaagttgaagagcctaaacgacctagaccaggcgaatgaagaacaggagacagagttcttgaagctgcaagtgattgaacagcagaatatcatcgatgagctgacccgggacagggaaaaattaatccgtcgtaggaaacaccggagaagctccaagccgattaagcggccagttcttgatcctttcatcggatatgacgaggacagcatggattctgagacaagcagcatggctagcttccgaaccgaccggacacccgcaacacctgatgatgacctagacgaatctttggcggctgaggaatccgagttacgctttcgtcagttgaccaaggagtaccaggccctgcaaagagcttatgcattgctgcaggaacagactggaggcatcatcgatgcggaaagggaagcaaaggctcaggagcagctccaggcagaggtgttgcggtacaaagccaaaatagaggatctggaggccactttggcacaaaagggacaagactcgcactgggtggaggataagcagctgttcataaagcgaaaccaagagctgctggaaaaaatcgaaaaacaggaggctgaaaatcacagactgcagcaggagctccaagatgccagagatcagaacgaactcctcgagtttcgaaatctagagttggaagaaagagaacgacgatcccctccatttaacttacagattcatccttttagcgacggggtctcagccctgcagatttactgtatgaaagagggcgtcaaggatgtgaatattcccgacctgatcaaacagcttgacatcttgggtgacaatggtaacctccgaaatgaggaacaggttgcaattatacaagccagtaccgtgctgtctctcgcggaaaaatggattcaacagattgagggcgctgaggccgcattacaccagaagatgatggagctggagagcgatatggagcagttttgcaaaatcaaaggctacctggaagaggagttagattataggaaacaagcgcttgaccaggcgtatatgcgcatccaggagcttgaggccactttgtacaatgccctgcagcaagagaccgttataaagtttggcgaacttctctcggagaagcaacaggaggagctgcgaacggctgtggagaagctgcgaaggcagatgctgaggaagtcccgcgagtatgattgtcaaatactgcaagagcggatggagttgttgcagcaggcacatcaacggatcagagatctggaagataaaactgatattcagaaacggcagattaaagacttagaggaaaagtttttgtttctgttcctcttcttcagtctggcctttatcttgtggccttag

SEQ ID NO: 100801 - protein, 735 aa, Artificial Sequence
  derived and/or modified sequence
MLVHLFRVGIRGGPFPGRLLPPLRFQTFSAVRNTWRNGKTGQLHKAEGEYSDGYRSSSLLRAVAHLRSQLWAHLPRAPLAPRWSPSAWCWVGGALLGPMVLSKHPHLCLVALCEAEEAPPASSTPHVVGSRFNWKLFWQFLHPHLLVLGVAVVLALGAALVNVQIPLLLGQLVEVVAKYTRDHVGSFMTESQNLSTHLLILYGVQGLLTFGYLVLLSHVGERMAVDMRRALFSSLLRQDITFFDANKTGQLVSRLTTDVQEFKSSFKLVISQGLRSCTQVAGCLVSLSMLSTRLTLLLMVATPALMGVGTLMGSGLRKLSRQCQEQIARAMGVADEALGNVRTVRAFAMEQREEERYGAELEACRCRAEELGRGIALFQGLSNIAFNCMVLGTLFIGGSLVAGQQLTGGDLMSFLVASQTVQRSMANLSVLFGQVVRGLSAGARVFEYMALNPCIPLSGGCCVPKEQLRGSVTFQNVCFSYPCRPGFEVLKDFTLTLPPGKIVALVGQSGGGKTTVASLLERFYDPTAGVVMLDGRDLRTLDPSWLRGQVVGFISQEPVLFGTTIMENIRFGKLEASDEEVYTAAREANAHEFITSFPEGYNTVVGERGTTLSGGQKQRLAIARALIKQPTVLILDEATSALDAESERVVQEALDRASAGRTVLVIAHRLSTVRGAHCIVVMADGRVWEAGTHEELLKKGGLYAELIRRQALDAPRTAAPPPKKPEGPRSHQHKS

SEQ ID NO: 100802 - protein, 467 aa, Artificial Sequence
  derived and/or modified sequence
MLVHLFRVGIRGGPFPGRLLPPLRFQTFSAVRRLLRLQPRVSQKEGTLGVSDHAQSALPTGGPLSWPWRYSDGYRSSSLLRAVAHLRSQLWAHLPRAPLAPRWSPSAWCWVGGALLGPMVLSKHPHLCLVALCEAEEAPPASSTPHVVGSRFNWKLFWQFLHPHLLVLGVAVVLALGAALVNVQIPLLLGQLVEVVAKYTRDHVGSFMTESQNLSTHLLILYGVQGLLTFGYLVLLSHVGERMAVDMRRALFSSLLRQDITFFDANKTGQLVSRLTTDVQEFKSSFKLVISQGLRSCTQVAGCLVSLSMLSTRLTLLLMVATPALMGVGTLMGSGLRKLSRQCQEQIARAMGVADEALGNVRTVRAFAMEQREEERYGAELEACRCRAEELGRGIALFQGLSNIAFNCMVLGTLFIGGSLVAGQQLTGGDLMSFLVASQTVQRQVHGQPLCPVWAGGPGAECRCPGL

SEQ ID NO: 100803 - DNA, 2208 bp, Artificial Sequence
  derived and/or modified sequence
atgttagtgcacttattccgagtcgggatccgcggaggtccttttcccgggcgcttactaccaccccttcgcttccagaccttctctgcagttagaaatacctggcggaacgggaagacaggccagcttcataaagcggaaggggagtactcagatggatatcgaagctcatctctgttacgcgctgtggcccacctccgcagtcagctgtgggctcatctcccacgcgctcccctggccccaagatggtctccatcggcctggtgctgggttgggggagcactgctgggccctatggtgcttagcaagcacccacatctgtgtttggtcgctctctgcgaggctgaggaggcaccaccggcatcatccacaccacacgttgtcggctcccgcttcaattggaagctcttctggcagttcctgcatcctcacttactcgtgctcggggtcgccgtggtcctggcgctgggtgccgcgctcgtcaacgtgcagatccccctgctactcggccaactcgttgaggtcgtggcaaaatatacccgtgatcatgtgggatcgtttatgacagagagccaaaatctgagtactcatttgctaattctgtacggcgtgcaaggcctgctgaccttcggatatcttgtcctcttaagtcacgtgggcgaacgaatggccgtcgacatgagaagggcgttgttctctagcctgcttagacaggatatcaccttctttgacgctaataaaaccggccagctggttagtcggctgactacagatgtccaggaatttaaatctagcttcaaattagtaatcagtcaggggcttcggagttgcacacaagtcgccggatgccttgtaagcctctccatgcttagcactcggctgacgctcctgctgatggtggctactcccgccttaatgggcgtcggtacacttatgggcagtggcttgagaaagctaagtaggcaatgtcaggaacagattgcaagggcaatgggcgtcgctgacgaagccttaggcaacgtccggaccgtgcgcgcttttgccatggaacaaagagaagaggagcggtacggggcggagctcgaagcctgtcggtgtagagctgaggagctcggccggggcattgcgctgtttcaggggctgagtaacatcgcctttaattgtatggtgctcggcactctctttataggtggaagcctggtggcggggcagcaactaaccggcggggacttgatgagctttctggtggcatctcagaccgttcagcgttctatggcaaaccttagtgtcctttttggccaggtggtgcgtggcctctctgcgggcgctagggtattcgaatatatggcgctcaacccttgcatccccctctcaggaggttgttgcgtgcccaaagagcaactgagaggctcagtgacgttccaaaacgtctgtttcagttatccttgccgtccaggatttgaggtgctgaaagattttaccctgaccctgccccctggtaaaatcgttgctctcgtcggacagagcgggggcggtaagaccacagtcgcctcgctcttagaacgcttctacgatcctacggcaggtgtagtgatgcttgacggtagggatttaagaacattagacccgagctggctgcgaggccaggtcgtgggttttatcagccaggagccagttctgttcgggacaaccattatggagaatatccgcttcggcaagctcgaagcaagtgacgaggaagtctacacagctgcccgtgaggcaaacgcccacgagtttattacctccttccctgagggttataataccgttgtcggggagaggggtacaacattgtcaggtggtcagaagcagagactggccattgcgcgagccttaatcaagcaaccaactgtcttgatcttagatgaggcgacaagcgccttggacgctgaatctgagcgcgtcgtacaggaggcgctggatcgagcttctgctggccggaccgtcctcgtcattgcgcatcgactgtccacggtgagaggcgcacattgcattgtcgtgatggcggacggacgggtctgggaggcggggacgcacgaggagctcctgaagaagggtggactgtacgcagagctgatccggaggcaggctctggacgccccaaggacagctgctcctccgccaaaaaaacccgagggtcccagatcccaccagcacaaaagctag

SEQ ID NO: 100804 - DNA, 1404 bp, Artificial Sequence
  derived and/or modified sequence
atgctcgttcacctttttcgtgtcgggatccgggggggaccgtttcctgggcgcctgctccctcctttacgcttccagacgttttcagccgttaggaggctattgcggctgcagccacgggtgtcccagaaggaaggtaccctcggggtgagcgaccatgcccagtccgccctgcccacgggtggacccctctcctggccttggagatatagcgatgggtatagatcctcgagcttgcttcgcgccgttgctcatctgagatctcagttgtgggcccatctgcctagagcacccctggcgccccgttggtccccgtctgcatggtgttgggtgggcggagctctgctgggtccgatggtactatccaagcatcctcacttgtgtctggttgccctatgcgaggccgaggaagctccacctgcctcctccacaccccatgtggtaggctcgagatttaactggaagcttttttggcagttcctacatcctcatctcttggtgttaggcgttgccgttgtgttggctttaggggccgcgctggtgaacgtgcagatcccacttctcctcggccagttagtggaagtcgtcgcaaaatacactcgggaccatgttgggtctttcatgaccgagtctcagaatctgtctacccatctgcttattctgtatggggtgcaaggtctcttgacattcgggtatctggtgctcctgtcccacgttggggagagaatggccgtggatatgcgcagggccctgttttcaagcctgttaaggcaggacatcactttctttgacgctaacaagacagggcagcttgtaagcagacttactacagacgtgcaagagttcaaaagctcgttcaaactggtcataagccagggacttcgctcatgcacacaggtcgcgggctgcctagtgtctctgtctatgctcagtacccgtctgacgttgctgctcatggtggccaccccagccctaatgggtgtcgggacactaatgggtagcggtcttaggaagctctctagacaatgccaagagcagattgctcgggctatgggggtcgctgacgaagcactcggaaatgttagaacggtgcgggcttttgctatggaacagcgtgaggaagaacgttacggcgctgagctggaggcttgtaggtgtagagcagaggaactcggcaggggcattgccctgtttcagggtctttccaatatagctttcaactgcatggtcctgggaactctctttattggcggcagcctcgtggcaggccagcaactgactgggggagacttgatgtccttcctggttgcctcacagaccgtgcagagacaagtccacgggcagccattatgccctgtctgggcaggaggccccggagcagagtgtagatgccccggcctgtag

SEQ ID NO: 100805 - DNA, 2208 bp, Artificial Sequence
  derived and/or modified sequence
atgctggtgcacctgttccgggtgggcatccggggcggccccttccctggccgcctgctgccccccctgcgcttccagaccttctctgctgtgaggaacacctggagaaatggcaagacaggccagctgcacaaggccgagggggagtacagtgatggctaccgcagcagcagcctgctgcgggctgtggcccacctgcggagccagctgtgggcccacctgccccgggcccccctggccccccgctggagccccagcgcctggtgctgggtgggcggggccctgctgggccccatggtgctgagcaagcacccccacctgtgcctggtggccctgtgtgaggccgaggaggcccccccagccagcagcaccccccacgtggtgggcagccgcttcaactggaagctgttctggcagttcctgcacccccacctgctggtgctgggcgtggccgtggtgctggccctgggcgccgccctggtgaatgtgcagatccccctgctgctgggccagctggtggaggtggtggccaagtacacccgggaccacgtgggcagcttcatgacagagagccagaacctgagcacccacctgctgatcctgtatggagtgcagggcctgctgaccttcggctacctggtgctgctgagccacgtgggggagaggatggctgtggacatgaggcgggccctcttcagcagcctgctgcggcaggacatcaccttctttgatgccaacaagacaggccagctggtgtcccggctgaccacagatgtgcaggagttcaagagcagcttcaagctggtgatcagccagggcctgcggagctgcacccaggtggccggctgcctggtgtccctgtccatgctgagcacccggctgaccctgctgctgatggtggccaccccagccctgatgggcgtgggcaccctgatgggcagcggcctgaggaagctgagccggcagtgccaggagcagatcgcccgggccatgggcgtggctgatgaggccctgggcaatgtgaggacagtgcgggcctttgccatggagcagcgggaggaggagagatatggagctgagctggaggcctgccgctgcagagctgaggagctgggccggggcatcgccctcttccagggcctgagcaacatcgccttcaactgcatggtgctgggcaccctcttcatcggcggcagcctggtggccggccagcagctgactggaggagacctgatgtccttcctggtggccagccagacagtgcagaggtccatggccaacctgtctgtgctgtttggccaggtggtgcggggcctgtctgctggggcccgggtgtttgagtacatggccctgaacccctgcatccccctgagcggcggctgctgcgtgcccaaggagcagctgcggggctctgtgaccttccagaatgtgtgcttctcctacccctgcaggcctggctttgaggtgctgaaggacttcaccctgaccctgcccccaggcaagatcgtggccctggtgggccagagcggcggcggcaagaccaccgtggccagcctgctggagcgcttctatgaccccacagctggggtggtgatgctggatggccgggacctgcggaccctggaccccagctggctgcggggccaggtggtgggcttcatcagccaggagcctgtgctgtttggcaccaccatcatggagaacatccgctttgggaagctggaggccagtgatgaggaggtgtacacagctgcccgggaggccaatgcccacgagttcatcaccagcttccctgagggctacaacacagtggtgggggagcggggcaccaccctgagcggcggccagaagcagaggctggccatcgcccgggccctgatcaagcagcccaccgtgctgatcctggatgaggccaccagcgccctggatgctgagagcgagcgggtggtgcaggaggccctggaccgggccagcgctggccgcacagtgctggtgattgcccaccggctgagcacagtgcggggggcccactgcatcgtggtgatggctgatggccgggtgtgggaggccggcacccatgaggagctgctgaagaagggcggcctgtatgcagagctgatccggcggcaggccctggatgcccccaggacagctgcccccccacccaagaagccagagggccccaggagccaccagcacaagagctag

SEQ ID NO: 100806 - DNA, 1404 bp, Artificial Sequence
  derived and/or modified sequence
atgctggtgcacctgttccgggtgggcatccggggcggccccttccctggccgcctgctgccccccctgcgcttccagaccttctctgctgtgcggcggctgctgcggctgcagccccgggtgtcccagaaggagggcaccctgggcgtgtctgaccacgcccagagcgccctgcccaccggcggccccctgtcctggccctggagatacagtgatggctaccgcagcagcagcctgctgcgggctgtggcccacctgcggagccagctgtgggcccacctgccccgggcccccctggccccccgctggagccccagcgcctggtgctgggtgggcggggccctgctgggccccatggtgctgagcaagcacccccacctgtgcctggtggccctgtgtgaggccgaggaggcccccccagccagcagcaccccccacgtggtgggcagccgcttcaactggaagctgttctggcagttcctgcacccccacctgctggtgctgggcgtggccgtggtgctggccctgggcgccgccctggtgaatgtgcagatccccctgctgctgggccagctggtggaggtggtggccaagtacacccgggaccacgtgggcagcttcatgacagagagccagaacctgagcacccacctgctgatcctgtatggagtgcagggcctgctgaccttcggctacctggtgctgctgagccacgtgggggagaggatggctgtggacatgaggcgggccctcttcagcagcctgctgcggcaggacatcaccttctttgatgccaacaagacaggccagctggtgtcccggctgaccacagatgtgcaggagttcaagagcagcttcaagctggtgatcagccagggcctgcggagctgcacccaggtggccggctgcctggtgtccctgtccatgctgagcacccggctgaccctgctgctgatggtggccaccccagccctgatgggcgtgggcaccctgatgggcagcggcctgaggaagctgagccggcagtgccaggagcagatcgcccgggccatgggcgtggctgatgaggccctgggcaatgtgaggacagtgcgggcctttgccatggagcagcgggaggaggagagatatggagctgagctggaggcctgccgctgcagagctgaggagctgggccggggcatcgccctcttccagggcctgagcaacatcgccttcaactgcatggtgctgggcaccctcttcatcggcggcagcctggtggccggccagcagctgactggaggagacctgatgtccttcctggtggccagccagacagtgcagaggcaggtgcacggccagcccctgtgccctgtgtgggccggcggccctggagcagaatgtcgctgccccggcctgtag

SEQ ID NO: 100807 - DNA, 2208 bp, Artificial Sequence
  derived and/or modified sequence
atgctggtgcacctgttccgggtgggcatccggggcggccccttccctggtcggctcctccctccacttagattccagaccttcagcgccgtgagaaatacctggagaaatggaaagaccggtcagctgcacaaggctgagggggagtattccgacggctatagatcaagctcgcttttacgcgcagtcgctcatctccgcagtcagctgtgggctcacttacctcgggctccgctcgcccctcgttggagtccaagtgcttggtgctgggtcgggggtgctctcctaggccccatggttttgtcaaaacacccacatctttgcctcgtcgctttatgcgaggcagaggaggccccgccagcttcatcaacaccccatgtcgttggcagccggtttaactggaagctcttctggcagttcctacatccgcatctgttggtgctgggtgtcgccgtcgtgctcgccctgggcgcagcactcgtgaacgtccagatcccactgctcctcggtcagctggtagaagtcgttgccaagtatacacgcgatcacgttggcagttttatgaccgagtctcagaacttatcaacacacttgctgattctctacggtgtccaaggccttcttacgttcgggtacctggtgttgctctctcatgtaggggaacggatggcagtggatatgaggagagcactgttttcatctctactgcgacaggacatcacattctttgatgccaacaaaacaggccaactcgtgagccgtctgacgactgacgtccaagaattcaaatcttctttcaaactagtaattagccagggtctacgaagctgcacccaggttgccggttgtttggtcagcctctcaatgttatctacgaggctgaccttacttctgatggtggcaacccctgctttaatgggcgtggggacactgatggggtccggacttagaaagctgtcaagacagtgccaagaacagatcgccagggctatgggggttgctgacgaggcgctcggcaacgtgcggacagttagggcattcgctatggaacagcgtgaggaagagagatacggcgccgaattggaggcatgcagatgcagagctgaggaacttggtcggggcatcgcattattccaaggactgagcaatatagcgtttaattgtatggtactcggcacactctttatcggggggagtctcgtggccggacaacagctgactgggggagacctcatgagctttttggtagcctcccagaccgtgcagcgctcgatggccaacctatcagtcctgttcggccaggtggtccggggtctttcggccggggcccgcgtgtttgagtacatggccctcaatccatgtatccctctgtccgggggatgctgcgttccaaaggaacagttaagaggcagcgttactttccagaacgtgtgcttttcgtacccctgtcgccctgggtttgaagtgctgaaggacttcacactcacgctgccccctggcaagatcgttgctctggttggccagagtgggggagggaagaccaccgtggcctccctgctggaaaggttttatgatcctacggcaggagtcgtgatgctggacggccgagatctgcgcactctggaccctagctggctgcgtgggcaggtcgtgggattcatatctcaggaaccagttctgtttggaactaccattatggagaacatccgttttgggaagcttgaagccagcgacgaggaggtgtacaccgctgcccgggaggcaaatgcccacgaatttatcacctccttcccagagggatataacactgtggtgggagaaagagggactaccctgtcagggggccagaaacaaaggttggctattgcaagagcgctcataaaacagcctacggtgctcatcctagacgaagctacctcagctctcgacgcggagagcgaaagggtagtgcaggaggctttagaccgcgcgtcagcaggaagaaccgtcctcgtgatcgctcacagactgtcgaccgttcgcggcgcacattgtatcgttgtaatggccgatggtcgggtatgggaagcagggacccacgaggagttgctgaagaagggcggtctatacgccgagctcattagacgacaagcgcttgatgcacctcgcaccgccgcgcccccccccaagaaaccagagggccctcgatcacatcaacacaagagttag

SEQ ID NO: 100808 - DNA, 1404 bp, Artificial Sequence
  derived and/or modified sequence
atgctggtgcacctgttccgggtgggcatccggggcggccccttccccggcaggttgctccccccgctaagatttcagacatttagtgccgtcaggagactcctacgcctgcagcccagggtgagtcagaaagaaggaacactgggggtgtcggatcacgcccaatccgcactgccaactggtggacccttgagctggccctggcgatatagtgacggctaccgctctagttccttgctgagggccgtcgcccacctgcgttcacagctctgggctcacctgccgagagcccctcttgctcccagatggagccccagtgcatggtgctgggtcggtggcgccttgctgggaccgatggtgctctccaagcatcctcacctgtgtttggtggcattatgtgaggccgaggaagcaccaccagcatcttccacgcctcatgtggtcgggagcaggtttaattggaaacttttctggcaattccttcaccctcacttgcttgtgctgggagtcgccgtggtcctggcactaggagcagcactggtgaacgtgcagattcccctcctcctgggccagcttgtcgaggtggttgctaagtatacccgggaccatgttggatcattcatgactgagtctcagaacttgtctacacacctgctgatcctttacggcgtccaaggactgttaaccttcggatatcttgtactgctgtcccatgtgggagagcgcatggcagtggatatgaggcgggctcttttttcatcactcctccgacaggacatcaccttcttcgatgccaacaagactggtcagctggtcagtcgactgacaacggatgtccaggaattcaagtctagcttcaagctagtcatatcacaaggacttagaagctgcacacaggttgcaggctgtctagtctctctttcgatgctctctacacgactgacactattattgatggttgcaactccggcgcttatgggggtgggcactctcatgggctccggcctgcgcaagctttctcggcagtgccaggaacagatcgctcgtgcaatgggggtcgcagacgaagcattgggaaatgtgagaactgtgcgggctttcgccatggaacagcgggaggaagagcggtacggcgctgagctagaggcctgccgctgccgagccgaagaattggggcggggcatcgctttgtttcaaggcctgagcaatatcgcttttaactgcatggtcctgggaaccctttttattggagggagcctggttgcggggcaacagctgaccggcggggatcttatgagtttcctcgtcgcctctcagacagttcagaggcaggtccatggccaacccctgtgtcccgtgtgggcaggcggacccggggctgaatgcaggtgtccaggtctgtag

SEQ ID NO: 100809 - DNA, 2208 bp, Artificial Sequence
  derived and/or modified sequence
atgctggtccatctctttagagtcgggattagaggagggccttttccaggaagactgctgccccctttgcggtttcagacattctcagccgtgagaaacacctggcggaatggaaagaccggtcagcttcataaggccgaaggcgagtatagcgacggatatagatctagcagtctactgcgggcagtcgcccatcttcgcagccagctgtgggcacacctgccgcgtgccccattggcacctcgatggtccccaagcgcctggtgttgggtgggcggtgccctgttagggcctatggtgctgagcaagcatccccatctgtgcctcgtggccctatgcgaggccgaagaggcgccaccagccagttcaaccccacacgttgtaggctcccggttcaactggaaactcttctggcagtttctccatccccaccttctggtgctgggcgtggctgtcgtactcgctcttggagccgctctggtgaacgtgcagattcctctgctcctcgggcaattggtcgaagtcgttgctaagtacaccagggaccacgtcggatcatttatgactgaaagtcagaatctgtctacacatcttctaattctttacggcgtgcagggcctgctgacattcggctacctggtcttgctgtcccacgttggcgaacgtatggctgtcgatatgaggcgagcactcttttccagcctgctgcgccaggatattaccttctttgacgccaacaagactgggcagttagtcagcaggctgaccacagacgtgcaggaatttaagagctcctttaagttggttattagccagggactacgaagctgtactcaggttgctggatgcttggtcagtctgtcaatgctgagcacacgacttacattacttctcatggtggccacacccgcactcatgggggtgggcaccctgatgggaagtggattgcgaaaactcagtaggcaatgtcaggagcagatagcccgagcaatgggcgtcgccgatgaggccctgggtaatgttcgtacagtccgggcatttgccatggaacagagagaagaggaaaggtacggagctgaactggaagcctgcaggtgccgggctgaagagcttggaagaggcattgctctctttcaggggctctcaaatattgctttcaactgcatggtcttagggacactgtttattggaggttcactggttgcaggtcaacagttaaccggcggagatctgatgtccttcttggtggcttctcagacagtgcaaagaagtatggcaaacttgtcagttttgttcgggcaggtggttcggggactcagcgccggagccagggtattcgaatacatggctctcaacccttgcatacccctttcaggaggatgttgtgtgcctaaagaacaactgcgagggagcgtgacattccagaacgtatgtttcagctacccctgtcgccctggtttcgaggtgctgaaagatttcacactgaccctcccgccaggtaaaatcgtggcacttgtaggccagtccggagggggaaagaccacagtagcaagcctgctcgaacggttttatgatccaacggcgggtgtggtgatgcttgatggacgggacctccgtaccttggacccttcttggctgaggggccaggtggtcggcttcatcagtcaggaaccggtcttattcggaaccactattatggaaaacatccgctttggaaagctggaggccagcgatgaggaagtgtataccgccgcacgcgaagctaacgcccacgagtttataacatcctttccagaagggtataacaccgtcgtgggagagcggggaaccacactgagcggtggccaaaaacaacggctcgctattgctcgggctctcatcaagcagccaacagtgttaattttagacgaggctacttccgccctggatgccgagtcagagagagttgtccaggaagccctggaccgggctagtgccggaagaacggtattggtcattgcccaccggctatccaccgtgcggggagcgcactgtatcgtggtcatggcagacggacgggtttgggaagcaggcacacatgaagagttactgaaaaaaggcggtctgtacgctgaactcatacggaggcaggcgctggacgctcccaggaccgccgctccaccgcctaagaagcctgaaggcccaaggtctcaccagcacaaatcttag

SEQ ID NO: 100810 - DNA, 1404 bp, Artificial Sequence
  derived and/or modified sequence
atgctcgtgcacctgttccgcgtgggcattagaggcggaccctttcctggtaggctgctccctccactgcggtttcagacattcagcgccgtgaggcgactcttgaggctgcagcccagagtgagccagaaggaaggcactctgggggtgtcagatcatgcacagtccgccctccctaccggcggaccactgagctggccctggcgctactcggatggctacaggagttcttcactcttgcgagcagtggcacatttgcggtcgcagctctgggcacacctaccgagagcgcctttggcaccccgttggtctccatccgcatggtgttgggtgggcggagctttgttgggccctatggtcctcagcaagcacccccatttatgcctagtcgcgctttgtgaagccgaagaggccccaccggctagctctactccgcatgtggtgggcagccgcttcaactggaaactgttctggcagttcctgcacccacacctgttggtgctcggggtcgctgtggtgttggctctaggtgccgctctggtgaatgttcagatccccctcttgctgggacaactggtggaggtagtggccaagtatacgcgcgaccacgtgggcagcttcatgacagagtctcagaacctttccacacacctcttgatactgtacggcgtccaggggctgctgacgttcggatacttggtcttgctgtctcatgttggggaacgaatggcagtggacatgcgccgtgccctgttttcatccctgctcagacaagacattaccttttttgatgctaataagacagggcagctcgtctcccgactgactactgacgttcaggaatttaagtcctccttcaagttagtgatttcacagggactccgttcctgcactcaggttgccggatgtctggtgtcactctcaatgctctctacgagactgacgctcctgctgatggtagccacgccggctcttatgggagtcggcaccttgatggggtctgggttgagaaaactgtctcgccagtgtcaagagcaaattgcaagagcaatgggagtggcagatgaagctttggggaacgttcgtacagtccgcgcattcgcaatggagcagcgggaagaagaaagatatggagcagaactggaggcctgtaggtgcagggccgaggaactggggaggggcatcgcactgttccagggcctctctaatattgcatttaattgcatggtccttggcaccctcttcatcggaggttcgctagttgccggacagcagcttacagggggagatcttatgtctttcctcgtggcaagccaaacagtgcagaggcaggtgcacggtcagcctttatgtccagtttgggcagggggaccaggggcagaatgtagatgtccgggattatag

SEQ ID NO: 100811 - DNA, 2487 bp, Artificial Sequence
  derived and/or modified sequence
atagagccctcagtgggatgagggtgaaactgctattgccggcggctcctgttttaccgcgtcagcatgctggtgcatttatttcgggtcgggattcggggtggcccattcccaggcaggctgctaccgcccctccgcttccagacattctcagctgtcagaaacacatggcgtaatgggaaaactggacagttacacaaggcagaaggagagtactctgatggctaccgcagctcctccctcctccgggccgtggcccacctgcggtcccagctctgggcccacctccctcgagcccccctagctcccagatggagcccctctgcctggtgctgggttgggggagccctgctaggccccatggtactgagtaagcatccccacctctgccttgtggccctgtgtgaggcagaagaggcccctcctgccagctccacaccccatgtcgtggggtctcgctttaactggaagctcttctggcagtttctgcacccccacctgctggtcctgggggtagccgtcgtgctggccttgggtgcggcactcgtgaatgtacagatccccctgctcctgggccagctggtagaggtcgtggccaagtacacaagggaccacgtagggagtttcatgactgagtcccagaatctcagcacccacctgcttatcctctatggtgtccagggactgctgaccttcgggtacctggtgctgctgtcccacgttggcgagcgcatggctgtggacatgcggagggccctcttcagctccctgctccgacaagacatcaccttctttgacgccaataagacagggcagctggtgagccgcttgacaactgacgtgcaggagtttaagtcatccttcaagcttgtcatctcccaggggctgcgaagctgcacccaggtggcaggctgcctggtgtccctgtccatgctgtcgacacgcctcacgctgctgctgatggtggccacaccagccctgatgggagtgggcaccctgatgggctcaggcctccgaaaattgtctcgccagtgtcaggagcagatcgccagggcaatgggcgtagcagacgaggccctgggcaatgtgcggactgtgcgtgccttcgccatggagcaacgggaagaggagcgctatggggcagagctggaagcctgccgctgccgggcagaggagctgggccgcggcatcgccttgttccaagggctttccaacatcgccttcaactgcatggtcttgggtaccctatttattgggggctcccttgtggccggacagcagctgacagggggagacctcatgtccttcctggtggcctcccagacagtgcaaaggtccatggccaacctctctgtcctgtttgggcaggtggtccgggggctgagtgcaggtgcccgggtctttgagtacatggccctgaacccctgcatcccactgtctgggggctgctgcgtccccaaagagcagctgcgtggctccgttacatttcagaacgtctgcttcagctacccctgccgccccggcttcgaggtgctgaaagacttcaccctgacgctgccccctggcaagatcgtggccctcgtgggccagtctggcggaggaaagaccaccgtggcttccctgctggagcgcttctacgaccccacggcaggcgtggtgatgctggatgggcgggacctgcgcacccttgacccctcctggctccggggccaggttgtcggcttcatcagccaggagcccgtcctgtttgggacgaccatcatggaaaacatccgctttgggaagctggaagcttccgatgaagaggtgtacacagccgcccgggaagcgaatgctcacgagttcatcaccagcttccccgagggctacaacacggtcgtcggtgaacggggcactaccctgtctgggggccagaagcagcgcctggccatcgcccgagcccttatcaagcagcccacggtgctgatactggatgaagctaccagcgcgctggatgcagagtccgagcgggttgtacaggaggccctggaccgggccagtgcaggccgcacggtgctggtaattgcccaccggctcagcactgtccgtggggcccactgcattgtcgtcatggccgatggccgtgtctgggaggctgggacacatgaagagctcctgaagaaaggcgggctatacgccgagctcatccggaggcaggccctggatgccccgaggacagcggccccaccgcccaaaaagccagaaggccccaggagccaccagcacaagtcctgagaagggccccctgaggtgtggtcgctgccaagcatcagtgttagggctggggctcagcctgggggagcctactggggactgagcccccaggagggccagcatgtggagagtcgctgcggctgctcctgctcacaataaagccggggccgagcagctggcaggggaggccaatccctccctcccctccccagtcctgccggctgcctccctccc

SEQ ID NO: 100812 - DNA, 2539 bp, Artificial Sequence
  derived and/or modified sequence
gtgggatgagggtgaaactgctattgccggcggctcctgttttaccgcgtcagcatgctggtgcatttatttcgggtcgggattcggggtggcccattcccaggcaggctgctaccgcccctccgcttccagacattctcagctgtcaggaggctcctgcgtctgcagccgcgtgtcagccagaaggaggggacgctcggggtcagtgaccacgcccagtccgcactcccgaccgggggtcccctttcctggccctggaggtactctgatggctaccgcagctcctccctcctccgggccgtggcccacctgcggtcccagctctgggcccacctccctcgagcccccctagctcccagatggagcccctctgcctggtgctgggttgggggagccctgctaggccccatggtactgagtaagcatccccacctctgccttgtggccctgtgtgaggcagaagaggcccctcctgccagctccacaccccatgtcgtggggtctcgctttaactggaagctcttctggcagtttctgcacccccacctgctggtcctgggggtagccgtcgtgctggccttgggtgcggcactcgtgaatgtacagatccccctgctcctgggccagctggtagaggtcgtggccaagtacacaagggaccacgtagggagtttcatgactgagtcccagaatctcagcacccacctgcttatcctctatggtgtccagggactgctgaccttcgggtacctggtgctgctgtcccacgttggcgagcgcatggctgtggacatgcggagggccctcttcagctccctgctccgacaagacatcaccttctttgacgccaataagacagggcagctggtgagccgcttgacaactgacgtgcaggagtttaagtcatccttcaagcttgtcatctcccaggggctgcgaagctgcacccaggtggcaggctgcctggtgtccctgtccatgctgtcgacacgcctcacgctgctgctgatggtggccacaccagccctgatgggagtgggcaccctgatgggctcaggcctccgaaaattgtctcgccagtgtcaggagcagatcgccagggcaatgggcgtagcagacgaggccctgggcaatgtgcggactgtgcgtgccttcgccatggagcaacgggaagaggagcgctatggggcagagctggaagcctgccgctgccgggcagaggagctgggccgcggcatcgccttgttccaagggctttccaacatcgccttcaactgcatggtcttgggtaccctatttattgggggctcccttgtggccggacagcagctgacagggggagacctcatgtccttcctggtggcctcccagacagtgcaaaggcaggtccatggccaacctctctgtcctgtttgggcaggtggtccgggggctgagtgcaggtgcccgggtctttgagtacatggccctgaacccctgcatcccactgtctgggggctgctgcgtccccaaagagcagctgcgtggctccgttacatttcagaacgtctgcttcagctacccctgccgccccggcttcgaggtgctgaaagacttcaccctgacgctgccccctggcaagatcgtggccctcgtgggccagtctggcggaggaaagaccaccgtggcttccctgctggagcgcttctacgaccccacggcaggcgtggtgatgctggatgggcgggacctgcgcacccttgacccctcctggctccggggccaggttgtcggcttcatcagccaggagcccgtcctgtttgggacgaccatcatggaaaacatccgctttgggaagctggaagcttccgatgaagaggtgtacacagccgcccgggaagcgaatgctcacgagttcatcaccagcttccccgagggctacaacacggtcgtcggtgaacggggcactaccctgtctgggggccagaagcagcgcctggccatcgcccgagcccttatcaagcagcccacggtgctgatactggatgaagctaccagcgcgctggatgcagagtccgagcgggttgtacaggaggccctggaccgggccagtgcaggccgcacggtgctggtaattgcccaccggctcagcactgtccgtggggcccactgcattgtcgtcatggccgatggccgtgtctgggaggctgggacacatgaagagctcctgaagaaaggcgggctatacgccgagctcatccggaggcaggccctggatgccccgaggacagcggccccaccgcccaaaaagccagaaggccccaggagccaccagcacaagtcctgagaagggccccctgaggtgtggtcgctgccaagcatcagtgttagggctggggctcagcctgggggagcctactggggactgagcccccaggagggccagcatgtggagagtcgctgcggctgctcctgctcacaataaagccggggccgagcagctggcaggggaggccaatccctccctcccctccccagtcctgccggctgcctccctccc

SEQ ID NO: 100813 - DNA, 2208 bp, Artificial Sequence
  derived and/or modified sequence
atgctggtgcacctgttcagagtgggcatcagaggcggccccttccccggcagactgctgccccccctgagattccagaccttcagcgccgtgagaaacacctggagaaacggcaagaccggccagctgcacaaggccgagggcgagtacagcgacggctacagaagcagcagcctgctgagagccgtggcccacctgagaagccagctgtgggcccacctgcccagagcccccctggcccccagatggagccccagcgcctggtgctgggtgggcggcgccctgctgggccccatggtgctgagcaagcacccccacctgtgcctggtggccctgtgcgaggccgaggaggccccccccgccagcagcaccccccacgtggtgggcagcagattcaactggaagctgttctggcagttcctgcacccccacctgctggtgctgggcgtggccgtggtgctggccctgggcgccgccctggtgaacgtgcagatccccctgctgctgggccagctggtggaggtggtggccaagtacaccagagaccacgtgggcagcttcatgaccgagagccagaacctgagcacccacctgctgatcctgtacggcgtgcagggcctgctgaccttcggctacctggtgctgctgagccacgtgggcgagagaatggccgtggacatgagaagagccctgttcagcagcctgctgagacaggacatcaccttcttcgacgccaacaagaccggccagctggtgagcagactgaccaccgacgtgcaggagttcaagagcagcttcaagctggtgatcagccagggcctgagaagctgcacccaggtggccggctgcctggtgagcctgagcatgctgagcaccagactgaccctgctgctgatggtggccacccccgccctgatgggcgtgggcaccctgatgggcagcggcctgagaaagctgagcagacagtgccaggagcagatcgccagagccatgggcgtggccgacgaggccctgggcaacgtgagaaccgtgagagccttcgccatggagcagagagaggaggagagatacggcgccgagctggaggcctgcagatgcagagccgaggagctgggcagaggcatcgccctgttccagggcctgagcaacatcgccttcaactgcatggtgctgggcaccctgttcatcggcggcagcctggtggccggccagcagctgaccggcggcgacctgatgagcttcctggtggccagccagaccgtgcagagaagcatggccaacctgagcgtgctgttcggccaggtggtgagaggcctgagcgccggcgccagagtgttcgagtacatggccctgaacccctgcatccccctgagcggcggctgctgcgtgcccaaggagcagctgagaggcagcgtgaccttccagaacgtgtgcttcagctacccctgcagacccggcttcgaggtgctgaaggacttcaccctgaccctgccccccggcaagatcgtggccctggtgggccagagcggcggcggcaagaccaccgtggccagcctgctggagagattctacgaccccaccgccggcgtggtgatgctggacggcagagacctgagaaccctggaccccagctggctgagaggccaggtggtgggcttcatcagccaggagcccgtgctgttcggcaccaccatcatggagaacatcagattcggcaagctggaggccagcgacgaggaggtgtacaccgccgccagagaggccaacgcccacgagttcatcaccagcttccccgagggctacaacaccgtggtgggcgagagaggcaccaccctgagcggcggccagaagcagagactggccatcgccagagccctgatcaagcagcccaccgtgctgatcctggacgaggccaccagcgccctggacgccgagagcgagagagtggtgcaggaggccctggacagagccagcgccggcagaaccgtgctggtgatcgcccacagactgagcaccgtgagaggcgcccactgcatcgtggtgatggccgacggcagagtgtgggaggccggcacccacgaggagctgctgaagaagggcggcctgtacgccgagctgatcagaagacaggccctggacgcccccagaaccgccgcccccccccccaagaagcccgagggccccagaagccaccagcacaagagctag

SEQ ID NO: 100814 - DNA, 1404 bp, Artificial Sequence
  derived and/or modified sequence
atgctggtgcacctgttcagagtgggcatcagaggcggccccttccccggcagactgctgccccccctgagattccagaccttcagcgccgtgagaagactgctgagactgcagcccagagtgagccagaaggagggcaccctgggcgtgagcgaccacgcccagagcgccctgcccaccggcggccccctgagctggccctggagatacagcgacggctacagaagcagcagcctgctgagagccgtggcccacctgagaagccagctgtgggcccacctgcccagagcccccctggcccccagatggagccccagcgcctggtgctgggtgggcggcgccctgctgggccccatggtgctgagcaagcacccccacctgtgcctggtggccctgtgcgaggccgaggaggccccccccgccagcagcaccccccacgtggtgggcagcagattcaactggaagctgttctggcagttcctgcacccccacctgctggtgctgggcgtggccgtggtgctggccctgggcgccgccctggtgaacgtgcagatccccctgctgctgggccagctggtggaggtggtggccaagtacaccagagaccacgtgggcagcttcatgaccgagagccagaacctgagcacccacctgctgatcctgtacggcgtgcagggcctgctgaccttcggctacctggtgctgctgagccacgtgggcgagagaatggccgtggacatgagaagagccctgttcagcagcctgctgagacaggacatcaccttcttcgacgccaacaagaccggccagctggtgagcagactgaccaccgacgtgcaggagttcaagagcagcttcaagctggtgatcagccagggcctgagaagctgcacccaggtggccggctgcctggtgagcctgagcatgctgagcaccagactgaccctgctgctgatggtggccacccccgccctgatgggcgtgggcaccctgatgggcagcggcctgagaaagctgagcagacagtgccaggagcagatcgccagagccatgggcgtggccgacgaggccctgggcaacgtgagaaccgtgagagccttcgccatggagcagagagaggaggagagatacggcgccgagctggaggcctgcagatgcagagccgaggagctgggcagaggcatcgccctgttccagggcctgagcaacatcgccttcaactgcatggtgctgggcaccctgttcatcggcggcagcctggtggccggccagcagctgaccggcggcgacctgatgagcttcctggtggccagccagaccgtgcagagacaggtgcacggccagcccctgtgccccgtgtgggccggcggccccggcgccgagtgcagatgccccggcctgtag

SEQ ID NO: 100815 - protein, 431 aa, Artificial Sequence
  derived and/or modified sequence
MLVHLFRVGIRGGPFPGRLLPPLRFQTFSAVRYSDGYRSSSLLRAVAHLRSQLWAHLPRAPLAPRWSPSAWCWVGGALLGPMVLSKHPHLCLVALCEAEEAPPASSTPHVVGSRFNWKLFWQFLHPHLLVLGVAVVLALGAALVNVQIPLLLGQLVEVVAKYTRDHVGSFMTESQNLSTHLLILYGVQGLLTFGYLVLLSHVGERMAVDMRRALFSSLLRQDITFFDANKTGQLVSRLTTDVQEFKSSFKLVISQGLRSCTQVAGCLVSLSMLSTRLTLLLMVATPALMGVGTLMGSGLRKLSRQCQEQIARAMGVADEALGNVRTVRAFAMEQREEERYGAELEACRCRAEELGRGIALFQGLSNIAFNCMVLGTLFIGGSLVAGQQLTGGDLMSFLVASQTVQSFLRVAPCPNSLPLQAVTFHAWKDHP

SEQ ID NO: 100816 - protein, 693 aa, Artificial Sequence
  derived and/or modified sequence
MLVHLFRVGIRGGPFPGRLLPPLRFQTFSAVRYSDGYRSSSLLRAVAHLRSQLWAHLPRAPLAPRWSPSAWCWVGGALLGPMVLSKHPHLCLVALCEAEEAPPASSTPHVVGSRFNWKLFWQFLHPHLLVLGVAVVLALGAALVNVQIPLLLGQLVEVVAKYTRDHVGSFMTESQNLSTHLLILYGVQGLLTFGYLVLLSHVGERMAVDMRRALFSSLLRQDITFFDANKTGQLVSRLTTDVQEFKSSFKLVISQGLRSCTQVAGCLVSLSMLSTRLTLLLMVATPALMGVGTLMGSGLRKLSRQCQEQIARAMGVADEALGNVRTVRAFAMEQREEERYGAELEACRCRAEELGRGIALFQGLSNIAFNCMVLGTLFIGGSLVAGQQLTGGDLMSFLVASQTVQRSMANLSVLFGQVVRGLSAGARVFEYMALNPCIPLSGGCCVPKEQLRGSVTFQNVCFSYPCRPGFEVLKDFTLTLPPGKIVALVGQSGGGKTTVASLLERFYDPTAGVVMLDGRDLRTLDPSWLRGQVVGFISQEPVLFGTTIMENIRFGKLEASDEEVYTAAREANAHEFITSFPEGYNTVVGERGTTLSGGQKQRLAIARALIKQPTVLILDEATSALDAESERVVQEALDRASAGRTVLAGTHEELLKKGGLYAELIRRQALDAPRTAAPPPKKPEGPRSHQHKS

SEQ ID NO: 100817 - DNA, 1296 bp, Artificial Sequence
  derived and/or modified sequence
atgctagtgcacctcttccgggttggaatccgaggcggtcccttcccgggtcgcctattgccccctctccgctttcagacatttagcgccgtgaggtatagtgacggctacagatccagttccctgcttcgcgctgtggcacatctcagaagccagctgtgggcacatctcccccgggcccccctcgccccaagatggtcgccttctgcttggtgctgggtcggaggcgcactactgggacccatggtcctatctaaacaccctcacctctgtctggttgcactctgtgaagccgaggaggcccctcctgctagcagcacacctcatgtggtgggtagccgatttaattggaagcttttttggcagtttttacaccctcatcttctcgtgctgggcgtggctgtcgttctggcattgggtgccgccttggtcaacgtccagattccactcctcctagggcagttggtggaagttgtggccaagtatactcgggatcacgtcgggtcttttatgacagagtcacagaacctctccacccatttgctgatactttatggtgtgcaggggttgctaacatttggatatctcgtcctcctaagccatgtcggagaacgcatggcggttgacatgcggcgtgccctgttctcatcgttgctcaggcaagacatcacattttttgacgccaacaaaactgggcaactagtctcacgtctgacaacggatgtgcaggaattcaagagctccttcaagctcgtgattagccagggacttcggtcatgcacccaagttgccggctgtctggtgtcattaagtatgctcagcacccgcctgaccctcctgctgatggtggcgactcccgctctgatgggagttggtacgctcatgggaagcggtctccgaaagttgtcgagacagtgccaagaacagattgcccgcgccatgggggttgccgacgaggccctgggaaacgtacggactgtgagggctttcgctatggagcagcgcgaagaggaacggtacggcgccgagctcgaagcctgtcgctgtagagctgaggagctcgggcggggaatcgccctgttccagggattgtctaatatcgcctttaactgtatggtcctcggtacactgtttataggcggcagcctggtagcgggtcagcagctcaccggcggagatctcatgagctttcttgtggctagccagacagtccagtccttcctgcgtgtggctccctgccccaacagcctgccactccaggccgtaacattccatgcctggaaggatcatccgtag
